(19) United States
(12) Patent Application Publication
(10) Pub. No.: US 2023/0302116 A1
(43) Pub. Date: Sep. 28, 2023

(54) VARIANT SARS-CoV-2 PROTEINS AND USES THEREOF

(71) Applicant: Ginkgo Bioworks, Inc., Boston, MA (US)

(72) Inventors: Ariel H. HECHT, Boston, MA (US); Seth C. Ritter, Revere, MA (US); Emily E. Wrenbeck, Milton, MA (US)

(21) Appl. No.: 17/923,327

(22) PCT Filed: May 5, 2021
(86) PCT No.: PCT/US21/30875

§ 371 Date: Nov. 4, 2022

Related U.S. Application Data
(60) Provisional application No. 63/057,654, filed on Jul. 28, 2020.
(60) Provisional application No. 63/020,978, filed on May 6, 2020.

(51) Int. Cl. A61K 39/215; C07K 14/005; A61P 31/14; C12N 15/86; G01N 33/569

(52) U.S. Cl. CPC A61K 39/215; C07K 14/005; A61P 31/14; C12N 15/86; G01N 33/56983; C12N 2770/20022; C12N 2770/20034; C12N 2770/20071; G01N 2469/20; G01N 2333/165

(57) ABSTRACT

The present disclosure relates to variants of SARS-CoV-2 nucleocapsid protein, spike protein, and spike protein receptor binding domain (RBD), as well as nucleic acids encoding such variants and methods of use thereof. Such variants are useful in diagnostic test kits and vaccines for SARS-CoV-2.

### RELATED APPLICATIONS

[0001] This application claims priority to U.S. Provisional Application 63/020,978, filed May 6, 2020, and U.S. Provisional Application 63/057,654, filed Jul. 28, 2020, each of which is incorporated herein by reference in its entirety.

### SEQUENCE LISTING

[0002] The instant application contains a Sequence Listing which has been submitted electronically in ASCII format and is hereby incorporated by reference in its entirety. Said ASCII copy, created on May 5, 2021, is named GBB-00125_SL.txt and is 34,065,359 bytes in size.

### BACKGROUND

[0003] Coronaviruses are characterized by club-like spike proteins that project from their surface, a large RNA genome, and a unique replication strategy. Outbreaks of highly pathogenic Severe Acute Respiratory Syndrome coronavirus (SARS-CoV), Middle East Respiratory Syndrome coronavirus (MERS-CoV), and most recently SARS-CoV-2 have occurred.

[0004] COVID-19, caused by SARS-CoV-2, emerged in Wuhan, China in late 2019 and quickly spread worldwide, resulting in millions of confirmed cases and hundreds of thousands of deaths. While lockdowns, social distancing and the use of masks, gloves and personal protective equipment have slowed the spread of the disease, the successful emergence of a region or population from lockdown is dependent on the wide availability of vaccines or, at a minimum, accurate and specific diagnostic test kits for SARS-CoV-2 infection. However, vaccines are still at an early stage in development, and many of the currently available diagnostic test kits for SARS-CoV-2 lack accuracy and specificity. In addition, there are currently no vaccines to SARS-CoV-2 which have been proven to be efficacious and which are widely available.

[0005] Hence, there is an urgent need for vaccines against and accurate and specific diagnostic test kits for SARS-CoV-2.

### SUMMARY

[0006] The present disclosure relates to variants of the nucleocapsid protein, spike protein, and spike protein receptor binding domain (RBD) of SARS-CoV-2, the causative agent of COVID-19. In certain embodiments, the protein variants provided herein are optimized for immunogenicity, stability and/or other desirable qualities. In some embodiments, the variants provided herein are useful in vaccine formulations. In some embodiments, the variants provided herein are useful for preparation of diagnostic test kits for determining the presence of a SARS-CoV-2 antibody in human subjects.

[0007] In certain aspects, provided herein are SARS-CoV-2 nucleocapsid protein variants (e.g., non-naturally occurring SARS-CoV-2 nucleocapsid protein variants). In some embodiments, the amino acid sequence of the variant comprises an amino acid sequence with at least 80% at least 85% at least 90%, at least 91%, at least 92%, at least 93%, at least 94%, at least 95%, at least 96%, at least 97%, at least 98%, or at least 99% identity to amino acids 254-671 of any of SEQ ID NOs: 598 to 1194. In some embodiments, the variant comprises an amino acid sequence of amino acids 254-671 of any of SEQ ID NOs: 598 to 1194.

[0008] In certain aspects, provided herein are SARS-CoV-2 nucleocapsid protein variants (e.g., non-naturally occurring SARS-CoV-2 nucleocapsid protein variants). In some embodiments, the amino acid sequence of the variant comprises an amino acid sequence with at least 80% at least 85%, at least 90%, at least 91%, at least 92%, at least 93%, at least 94%, at least 95%, at least 96%, at least 97%, at least 98%, or at least 99% identity to amino acids 379-796 of any of SEQ ID NOs: 3202-3799. In some embodiments, the variant comprises an amino acid sequence of amino acids 379-796 of any of SEQ ID NOs: 3202-3799.

[0009] In some aspects, provided herein are SARS-CoV-2 spike protein variants (e.g., non-naturally occurring SARS-CoV-2 spike protein variants). In some embodiments, the amino acid sequence of the variant comprises an amino acid sequence with at least 80%, at least 85%, at least 90%, at least 91%, at least 92%, at least 93%, at least 94%, at least 95%, at least 96%, at least 97%, at least 98%, or at least 99% identity to amino acids 33-1230 of any of SEQ ID NOs: 1795 to 2394. In some embodiments, the variant comprises an amino acid sequence of amino acids 33-1230 of any of SEQ ID NOs: 1795 to 2394.

[0010] In some aspects, provided herein are SARS-CoV-2 spike protein variants (e.g., non-naturally occurring SARS-CoV-2 spike protein variants). In some embodiments, the amino acid sequence of the variant comprises an amino acid sequence with at least 80%, at least 85%, at least 90%, at least 91%, at least 92%, at least 93%, at least 94%, at least 95%, at least 96%, at least 97%, at least 98%, or at least 99% identity to amino acids 33-705 of any of SEQ ID NOs: 42994791. In some embodiments, the variant comprises an amino acid sequence of amino acids 33-705 of any of SEQ ID NOs: 42994791.

[0011] In some aspects, provided herein are SARS-CoV-2 spike protein receptor binding domain (RBD) variants (e.g., non-naturally occurring SARS-CoV-2 spike protein receptor binding domain (RBD) variants). In some embodiments, the amino acid sequence of the variant comprises an amino acid sequence with at least 80%, at least 85%, at least 90%, at least 91%, at least 92%, at least 93%, at least 94%, at least 95%, at least 96%, at least 97%, at least 98%, or at least 99% identity to amino acids 33-236 of any of SEQ ID NOs: 2494 to 2592. In some embodiments, the variant comprises an amino acid sequence of amino acids 33-236 of any of SEQ ID NOs: 2494 to 2592.

[0012] In some embodiments, the SARS-CoV-2 nucleocapsid protein variant (e.g., non-naturally occurring SARS-CoV-2 nucleocapsid protein variant) comprises an amino acid sequence comprises any of SEQ ID NOs: 598 to 1194 without the N-terminal MHHHHHH sequence (SEQ ID NO: 2597). In some embodiments, the SARS-CoV-2 nucleocapsid protein variant (e.g., non-naturally occurring SARS-CoV-2 nucleocapsid protein variant) comprises an amino acid sequence comprises any of SEQ ID NOs: 3202 to 3799 either with or without the N-terminal M amino acid or the C-terminal HHHHHH sequence (SEQ ID NO: 2599). In some embodiments, the SARS-CoV-2 spike protein variant (e.g., non-naturally occurring SARS-CoV-2 spike protein variant) comprises an amino acid sequence of any of SEQ ID NOs: 1795 to 2394 without the N-terminal M amino acid and/or the C-terminal HHHHHHHH sequence (SEQ ID NO: 2598). In some embodiments, the SARS-CoV-2 spike protein variant (e.g., non-naturally occurring SARS-CoV-2 spike protein variant) comprises an amino acid sequence of any of SEQ ID NOs: 42994791 without the N-terminal M amino acid and/or the C-terminal HHHHHHHHHH sequence (SEQ ID NO: 3802). In some embodiments, the SARS-CoV-2 spike protein receptor binding domain (RBD) variant (e.g., non-naturally occurring SARS-CoV-2 spike protein receptor binding domain (RBD) variant) comprises the amino acid sequence of any of SEQ ID NOs: 2494 to 2592 without the N-terminal M amino acid and/or the C-terminal HHHHHHHH sequence (SEQ ID NO: 2598).

[0013] In some aspects, provided herein are SARS-CoV-2 nucleocapsid protein variants (e.g., non-naturally occurring SARS-CoV-2 nucleocapsid protein variants), wherein the amino acid sequence of the variant is amino acids 254-671 of any of SEQ ID NOs: 598 to 1194 or amino acids 379-796 of any of SEQ ID NOs: 3203-3799. In other aspects, provided herein are SARS-CoV-2 spike protein variants (e.g., non-naturally occurring SARS-CoV-2 spike protein variants), wherein the amino acid sequence of the variant is amino acids 33-1230 of any of SEQ ID NOs: 1795 to 2394 or amino acids 33-705 of any of SEQ ID NOs: 4299-4791. Also provided herein are SARS-CoV-2 spike protein receptor binding domain (RBD) variants (e.g., non-naturally occurring SARS-CoV-2 spike protein receptor binding domain (RBD) variants), wherein the amino acid sequence of the variant is amino acids 33-236 of any of SEQ ID NOs: 2494 to 2592.

[0014] In some embodiments, a SARS-CoV-2 nucleocapsid protein variant provided herein (e.g., a non-naturally occurring SARS-CoV-2 nucleocapsid protein variant) may have the amino acid sequence of any of SEQ ID NOs: 598 to 1194, either with or without the N-terminal MHHHHHH sequence (SEQ ID NO: 2597).

[0015] In some embodiments, a SARS-CoV-2 nucleocapsid protein variant provided herein (e.g., a non-naturally occurring SARS-CoV-2 nucleocapsid protein variant) may have the amino acid sequence of any of SEQ ID NOs: 3203-3799, either with or without the N-terminal M amino acid and/or the C-terminal HHHHHH sequence (SEQ ID NO: 2599).

[0016] In some embodiments, a SARS-CoV-2 spike protein variant provided herein may have the amino acid sequence of any of SEQ ID NOs: 1795 to 2394, either with or without the N-terminal M amino acid and/or the C-terminal HHHHHHHH sequence (SEQ ID NO: 2598).

[0017] In some embodiments, a SARS-CoV-2 spike protein variant provided herein may have the amino acid sequence of any of SEQ ID NOs: 4299 to 4791, either with or without the N-terminal M amino acid and/or the C-terminal HHHHHHHHH sequence (SEQ ID NO: 3802).

[0018] In certain embodiments, a SARS-CoV-2 spike protein receptor binding domain (RBD) variant disclosed herein may have the amino acid sequence of any of SEQ ID NOs: 2494 to 2592, either with or without the N-terminal M amino acid and/or the C-terminal HHHHHHHH sequence (SEQ ID NO: 2598).

[0019] In some embodiments, a SARS-CoV-2 nucleocapsid protein variant disclosed herein may have an amino acid sequence comprising a span of at least 15 contiguous amino acids of amino acids 254-671 of any of SEQ ID NOs: 598 to 1194, wherein the span comprises at least one variation from the corresponding span of a wild-type SARS-CoV-2 nucleocapsid protein.

[0020] In some embodiments, a SARS-CoV-2 nucleocapsid protein variant disclosed herein may have an amino acid sequence comprising a span of at least 15 contiguous amino acids of amino acids 379-796 of any of SEQ ID NOs: 3202 to 3799, wherein the span comprises at least one variation from the corresponding span of a wild-type SARS-CoV-2 nucleocapsid protein.

[0021] In certain embodiments, a SARS-CoV-2 spike protein variant disclosed herein may have an amino acid sequence comprising a span of at least 15 contiguous amino acids of amino acids 33-1230 of any of SEQ ID NOs: 1795 to 2394, wherein the span comprises at least one variation from the corresponding span of a wild-type SARS-CoV-2 spike protein.

[0022] In certain embodiments, a SARS-CoV-2 spike protein variant disclosed herein may have an amino acid sequence comprising a span of at least 15 contiguous amino acids of amino acids 33-705 of any of SEQ ID NOs: 4299 to 4791, wherein the span comprises at least one variation from the corresponding span of a wild-type SARS-CoV-2 spike protein.

[0023] In some embodiments, a SARS-CoV-2 spike protein receptor binding domain (RBD) variant may have an amino acid sequence comprising amino acids 33-236 of any of SEQ ID NOs: 2494 to 2592, wherein the span comprises at least one variation from the corresponding span of a wild-type SARS-CoV-2 spike protein RBD domain.

[0024] In some embodiments, a SARS-CoV-2 nucleocapsid protein variant disclosed herein may be any variant that comprises an amino acid sequence that has a substitution, insertion or deletion (e.g., a variation from the wild-type SARS-CoV-2 nucleocapsid protein) at one or more of: amino acids at positions 50, 53, 54, 55, 56, 57, 59, 62, 65, 68, 72, 74, 76, 79, 81, 86, 87, 90.91, 94, 100, 101, 105, 107, 109, 111, 113, 114, 115, 118, 120, 123, 125, 126, 127, 128, 130, 131, 134, 135, 136, 139, 140, 141, 144, 148, 150, 152, 154, 155, 157, 158, 159, 160, 161, 162, 163, 166, 167, 169, 170, 173, 188, 201, 202, 206, 250, 252, 254, 255, 257, 260, 264, 267, 268, 273, 274, 276, 280, 281, 282, 289, 290, 291, 292, 293, 294, 296, 297, 298, 299, 300, 304, 308, 311, 312, 316, 319, 321, 322, 323, 324, 325, 327, 329, 336, 338, 341, 342, 343, 347, 348, 351, 355, or 360, and/or a deletion of amino acid position 1, relative to the wild-type SARS-CoV-2 nucleocapsid protein amino acid sequence (SEQ ID NO: 2594).

[0025] In certain embodiments, a SARS-CoV-2 nucleocapsid protein variant disclosed herein may be any variant wherein the amino acid sequence of the variant has a substitution (e.g., a variation from the wild-type SARS-CoV-2 nucleocapsid protein) at one or more of: amino acids at positions 50, 53, 54, 55, 56, 57, 59, 62, 65, 68, 72, 74, 76, 79, 81, 86, 87, 90, 91, 94, 100, 101, 105, 107, 109, 111, 113, 114, 115, 118, 120, 123, 125, 126, 127, 128, 130, 131, 134, 135, 136, 139, 140, 141, 144, 148, 150, 152, 154, 155, 157, 158, 159, 160, 161, 162, 163, 166, 167, 169, 170, 173, 188, 201, 202, 206, 250, 252, 254, 255, 257, 260, 264, 267, 268, 273, 274, 276, 280, 281, 282, 289, 290, 291, 292, 293, 294, 296, 297, 298, 299, 300, 304, 308, 311, 312, 316, 319, 321, 322, 323, 324, 325, 327, 329, 336, 338, 341, 342, 343, 347, 348, 351, 355, or 360, and/or a deletion of amino acid position 1, relative to the wild-type SARS-CoV-2 nucleocapsid protein amino acid sequence (SEQ ID NO: 2594).

[0026] In some embodiments, a SARS-CoV-2 nucleocapsid protein variant disclosed herein may be any variant wherein the amino acid sequence of the variant has a substitution, insertion or deletion (e.g., a variation from the wild-type SARS-CoV-2 nucleocapsid protein) at two or more of: amino acids at positions 50, 53, 54, 55, 56, 57, 59, 62, 65, 68, 72, 74, 76, 79, 81, 86, 87, 90, 91, 94, 100, 101, 105, 107, 109, 111, 113, 114, 115, 118, 120, 123, 125, 126, 127, 128, 130, 131, 134, 135, 136, 139, 140, 141, 144, 148, 150, 152, 154, 155, 157, 158, 159, 160, 161, 162, 163, 166, 167, 169, 170, 173, 188, 201, 202, 206, 250, 252, 254, 255, 257, 260, 264, 267, 268, 273, 274, 276, 280, 281, 282, 289, 290, 291, 292, 293, 294, 296, 297, 298, 299, 300, 304, 308, 311, 312, 316, 319, 321, 322, 323, 324, 325, 327, 329, 336, 338, 341, 342, 343, 347, 348, 351, 355, or 360, and/or a deletion of amino acid position 1, relative to the wild-type SARS-CoV-2 nucleocapsid protein amino acid sequence (SEQ ID NO: 2594).

[0027] In certain embodiments, a SARS-CoV-2 nucleocapsid protein variant disclosed herein may be any variant wherein the amino acid sequence of the variant has a substitution (e.g., a variation from the wild-type SARS-CoV-2 nucleocapsid protein) at two or more of: amino acids at positions 50, 53, 54, 55, 56, 57, 59, 62, 65, 68, 72, 74, 76, 79, 81, 86, 87, 90, 91, 94, 100, 101, 105, 107, 109, 111, 113, 114, 115, 118, 120, 123, 125, 126, 127, 128, 130, 131, 134, 135, 136, 139, 140, 141, 144, 148, 150, 152, 154, 155, 157, 158, 159, 160, 161, 162, 163, 166, 167, 169, 170, 173, 188, 201, 202, 206, 250, 252, 254, 255, 257, 260, 264, 267, 268, 273, 274, 276, 280, 281, 282, 289, 290, 291, 292, 293, 294, 296, 297, 298, 299, 300, 304, 308, 311, 312, 316, 319, 321, 322, 323, 324, 325, 327, 329, 336, 338, 341, 342, 343, 347, 348, 351, 355, or 360, and/or a deletion of amino acid position 1, relative to the wild-type SARS-CoV-2 nucleocapsid protein amino acid sequence (SEQ ID NO: 2594).

[0028] In some embodiments, a SARS-CoV-2 nucleocapsid protein variant disclosed herein may be any variant wherein the amino acid sequence of the variant has a substitution, insertion or deletion (e.g., a variation from the wild-type SARS-CoV-2 nucleocapsid protein) at three or more of: amino acids at positions 50, 53, 54, 55, 56, 57, 59, 62, 65, 68, 72, 74, 76, 79, 81, 86, 87, 90, 91, 94, 100, 101, 105, 107, 109, 111, 113, 114, 115, 118, 120, 123, 125, 126, 127, 128, 130, 131, 134, 135, 136, 139, 140, 141, 144, 148, 150, 152, 154, 155, 157, 158, 159, 160, 161, 162, 163, 166, 167, 169, 170, 173, 188, 201, 202, 206, 250, 252, 254, 255, 257, 260, 264, 267, 268, 273, 274, 276, 280, 281, 282, 289, 290, 291, 292, 293, 294, 296, 297, 298, 299, 300, 304, 308, 311, 312, 316, 319, 321, 322, 323, 324, 325, 327, 329, 336, 338, 341, 342, 343, 347, 348, 351, 355, or 360, and/or a deletion of amino acid position 1, relative to the wild-type SARS-CoV-2 nucleocapsid protein amino acid sequence (SEQ ID NO: 2594).

[0029] In some embodiments, a SARS-CoV-2 nucleocapsid protein variant disclosed herein may be any variant wherein the amino acid sequence of the variant has a substitution (e.g., a variation from the wild-type SARS-CoV-2 nucleocapsid protein) at three or more of: amino acids at positions 50, 53, 54, 55, 56, 57, 59, 62, 65, 68, 72, 74, 76, 79, 81, 86, 87, 90, 91, 94, 100, 101, 105, 107, 109, 111, 113, 114, 115, 118, 120, 123, 125, 126, 127, 128, 130, 131, 134, 135, 136, 139, 140, 141, 144, 148, 150, 152, 154, 155, 157, 158, 159, 160, 161, 162, 163, 166, 167, 169, 170, 173, 188, 201, 202, 206, 250, 252, 254, 255, 257, 260, 264, 267, 268, 273, 274, 276, 280, 281, 282, 289, 290, 291, 292, 293, 294, 296, 297, 298, 299, 300, 304, 308, 311, 312, 316, 319, 321, 322, 323, 324, 325, 327, 329, 336, 338, 341, 342, 343, 347, 348, 351, 355, or 360, and/or a deletion of amino acid position 1, relative to the wild-type SARS-CoV-2 nucleocapsid protein amino acid sequence (SEQ ID NO: 2594).

[0030] In certain embodiments, a SARS-CoV-2 spike protein variant may be any variant wherein the amino acid sequence of the variant has a substitution, insertion or deletion (e.g., a variation from the wild-type SARS-CoV-2 spike protein) at one or more of: amino acids at positions 32, 33, 41, 42, 46, 47, 50, 68, 71, 77, 78, 83, 84, 87, 90, 94, 95, 100, 101, 108, 112, 113, 114, 129, 132, 134, 135, 137, 138, 140, 141, 142, 153, 155, 157, 159, 171, 172, 173, 174, 175, 176, 177, 179, 180, 181, 187, 188, 202, 206, 207, 208, 222, 224, 226, 227, 228, 237, 241, 243, 245, 249, 259, 261, 262, 266, 271, 273, 276, 279, 280, 284, 292, 293, 297, 299, 302, 324, 325, 335, 339, 345, 352, 354, 356, 378, 399, 405, 417, 444, 461, 472, 477, 514, 529, 530, 537, 540, 541, 546, 547, 554, 556, 569, 570, 572, 573, 575, 580, 582, 586, 588, 598, 606, 607, 619, 622, 623, 626, 627, 630, 646, 655, 668, 682, 683, 684, 685, 688, 690, 693, 704, 706, 711, 713, 719, 723, 726, 727, 732, 734, 739, 747, 748, 750, 754, 761, 764, 768, 772, 774, 778, 779, 780, 788, 817, 826, 831, 834, 838, 839, 841, 844, 845, 855, 858, 859, 872, 875, 876, 878, 879, 882, 884, 895, 912, 921, 922, 929, 932, 933, 936, 937, 939, 940, 942, 943, 946, 953, 955, 960, 961, 977, 981, 982, 986, 987, 990, 991, 993, 1016, 1023, 1027, 1034, 1038, 1040, 1041, 1045, 1055, 1060, 1070, 1072, 1080, 1084, 1088, 1101, 1103, 1104, 1113, 1114, 1125, 1130, or 1133, and/or a deletion of amino acid positions 1 to 13, and a deletion of amino acids 1212-1273, relative to the wild-type SARS-CoV-2 spike protein amino acid sequence (SEQ ID NO: 2596).

[0031] In some embodiments, a SARS-CoV-2 spike protein variant disclosed herein may be any variant wherein the amino acid sequence of the variant has a substitution (e.g., a variation from the wild-type SARS-CoV-2 spike protein) at one or more of: amino acids at positions 32, 33, 41, 42, 46, 47, 50, 68, 71, 77, 78, 83, 84, 87, 90, 94, 95, 100, 101, 108, 112, 113, 114, 129, 132, 134, 135, 137, 138, 140, 141,142, 153, 155, 157, 159, 171, 172, 173, 174, 175, 176, 177, 179, 180, 181, 187, 188, 202, 206, 207, 208, 222, 224, 226, 227, 228, 237, 241, 243, 245, 249, 259, 261, 262, 266, 271, 273, 276, 279, 280, 284, 292, 293, 297, 299, 302, 324, 325, 335, 339, 345, 352, 354, 356, 378, 399, 405, 417, 444, 461, 472, 477, 514, 529, 530, 537, 540, 541, 546, 547, 554, 556, 569, 570, 572, 573, 575, 580, 582, 586, 588, 598, 606, 607, 619, 622, 623, 626, 627, 630, 646, 655, 668, 682, 683, 684, 685, 688, 690, 693, 704, 706, 711, 713, 719, 723, 726, 727, 732, 734, 739, 747, 748, 750, 754, 761, 764, 768, 772, 774, 778, 779, 780, 788, 817, 826, 831, 834, 838, 839, 841, 844, 845, 855, 858, 859, 872, 875, 876, 878, 879, 882, 884, 895, 912, 921, 922, 929, 932, 933, 936, 937, 939, 940, 942, 943, 946, 953, 955, 960, 961, 977, 981, 982, 986, 987, 990, 991, 993, 1016, 1023, 1027, 1034, 1038, 1040, 1041, 1045, 1055, 1060, 1070, 1072, 1080, 1084, 1088, 1101, 1103, 1104, 1113, 1114, 1125, 1130, or 1133, and/or a deletion of amino acid positions 1 to 13, and a deletion of amino acids 1212-1273, relative to the wild-type SARS-CoV-2 spike protein amino acid sequence (SEQ ID NO: 2596).

[0032] In some embodiments, a SARS-CoV-2 spike protein variant disclosed herein may be any variant wherein the amino acid sequence of the variant has a substitution, insertion or deletion (e.g., a variation from the wild-type SARS-CoV-2 spike protein) at two or more of: amino acids at positions 32, 33, 41, 42, 46, 47, 50, 68, 71, 77, 78, 83, 84, 87, 90, 94, 95, 100, 101, 108, 112, 113, 114, 129, 132, 134, 135, 137, 138, 140, 141, 142, 153, 155, 157, 159, 171, 172, 173, 174, 175, 176, 177, 179, 180, 181, 187, 188, 202, 206, 207, 208, 222, 224, 226, 227, 228, 237, 241, 243, 245, 249, 259, 261, 262, 266, 271, 273, 276, 279, 280, 284, 292, 293, 297, 299, 302, 324, 325, 335, 339, 345, 352, 354, 356, 378, 399, 405, 417, 444, 461, 472, 477, 514, 529, 530, 537, 540, 541, 546, 547, 554, 556, 569, 570, 572, 573, 575, 580, 582, 586, 588, 598, 606, 607, 619, 622, 623, 626, 627, 630, 646, 655, 668, 682, 683, 684, 685, 688, 690, 693, 704, 706, 711, 713, 719, 723, 726, 727, 732, 734, 739, 747, 748, 750, 754, 761, 764, 768, 772, 774, 778, 779, 780, 788, 817, 826, 831, 834, 838, 839, 841, 844, 845, 855, 858, 859, 872, 875, 876, 878, 879, 882, 884, 895, 912, 921, 922, 929, 932, 933, 936, 937, 939, 940, 942, 943, 946, 953, 955, 960, 961, 977, 981, 982, 986, 987, 990, 991, 993, 1016, 1023, 1027, 1034, 1038, 1040, 1041, 1045, 1055, 1060, 1070, 1072, 1080, 1084, 1088, 1101, 1103, 1104, 1113, 1114, 1125, 1130, or 1133, and/or a deletion of amino acid positions 1 to 13, and a deletion of amino acids 1212-1273, relative to the wild-type SARS-CoV-2 spike protein amino acid sequence (SEQ ID NO: 2596).

[0033] In certain embodiments, a SARS-CoV-2 spike protein variant disclosed herein may be any variant wherein the amino acid sequence of the variant has a substitution (e.g., a variation from the wild-type SARS-CoV-2 spike protein) at two or more of: amino acids at positions 32, 33, 41, 42, 46, 47, 50, 68, 71, 77, 78, 83, 84, 87, 90, 94, 95, 100, 101, 108, 112, 113, 114, 129, 132, 134, 135, 137, 138, 140, 141, 142, 153, 155, 157, 159, 171, 172, 173, 174, 175, 176, 177, 179, 180, 181, 187, 188, 202, 206, 207, 208, 222, 224, 226, 227, 228, 237, 241, 243, 245, 249, 259, 261, 262, 266, 271, 273, 276, 279, 280, 284, 292, 293, 297, 299, 302, 324, 325, 335, 339, 345, 352, 354, 356, 378, 399, 405, 417, 444, 461, 472, 477, 514, 529, 530, 537, 540, 541, 546, 547, 554, 556, 569, 570, 572, 573, 575, 580, 582, 586, 588, 598, 606, 607, 619, 622, 623, 626, 627, 630, 646, 655, 668, 682, 683, 684, 685, 688, 690, 693, 704, 706, 711, 713, 719, 723, 726, 727, 732, 734, 739, 747, 748, 750, 754, 761, 764, 768, 772, 774, 778, 779, 780, 788, 817, 826, 831, 834, 838, 839, 841, 844, 845, 855, 858, 859, 872, 875, 876, 878, 879, 882, 884, 895, 912, 921, 922, 929, 932, 933, 936, 937, 939, 940, 942, 943, 946, 953, 955, 960, 961, 977, 981, 982, 986, 987, 990, 991, 993, 1016, 1023, 1027, 1034, 1038, 1040, 1041, 1045, 1055, 1060, 1070, 1072, 1080, 1084, 1088, 1101, 1103, 1104, 1113, 1114, 1125, 1130, or 1133, and/or a deletion of amino acid positions 1 to 13, and a deletion of amino acids 1212-1273, relative to the wild-type SARS-CoV-2 spike protein amino acid sequence (SEQ ID NO: 2596).

[0034] In some embodiments, a SARS-CoV-2 spike protein variant disclosed herein may be any variant wherein the amino acid sequence of the variant has a substitution, insertion or deletion (e.g., a variation from the wild-type SARS-CoV-2 spike protein) at three or more of: amino acids at positions 32, 33, 41, 42, 46, 47, 50, 68, 71, 77, 78, 83, 84, 87, 90, 94, 95, 100, 101, 108, 112, 113, 114, 129, 132, 134, 135, 137, 138, 140, 141, 142, 153, 155,157, 159, 171, 172, 173, 174, 175, 176, 177, 179, 180, 181, 187, 188, 202, 206, 207, 208, 222, 224, 226, 227, 228, 237, 241, 243, 245, 249, 259, 261, 262, 266, 271, 273, 276, 279, 280, 284, 292, 293, 297, 299, 302, 324, 325, 335, 339, 345, 352, 354, 356, 378, 399, 405, 417,444, 461, 472, 477, 514, 529, 530, 537, 540, 541, 546, 547, 554, 556, 569, 570, 572, 573, 575, 580, 582, 586, 588, 598, 606, 607, 619, 622, 623, 626, 627, 630, 646, 655, 668, 682, 683, 684, 685, 688, 690, 693, 704, 706, 711, 713, 719, 723, 726, 727, 732, 734, 739, 747, 748, 750, 754, 761, 764, 768, 772, 774, 778, 779, 780, 788, 817, 826, 831, 834, 838, 839, 841, 844, 845, 855, 858, 859, 872, 875, 876, 878, 879, 882, 884, 895, 912, 921, 922, 929, 932, 933, 936, 937, 939, 940, 942, 943, 946, 953, 955, 960, 961, 977, 981, 982, 986, 987, 990, 991, 993, 1016, 1023, 1027, 1034, 1038, 1040, 1041, 1045, 1055, 1060, 1070, 1072, 1080, 1084, 1088, 1101, 1103, 1104, 1113, 1114, 1125, 1130, or 1133, and/or a deletion of amino acid positions 1 to 13, and a deletion of amino acids 1212-1273, relative to the wild-type SARS-CoV-2 spike protein amino acid sequence (SEQ ID NO: 2596).

[0035] In certain embodiments, a SARS-CoV-2 spike protein variant disclosed herein may be any variant wherein the amino acid sequence of the variant has a substitution (e.g., a variation from the wild-type SARS-CoV-2 spike protein) at three or more of: amino acids at positions 32, 33, 41, 42, 46, 47, 50, 68, 71, 77, 78, 83, 84, 87, 90, 94, 95, 100, 101, 108, 112, 113, 114, 129, 132, 134, 135, 137, 138, 140, 141, 142, 153, 155, 157, 159, 171, 172, 173, 174, 175, 176, 177, 179, 180, 181, 187, 188, 202, 206, 207, 208, 222, 224, 226, 227, 228, 237, 241, 243, 245, 249, 259, 261, 262, 266, 271, 273, 276, 279, 280, 284, 292, 293, 297, 299, 302, 324, 325, 335, 339, 345, 352, 354, 356, 378, 399, 405, 417, 444, 461, 472, 477, 514, 529, 530, 537, 540, 541, 546, 547, 554, 556, 569, 570, 572, 573, 575, 580, 582, 586, 588, 598, 606, 607, 619, 622, 623, 626, 627, 630, 646, 655, 668, 682, 683, 684, 685, 688, 690, 693, 704, 706, 711, 713, 719, 723, 726, 727, 732, 734, 739, 747, 748, 750, 754, 761, 764, 768, 772, 774, 778, 779, 780, 788, 817, 826, 831, 834, 838, 839, 841, 844, 845, 855, 858, 859, 872, 875, 876, 878, 879, 882, 884, 895, 912, 921, 922, 929, 932, 933, 936, 937, 939, 940, 942, 943, 946, 953, 955, 960, 961, 977, 981, 982, 986, 987, 990, 991, 993, 1016, 1023, 1027, 1034, 1038, 1040, 1041, 1045, 1055, 1060, 1070, 1072, 1080, 1084, 1088, 1101, 1103, 1104, 1113, 1114, 1125, 1130, or 1133, and/or a deletion of amino acid positions 1 to 13, and a deletion of amino acids 1212-1273, relative to the wild-type SARS-CoV-2 spike protein amino acid sequence (SEQ ID NO: 2596).

[0036] In some embodiments, the present disclosure pertains to: A non-naturally occurring variant of the SARS-CoV-2 spike protein, wherein the amino acid sequence of the variant has a substitution, insertion or deletion (e.g., a variation from the wild-type SARS-CoV-2 spike protein) at one or more of: amino acids at positions 36, 46, 47, 49, 50, 63, 64, 68, 70, 71, 81, 84, 92, 94, 95, 97, 98, 101, 108, 112, 115, 123, 125, 129, 132, 136, 138, 140, 146, 153, 155, 159, 161, 167, 171, 172, 177, 178, 184, 186, 187, 188, 192, 202, 205, 206, 207, 209, 213, 221, 222, 225, 226, 228, 236, 237, 239, 240, 241, 245, 249, 252, 257, 258, 260, 262, 264, 284, 292, 298, 299, 302, 316, 321, 324, 325, 329, 335, 338, 339, 344, 345, 350, 354, 356, 367, 368, 375, 377, 378, 379, 393, 399, 417, 419, 420, 424, 432, 439, 443, 445, 459, 460, 461, 464, 467, 470, 472, 475, 477, 480, 482, 484, 487, 488, 489, 490, 496, 501, 503, 504, 505, 514, 517, 518, 519, 522, 526, 528, 530, 534, 537, 546, 551, 557, 566, 567, 568, 569, 571, 573, 574, 582, 585, 588, 592, 595, 596, 601, 603, 608, 621, 622, 623, 624, 625, 627, 630, 635, 636, 637, 642, 651, 653, 655, 666, 668, 673, 678, 682, 683, and/or 685, and a deletion of amino acids positions at 1 to 13, and a deletion of amino acids at positions 687-1273, relative to the wild-type spike protein amino acid sequence (SEQ ID NO: 2596).

[0037] In some embodiments, the present disclosure pertains to: A non-naturally occurring variant of the SARS-CoV-2 spike protein, wherein the amino acid sequence of the variant has a substitution (e.g., a variation from the wild-type SARS-CoV-2 spike protein) at one or more of: amino acids at positions 36, 46, 47, 49, 50, 63, 64, 68, 70, 71, 81, 84, 92, 94, 95, 97, 98, 101, 108, 112, 115, 123, 125, 129, 132, 136, 138, 140, 146, 153, 155, 159, 161, 167, 171, 172, 177, 178, 184, 186, 187, 188, 192, 202, 205, 206, 207, 209, 213, 221, 222, 225, 226, 228, 236, 237, 239, 240, 241, 245, 249, 252, 257, 258, 260, 262, 264, 284, 292, 298, 299, 302, 316, 321, 324, 325, 329, 335, 338, 339, 344, 345, 350, 354, 356, 367, 368, 375, 377, 378, 379, 393, 399, 417, 419, 420, 424, 432, 439, 443, 445, 459, 460, 461, 464, 467, 470, 472, 475, 477, 480, 482, 484, 487, 488, 489, 490, 496, 501, 503, 504, 505, 514, 517, 518, 519, 522, 526, 528, 530, 534, 537, 546, 551, 557, 566, 567, 568, 569, 571, 573, 574, 582, 585, 588, 592, 595, 596, 601, 603, 608, 621, 622, 623, 624,625, 627, 630, 635, 636, 637, 642, 651, 653, 655, 666, 668, 673, 678, 682, 683, and/or 685, and a deletion of amino acids positions at 1 to 13, and a deletion of amino acids at positions 687-1273, relative to the wild-type spike protein amino acid sequence (SEQ ID NO: 2596).

[0038] In some embodiments, the present disclosure pertains to: A non-naturally occurring variant of the SARS-CoV-2 spike protein, wherein the amino acid sequence of the variant has a substitution, insertion or deletion (e.g., a variation from the wild-type SARS-CoV-2 spike protein) at two or more of: amino acids at positions 36, 46, 47, 49, 50, 63, 64, 68, 70, 71, 81, 84, 92, 94, 95, 97, 98, 101, 108, 112, 115, 123, 125, 129, 132, 136, 138, 140, 146, 153, 155, 159, 161, 167, 171, 172, 177, 178, 184, 186, 187, 188, 192, 202, 205, 206, 207, 209, 213, 221, 222, 225, 226, 228, 236, 237, 239, 240, 241, 245, 249, 252, 257, 258, 260, 262, 264, 284, 292, 298, 299, 302, 316, 321, 324, 325, 329, 335, 338, 339, 344, 345, 350, 354, 356, 367, 368, 375, 377, 378, 379, 393, 399, 417, 419, 420,424, 432, 439, 443, 445, 459, 460, 461, 464, 467, 470, 472, 475, 477, 480, 482, 484, 487, 488, 489, 490, 496, 501, 503, 504,505, 514, 517, 518, 519, 522, 526, 528, 530, 534, 537, 546, 551, 557, 566, 567, 568, 569, 571, 573, 574, 582, 585, 588, 592, 595, 596, 601, 603, 608, 621, 622, 623, 624, 625, 627, 630, 635, 636, 637, 642, 651, 653, 655, 666, 668, 673, 678, 682, 683, and/or 685, and a deletion of amino acids positions at 1 to 13, and a deletion of amino acids at positions 687-1273, relative to the wild-type spike protein amino acid sequence (SEQ ID NO: 2596).

[0039] In some embodiments, the present disclosure pertains to: A non-naturally occurring variant of the SARS-CoV-2 spike protein, wherein the amino acid sequence of the variant has a substitution (e.g., a variation from the wild-type SARS-CoV-2 spike protein) at two or more of: amino acids at positions 36, 46, 47, 49, 50, 63, 64, 68, 70, 71, 81, 84, 92, 94, 95, 97, 98, 101, 108, 112, 115, 123, 125, 129, 132, 136, 138, 140, 146, 153, 155, 159, 161, 167, 171, 172, 177, 178, 184, 186, 187, 188, 192, 202, 205, 206, 207, 209, 213, 221, 222, 225, 226, 228, 236, 237, 239, 240, 241, 245, 249, 252, 257, 258, 260, 262, 264, 284, 292, 298, 299, 302, 316, 321, 324, 325, 329, 335, 338, 339, 344, 345, 350, 354, 356, 367, 368, 375, 377, 378, 379, 393, 399, 417, 419, 420, 424, 432, 439, 443, 445, 459, 460, 461, 464, 467, 470, 472, 475, 477, 480, 482, 484, 487, 488, 489, 490, 496, 501, 503, 504, 505, 514, 517, 518, 519, 522, 526, 528, 530, 534, 537, 546, 551, 557, 566, 567, 568, 569, 571, 573, 574, 582, 585, 588, 592, 595, 596, 601, 603, 608, 621, 622, 623, 624, 625, 627, 630, 635, 636, 637, 642, 651, 653, 655, 666, 668, 673, 678, 682, 683, and/or 685, and a deletion of amino acids positions at 1 to 13, and a deletion of amino acids at positions 687-1273, relative to the wild-type spike protein amino acid sequence (SEQ ID NO: 2596).

[0040] In some embodiments, the present disclosure pertains to: A non-naturally occurring variant of the SARS-CoV-2 spike protein, wherein the amino acid sequence of the variant has a substitution, insertion or deletion (e.g., a variation from the wild-type SARS-CoV-2 spike protein) at three or more of: amino acids at positions 36, 46, 47, 49, 50, 63, 64, 68, 70, 71, 81, 84, 92, 94, 95, 97, 98, 101, 108, 112, 115, 123, 125, 129, 132, 136, 138, 140, 146, 153, 155, 159, 161, 167, 171, 172, 177, 178, 184, 186, 187, 188, 192, 202, 205, 206, 207, 209, 213, 221, 222, 225, 226, 228, 236, 237, 239, 240, 241, 245, 249, 252, 257, 258, 260, 262, 264, 284, 292, 298, 299, 302, 316, 321, 324, 325, 329, 335, 338, 339, 344, 345, 350, 354, 356, 367, 368, 375, 377, 378, 379, 393, 399, 417, 419, 420, 424, 432, 439, 443, 445, 459, 460, 461, 464, 467, 470, 472, 475, 477, 480, 482, 484, 487, 488, 489, 490, 496, 501, 503, 504, 505, 514, 517, 518, 519, 522, 526, 528, 530, 534, 537, 546, 551, 557, 566, 567, 568, 569, 571, 573, 574, 582, 585, 588, 592, 595, 596, 601, 603, 608, 621, 622, 623, 624, 625, 627, 630, 635, 636, 637, 642, 651, 653, 655, 666, 668, 673, 678, 682, 683, and/or 685, and a deletion of amino acids positions at 1 to 13, and a deletion of amino acids at positions 687-1273, relative to the wild-type spike protein amino acid sequence (SEQ ID NO: 2596).

[0041] In some embodiments, the present disclosure pertains to: A non-naturally occurring variant of the SARS-CoV-2 spike protein, wherein the amino acid sequence of the variant has a substitution (e.g., a variation from the wild-type SARS-CoV-2 spike protein) at three or more of: amino acids at positions 36, 46, 47, 49, 50, 63, 64, 68, 70, 71, 81, 84, 92, 94, 95, 97, 98, 101, 108, 112, 115, 123, 125, 129, 132, 136, 138, 140, 146, 153, 155, 159, 161, 167, 171, 172, 177, 178, 184, 186, 187, 188, 192, 202, 205, 206, 207, 209, 213, 221, 222, 225, 226, 228, 236, 237, 239, 240, 241, 245, 249, 252, 257, 258, 260, 262, 264, 284, 292, 298, 299, 302, 316, 321, 324, 325, 329, 335, 338, 339, 344, 345, 350, 354, 356, 367, 368, 375, 377, 378, 379, 393, 399, 417, 419, 420, 424, 432, 439, 443, 445, 459, 460, 461, 464, 467, 470, 472, 475, 477, 480, 482, 484, 487, 488, 489, 490, 496, 501, 503, 504, 505, 514, 517, 518, 519, 522, 526, 528, 530, 534, 537, 546, 551, 557, 566, 567, 568, 569, 571, 573, 574, 582, 585, 588, 592, 595, 596, 601, 603, 608, 621, 622, 623, 624, 625, 627, 630, 635, 636, 637, 642, 651, 653, 655, 666, 668, 673, 678, 682, 683, and/or 685, and a deletion of amino acids positions at 1 to 13, and a deletion of amino acids at positions 687-1273, relative to the wild-type spike protein amino acid sequence (SEQ ID NO: 2596).

[0042] In some embodiments, a SARS-CoV-2 spike protein receptor binding domain (RBD) variant disclosed herein may be any variant wherein the amino acid sequence of the variant has a substitution, insertion or deletion (e.g., a variation from the wild-type SARS-CoV-2 spike protein receptor binding domain (RBD) protein) at one or more of: amino acids at positions 335, 339, 340, 356, 357, 362, 366, 368, 372, 393, 394, 399, 402, 403, 404, 405, 406, 410, 414, 417, 438, 439, 450, 477, 478, 483, 484, 486, 489, 490, 501, 502, or 504, and a deletion of amino acid positions 1 to 327 and a deletion of amino acid positions 532 to 1273, relative to the wild-type SARS-CoV-2 spike protein amino acid sequence (SEQ ID NO: 2596).

[0043] In certain embodiments, a SARS-CoV-2 spike protein receptor binding domain (RBD) variant disclosed herein may be any variant wherein the amino acid sequence of the variant has a substitution at (e.g., a variation from the wild-type SARS-CoV-2 spike protein receptor binding domain (RBD) protein) one or more of: amino acids at positions 335, 339, 340, 356, 357, 362, 366, 368, 372, 393, 394, 399, 402, 403, 404, 405, 406, 410, 414, 417, 438, 439, 450, 477, 478, 483, 484, 486, 489, 490, 501, 502, or 504, and a deletion of amino acid positions 1 to 327 and a deletion of amino acid positions 532 to 1273, relative to the wild-type SARS-CoV-2 spike protein amino acid sequence (SEQ ID NO: 2596).

[0044] In certain embodiments, a SARS-CoV-2 spike protein receptor binding domain (RBD) variant may be any variant wherein the amino acid sequence of the variant has a substitution, insertion or deletion (e.g., a variation from the wild-type SARS-CoV-2 spike protein receptor binding domain (RBD) protein) at two or more of: amino acids at positions 335, 339, 340, 356, 357, 362, 366, 368, 372, 393, 394, 399, 402, 403, 404, 405, 406, 410, 414, 417, 438, 439, 450, 477, 478, 483, 484, 486, 489, 490, 501, 502, or 504, and a deletion of amino acid positions 1 to 327 and a deletion of amino acid positions 532 to 1273, relative to the wild-type SARS-CoV-2 spike protein amino acid sequence (SEQ ID NO: 2596).

[0045] A SARS-CoV-2 spike protein receptor binding domain (RBD) variant may be any variant wherein the amino acid sequence of the variant has a substitution at two or more of: amino acids at positions 335, 339, 340, 356, 357, 362, 366, 368, 372, 393, 394, 399, 402, 403, 404, 405, 406, 410, 414, 417, 438, 439, 450, 477, 478, 483, 484, 486, 489, 490, 501, 502, or 504, and a deletion of amino acid positions 1 to 327 and a deletion of amino acid positions 532 to 1273, relative to the wild-type SARS-CoV-2 spike protein amino acid sequence (SEQ ID NO: 25%).

[0046] In some embodiments, a SARS-CoV-2 spike protein receptor binding domain (RBD) variant may be any variant wherein the amino acid sequence of the variant has a substitution, insertion or deletion (e.g., a variation from the wild-type SARS-CoV-2 spike protein receptor binding domain (RBD) protein) at three or more of: amino acids at positions 335, 339, 340, 356, 357, 362, 366, 368, 372, 393, 394, 399, 402, 403, 404, 405, 406, 410, 414, 417, 438, 439, 450, 477, 478, 483, 484, 486, 489, 490, 501, 502, or 504, and a deletion of amino acid positions 1 to 327 and a deletion of amino acid positions 532 to 1273, relative to the wild-type SARS-CoV-2 spike protein amino acid sequence (SEQ ID NO: 2596).

[0047] In certain embodiments, a SARS-CoV-2 spike protein receptor binding domain (RBD) variant may be any variant wherein the amino acid sequence of the variant has a substitution (e.g., a variation from the wild-type SARS-CoV-2 spike protein receptor binding domain (RBD) protein) at three or more of: amino acids at positions 335, 339, 340, 356, 357, 362, 366, 368, 372, 393, 394, 399, 402, 403, 404,405, 406, 410, 414, 417, 438, 439, 450, 477, 478, 483, 484, 486, 489, 490, 501, 502, or 504, and a deletion of amino acid positions 1 to 327 and a deletion of amino acid positions 532 to 1273, relative to the wild-type SARS-CoV-2 spike protein amino acid sequence (SEQ ID NO: 2596).

[0048] In some aspects, provided herein are compositions comprising a protein variant provided herein (e.g., a SARS-CoV-2 nucleocapsid protein variant, a SARS-CoV-2 spike protein variant, a SARS-CoV-2 spike protein RBD variant). In some embodiments, the variant is immobilized on a solid support (e.g., as a component of a diagnostic kit). In certain embodiments, the composition may be a vaccine composition. In some embodiments, the composition may further comprise a pharmaceutically acceptable carrier and/or an adjuvant.

[0049] In certain aspects, provided herein are nucleic acids encoding a variant disclosed herein and compositions comprising nucleic acids encoding a variant disclosed herein. In some embodiments, the nucleic acid may have a sequence comprising any of SEQ ID NOs: 1 to 597 (and/or a complement thereof). The nucleic acid may have a sequence comprising any of SEQ ID NOs: 1195 to 1794 (and/or a complement thereof). The nucleic acid may have a sequence comprising any of SEQ ID NOs: 2395 to 2493 (and/or a complement thereof). The nucleic acid may comprise DNA or RNA (e.g., an mRNA molecule, such as an mRNA encoding a protein variant disclosed herein).

[0050] Disclosed herein are protein variants with any mutation disclosed herein. The protein variants disclosed herein may comprise at least one, at least two, at least three, at least four, at least five, at least six, at least seven, at least eight, at least nine, at least ten, at least eleven, at least twelve, at least thirteen, at least fourteen, at least fifteen, at least sixteen, at least seventeen, at least eighteen, at least nineteen, or at least twenty of substitution mutations disclosed herein.

[0051] In certain aspects, provided herein is a composition comprising a nucleic acid disclosed herein. The composition comprising a nucleic acid encoding a variant disclosed herein may be a vaccine composition. The composition may further comprise a pharmaceutically acceptable carrier and/or an adjuvant.

[0052] In some embodiments, provided herein are vectors comprising the nucleic acids disclosed herein. Also provided herein are compositions comprising vectors comprising the nucleic acids disclosed herein. The vector may be an expression vector. In some embodiments, provided herein is a composition comprising such a vector (e.g., a vaccine composition). In certain embodiments, the composition may further comprise a pharmaceutically acceptable carrier and/or an adjuvant.

[0053] In certain aspects, provided herein are cells (e.g., host cells) comprising the nucleic acids disclosed herein and/or expressing a variant protein provided herein. The cell may express the variant encoded by the nucleic acid. The cell may be a prokaryotic cell (e.g., a bacterial cell), or a eukaryotic cell (e.g., a yeast cell, mammalian cell, or a human cell). In certain embodiments, provided are methods of generating a variant protein provided herein comprising culturing cells under conditions such that they express a variant protein disclosed herein. In certain embodiments, the methods further comprise purifying the variant protein.

[0054] In some embodiments, also provided herein are diagnostic test kits. The kits may comprise a protein variant disclosed herein. The variant may be a SARS-CoV-2 nucleocapsid protein variant, a SARS-CoV-2 spike protein variant, or a SARS-CoV-2 spike protein receptor binding domain (RBD) variant. In some embodiments, the kit further comprises a reagent capable of detecting an immunological complex which comprises an antibody bound to the variant. The diagnostic test kit may comprise at least two of the variants disclosed herein (e.g., two variants selected from a SARS-CoV-2 nucleocapsid protein variant; a SARS-CoV-2 spike protein variant; and a SARS-CoV-2 spike protein receptor binding domain (RBD) variant). The kit may comprise one or more control standards and/or a specimen diluent and/or washing buffer. The variant may be immobilized on a solid support (e.g., a microplate well). The immunological complex may be detected by ELISA or lateral flow.

[0055] Provided herein are methods of determining whether a subject is infected with and/or has been infected with SARS-CoV-2. In some embodiments, the methods may comprise contacting a sample from the subject (e.g., a serum sample from the subject) with any one of the protein variants disclosed herein (e.g., a protein variant described herein immobilized on a solid support). The method may further comprise determining whether a SARS-CoV-2 antibody present in the sample binds the protein variant disclosed herein (e.g., detecting a complex comprising the variant protein and an antibody from the sample), wherein if the protein variant disclosed herein forms an immunological complex with the antibody, the subject is infected and/or has been infected with SARS-CoV-2. The sample may be a biological sample that comprises antibodies that are capable of binding to any one of the variants provided herein (e.g., a serum sample). In some embodiments, the variant is immobilized on a solid support (e.g., a microplate well, a flow cell). In some embodiments, the immunological complex may be detected by ELISA or lateral flow.

[0056] Also provided herein are methods of treating and/or preventing a SARS-CoV-2 infection comprising administering a composition disclosed herein (e.g., a vaccine composition disclosed herein). The method may comprise administering one more (e.g. two or more, three or more, four or more, five or more, or six or more) doses of the composition.

[0057] Provided herein are methods of making a variant disclosed herein, the method comprising transfecting a cell with a nucleic acid disclosed herein. The method may further comprise expanding the cell into a population of cells, and isolating the peptides translated from the nucleic acids disclosed herein from the population of cells. The cell may be a prokaryotic cell (e.g., a bacterial cell), or a eukaryotic cell (e.g., a yeast cell, mammalian cell, or human cell).

### BRIEF DESCRIPTION OF THE FIGURES

[0058] FIG. 1 is a schematic showing a plasmid used to express ECT spike antigen proteins in Expi293F cells. The coding sequence for the ECT spike antigens (labeled “Library Gene”) was driven by the CMV promoter. The plasmid contains markers for both HEK293 (NTP II marker) and bacteria (AMP Marker), as well as an origin of replication for bacteria (pBR322).

[0059] FIG. 2 depicts a graph showing protein purification yield data of ECT spike antigens expressed from Expi293F cells and purified with Ni-NTA affinity chromatography. Antigen ID 4155326, representing the template (starting) antigen sequence, was used as a positive control and for determining hit ranking of the library members. The data show the plotting of three technical replicates of protein concentration measured via absorbance at 280 nm on a Nanodrop instrument. Antigen IDs and their corresponding purification yields from these graphs are shown in Table 8. SEQ ID NOs for each variant tested can be found in Table 8.

[0060] FIG. 3A depicts a graph showing Octet association constant (kₒₙ) binding characterization data of purified ECT spike antigen variants. SPN-C52H8 (SARS-CoV 2 Spike protein with His Tag) was purchased from Acro Biosystems and used as a positive control in the experiment. Results are for measured kₒₙ for ACE2.

[0061] FIG. 3B depicts a graph showing Octet association constant (kₒₙ) binding characterization data of purified ECT spike antigen variants. SPN-C52H8 (SARS-CoV 2 Spike protein with His Tag) was purchased from Acro Biosystems and used as a positive control in the experiment. Results are for measured kₒₙ for nAb1.

[0062] FIG. 3C depicts a graph showing Octet association constant (kₒₙ) binding characterization data of purified ECT spike antigen variants. SPN-C52H8 (SARS-CoV 2 Spike protein with His Tag) was purchased from Acro Biosystems and used as a positive control in the experiment. Results are for measured kₒₙ for nAb2.

[0063] FIG. 3D depicts a graph showing Octet association constant (kₒₙ) binding characterization data of purified ECT spike antigen variants. SPN-C52H8 (SARS-CoV 2 Spike protein with His Tag) was purchased from Acro Biosystems and used as a positive control in the experiment. Results are for measured kₒₙ for nAb3.

[0064] FIG. 4A shows repeat Octet association constant (kₒₙ) binding characterization data of purified ECT spike antigen variants. SPN-C52H8 (SARS-CoV 2 Spike protein with His Tag) was purchased from Acro Biosystems and used as a positive control in the experiment. Results are for measured kₒₙ for ACE2.

[0065] FIG. 4B shows repeat Octet association constant (kₒₙ) binding characterization data of purified ECT spike antigen variants. SPN-C52H8 (SARS-CoV 2 Spike protein with His Tag) was purchased from Acro Biosystems and used as a positive control in the experiment. Results are for measured kₒₙ for nAb1.

[0066] FIG. 4C shows repeat Octet association constant (kₒₙ) binding characterization data of purified ECT spike antigen variants. SPN-C52H8 (SARS-CoV 2 Spike protein with His Tag) was purchased from Acro Biosystems and used as a positive control in the experiment. Results are for measured kₒₙ for nAb2.

[0067] FIG. 4D shows repeat Octet association constant (kₒₙ) binding characterization data of purified ECT spike antigen variants. SPN-C52H8 (SARS-CoV 2 Spike protein with His Tag) was purchased from Acro Biosystems and used as a positive control in the experiment. Results are for measured kₒₙ for nAb3.

[0068] FIG. 5 depicts graphs showing correlation analysis of Octet association constant (kₒₙ) binding characterization data of purified ECT spike antigen variants. R² numbers indicate the calculated Pearson correlation coefficient.

### DETAILED DESCRIPTION

[0069] In certain aspects, the present disclosure pertains to variants of a SARS-CoV-2 nucleocapsid protein, variants of a SARS-CoV-2 spike protein, and variants of a SARS-CoV-2 spike protein receptor binding domain (RBD). In some embodiments, one or more variants of one, two or all three SARS-CoV-2 proteins can be used in a diagnostic test kit for the virus. In some embodiments, one or more variants of one, two or all three SARS-CoV-2 proteins can be used in a vaccine for the treatment and/or prevention of SARS-CoV-2 infection.

[0070] To support the COVID-19 pandemic response, computational protein engineering was used to design variants with enhanced stability while retaining key immunogenic sites. Variants are expressed in bacterial and mammalian cells, purified using a validated high-throughput (HT) purification platform, and screened for sensitivity, specificity, and stability. Such a large-scale approach to antigen optimization has yet to be applied to diagnostics development, and represents a significant advancement in the field while addressing a critical gap in the public health response to COVID-19.

[0071] The variants provided herein are optimized antigens that facilitate sensitive and specific SARS-CoV-2 vaccines and point of care (PoC) serological diagnostics.

[0072] In some embodiments, the serological diagnostic assays can be used to diagnose infections as early as 3 days after onset of symptoms, as well as immunity persistent for months to years after exposure to a virus or vaccine. In certain embodiments, the serological tests are used to distinguish those who are already immune to a virus, and can resume normal activities, from those who are not and must be protected from infection.

[0073] In some embodiments, the PoC tests provided herein can be performed outside a clinical laboratory (e.g., a doctor's office, school, or home) and can yield results within minutes without needing specialized equipment. Such serological PoC tests will be critical in efforts to mitigate SARS-CoV-2 transmission, given the naivete of the global population to the virus, its apparently high contagiousness, and the fact that a substantial proportion of those infected may be asymptomatic. In some embodiments, the serological PoC tests provided herein are economical and can scale to meet global demand.

[0074] In certain embodiments, the protein variants provided herein serve as antigens in serological PoC tests. In some embodiments, such antigens can capture anti-SARS-CoV-2 antibodies present in patient samples; binding of a secondary antibody converts the primary binding event into a detectable signal (e.g., a color change) that is used to determine a positive or negative test result.

[0075] Serology tests have two fundamental performance metrics that depend indirectly on antigen choice: sensitivity, the true positive rate; and specificity, the true negative rate. Sensitivity and specificity need to be high (typically greater than 95%) for a test to be diagnostically useful. High specificity, in particular, is essential for discriminating SARS-CoV-2-seropositive individuals from those who are seroconverted due to exposure to distinct but closely related pathogens. To enable a viable PoC diagnostic, the antigen must satisfy an additional criterion, stability, for robustness to storage conditions and immobilization on the device matrix.

[0076] Conventional antigen development involves generating and testing relatively few (<5) antigenic viral proteins against clinical serum samples with respect to sensitivity and specificity. A major shortcoming of this approach is its variable success rate. Because so few antigens are typically tested, success can come in a few weeks, if the few antigens were chosen “wisely,” or can take as long as a year or more, if the “right” antigen is akin to the needle in the haystack (e.g., if the antigen is inherently unstable or exists in multiple conformations) (Avouba 2016, Lyashchenko 2000). This problem is amenable to a highly parallelized solution: testing many antigen variants from the start.

[0077] Several SARS-CoV-2 serological tests—lateral flow assays (LFA) and enzyme-linked immunosorbent assays (ELISA)—have been reported (Amanat 2020, Li 2020, Xiang 2020) or offered for sale (Healgen, Native Antigen Company, Raybiotech, Sheridan 2020). Many claim adequate sensitivity and specificity, but the number of patient-derived sera samples used to validate the assays were much smaller than recommended (Buderer 1996), and thus these assays may not hold up to more rigorous scrutiny.

[0078] Design and test of large antigen libraries will accelerate and de-risk PoC serological diagnostics development.

[0079] To accelerate and de-risk PoC diagnostic development, thousands of candidate antigenic proteins and variants derived therefrom are tested. This approach is applicable to the COVID-19 pandemic as well as to future infectious disease outbreaks.

[0080] In certain embodiments, variants are designed to have enhanced stability. Notably, the unstable immunogenic pre-fusion conformation of the SARS-CoV-2 S protein was stabilized for cryo-electron microscopy (cryo-EM) by inclusion of two proline mutations in the S2 fusion domain (Wrapp 2020). Despite these modifications, expression titers were low, suggesting room for further improvement in stability, which correlates with expression level (Wrenbeck 2019). Amanat et al. expressed a similar S mutant with furin cleavage site removed, and separately expressed only the receptor binding domain (RBD) (Amanat 2020). Although both constructs were used to create ELISA assays, it remains unclear how well these specific antigens will perform in the context of an LFA device, wherein antigens must be retained on a solid surface and be shelf-stable. Additional stabilizing mutations can be introduced to further improve stability. In certain embodiments, variants are designed to have enhanced specificity.

[0081] Sequence- and structure-based computational engineering pipeline is used to predict, and then implement, mutations that enhance thermodynamic (robustness to high temperatures) and colloidal (reduced aggregation propensity) stability and specificity, all while preserving binding functionality. A comparable technique increased the thermostability of the malaria invasion protein RH5 by 10 to 15° C. for use as an antigen in vaccine development (Compoetto 2017). The structural data available for SARS-CoV-2 S protein (Walls 2020; Wrapp 2020) suggests similar strategies can be applied here.

[0082] The HT platform enables performing up to 8,000 arrayed bacterial or yeast transformations and 1,000 mammalian transfections weekly. N antigen libraries will be transformed into E. coli. S libraries will be transfected into mammalian cells. Protein expression cultures will be prepared in 96-well format, facilitating downstream assays. 8,000 arrayed samples per week will be purified and quantified.

[0083] The library is screened in vitro for binding to human anti-SARS-CoV-2 antibodies and stability by the four approaches mentioned above. Controls will include antibodies specific for other coronaviruses, e.g., SARS-CoV-1, MERS. NL63, 229E, and HKU1 spiked into human serum.

### Definitions

[0084] For convenience, certain terms employed in the specification, examples, and appended claims are collected here.

[0085] As used herein, the term “administering” means providing a pharmaceutical agent (e.g., a variant provided herein) and/or a composition to a subject (e.g., a vaccine composition provided herein), and includes, but is not limited to, administering by a medical professional and self-administering.

[0086] The term “amino acid” is intended to embrace all molecules, whether natural or synthetic, which include both an amino functionality and an acid functionality and capable of being included in a polymer of naturally occurring amino acids. Example amino acids include naturally occurring amino acids, analogs, derivatives and congeners thereof: amino acid analogs having variant side chains; and all stereoisomers of any of any of the foregoing.

[0087] The terms “polynucleotide” and “nucleic acid” are used interchangeably. They refer to a polymeric form of nucleotides of any length, either deoxyribonucleotides or ribonucleotides, or analogs thereof. Polynucleotides may have any three-dimensional structure, and may perform any function, known or unknown. The following are non-limiting examples of polynucleotides: coding or non-coding regions of a gene or gene fragment, loci (locus) defined from linkage analysis, exons, introns, messenger RNA (mRNA), transfer RNA, ribosomal RNA, ribozymes, cDNA, recombinant polynucleotides, branched polynucleotides, plasmids, vectors, isolated DNA of any sequence, isolated RNA of any sequence, nucleic acid probes, and primers. A polynucleotide may comprise modified nucleotides, such as methylated nucleotides and nucleotide analogs. If present, modifications to the nucleotide structure may be imparted before or after assembly of the polymer. The sequence of nucleotides may be interrupted by non-nucleotide components. A polynucleotide may be further modified, such as by conjugation with a labeling component. The term “recombinant” polynucleotide means a polynucleotide of genomic, cDNA, semisynthetic, or synthetic origin which either does not occur in nature or is linked to another polynucleotide in a non-natural arrangement. In some embodiments, the nucleic acid molecule is a messenger RNA (mRNA). As used herein, the term “messenger RNA” (mRNA) refers to any polynucleotide which encodes a polypeptide of interest (e.g., a protein variant disclosed herein) and which is capable of being translated to produce the encoded polypeptide of interest in vitro, in vivo, in situ or ex vivo.

[0088] The phrase “pharmaceutically-acceptable carrier” as used herein means a pharmaceutically-acceptable material, composition or vehicle, such as a liquid or solid filler, diluent, excipient, or solvent encapsulating material, involved in carrying or transporting the subject compound from one organ, or portion of the body, to another organ, or portion of the body.

[0089] As used herein, a therapeutic that “prevents” a disorder or condition refers to a compound that, when administered to a statistical sample prior to the onset of the disorder or condition, reduces the occurrence of the disorder or condition in the treated sample relative to an untreated control sample, or delays the onset or reduces the severity of one or more symptoms of the disorder or condition relative to the untreated control sample.

[0090] As used herein, “specific binding” refers to the ability of an antibody to bind to a predetermined antigen or the ability of a polypeptide to bind to its predetermined binding partner. By way of non-limiting example, an antibody or polypeptide specifically binds to its predetermined antigen or binding partner with an affinity corresponding to a K_{D} of about 10⁻⁷ M or less, and binds to the predetermined antigen/binding partner with an affinity (as expressed by K_{D}) that is at least 10 fold less, at least 100 fold less or at least 1000 fold less than its affinity for binding to a non-specific and unrelated antigen/binding partner (e.g., BSA, cascin).

[0091] As used herein, the term “subject” means a human or non-human animal selected for treatment or therapy.

[0092] The phrases “therapeutically effective amount” and “effective amount” as used herein mean the amount of an agent which is effective for producing the desired therapeutic effect in at least a sub-population of cells in a subject at a reasonable benefit/risk ratio applicable to any medical treatment.

[0093] “Treating” a disease in a subject or “treating” a subject having a disease refers to subjecting the subject to a pharmaceutical treatment, e.g., the administration of a drug, such that at least one symptom of the disease is decreased or prevented from worsening.

### Variants of SARS-CoV-2 Nucleocapsid Protein, Variants of S ARS-CoV-2 Spike Protein, and Variants of SARS-CoV-2 Spike Protein Receptor Binding Domain (RBD)

[0094] In some embodiments, the present disclosure pertains to novel variants of SARS-CoV-2 nucleocapsid protein, variants of SARS-CoV-2 spike protein, and variants of SARS-CoV-2 spike protein RBD. In some embodiments, a variant has a high immunogenicity, high specificity, high stability, and/or other qualities which make it useful as a component in a diagnostic test kit.

[0095] In some embodiments the variants provided herein comprise a different sequence from a corresponding SARS-CoV-2 protein. Wild-type SARS-CoV-2 nucleocapsid and spike amino acid and nucleic acid sequences can be found below:

SARS-COV-2 nucleocapsid wild-type nucleic
acid sequence (SEQ ID NO: 2593):
ATGTCTGATAATGGACCCCAAAATCAGCGAAATGCACCCCGCATTACGTT
TGGTGGACCCTCAGATTCAACTGGCAGTAACCAGAATGGAGAACGCAGTG
GGGCGCGATCAAAACAACGTCGGCCCCAAGGTTTACCCAATAATACTGCG
TCTTGGTTCACCGCTCTCACTCAACATGGCAAGGAAGACCTTAAATTCCC
TCGAGGACAAGGCGTTCCAATTAACACCAATAGCAGTCCAGATGACCAAA
TTGGCTACTACCGAAGAGCTACCAGACGAATTCGTGGTGGTGACGGTAAA
ATGAAAGATCTCAGTCCAAGATGGTATTTCTACTACCTAGGAACTGGGCC
AGAAGCTGGACTTCCCTATGGTGCTAACAAAGACGGCATCATATGGGTTG
CAACTGAGGGAGCCTTGAATACACCAAAAGATCACATTGGCACCCGCAAT
CCTGCTAACAATGCTGCAATCGTGCTACAACTTCCTCAAGGAACAACATT
GCCAAAAGGCTTCTACGCAGAAGGGAGCAGAGGCGGCAGTCAAGCCTCTT
CTCGTTCCTCATCACGTAGTCGCAACAGTTCAAGAAATTCAACTCCAGGC
AGCAGTAGGGGAACTTCTCCTGCTAGAATGGCTGGCAATGGCGGTGATGC
TGCTCTTGCTTTGCTGCTGCTTGACAGATTGAACCAGCTTGAGAGCAAAA
TGTCTGGTAAAGGCCAACAACAACAAGGCCAAACTGTCACTAAGAAATCT
GCTGCTGAGGCTTCTAAGAAGCCTCGGCAAAAACGTACTGCCACTAAAGC
ATACAATGTAACACAAGCTTTTGGCAGACGTGGTCCAGAACAAACCCAAG
GAAATTTTGGGGACCAGGAACTAATCAGACAAGGAACTGATTACAAACAT
TGGCCGCAAATTGCACAATTTGCCCCCAGCGCTTCAGCGTTCTTCGGAAT
GTCGCGCATTGGCATGGAAGTCACACCTTCGGGAACGTGGTTGACCTACA
CAGGTGCCATCAAATTGGATGACAAAGATCCAAATTTCAAAGATCAAGTC
ATTTTGCTGAATAAGCATATTGACGCATACAAAACATTCCCACCAACAGA
GCCTAAAAAGGACAAAAAGAAGAAGGCTGATGAAACTCAAGCCTTACCGC
AGAGACAGAAGAAACAGCAAACTGTGACTCTTCTTCCTGCTGCAGATTTG
GATGATTTCTCCAAACAATTGCAACAATCCATGAGCAGTGCTGACTCAAC
TCAGGCCTAA
SARS-COV-2 nucleocapsid wild-type amino
acid sequence (SEQ ID NO: 2594):
TQHGKEDLKFPRGQGVPINTNSSPDDQIGYYRRATRRIRGGDGKMKDLSP
RWYFYYLGTGPEAGLPYGANKDGIIWVATEGALNTPKDHIGTRNPANNAA
IVLQLPQGTTLPKGFYAEGSRGGSQASSRSSSRSRNSSRNSTPGSSRGTS
PARMAGNGGDAALALLLLDRLNQLESKMSGKGQQQQGQTVTKKSAAEASK
KPRQKRTATKAYNVTQAFGRRGPEQTQGNFGDQELIRQGTDYKHWPQIAQ
FAPSASAFFGMSRIGMEVTPSGTWLTYTGAIKLDDKDPNFKDQVILLNKH
IDAYKTFPPTEPKKDKKKKADETQALPQRQKKQQTVTLLPAADLDDFSKQ
LQQSMSSADSTQA
SARS-COV-2 spike protein wild-type nucleic
acid sequence (SEQ ID NO: 2595):
ATGTTTGTTTTTCTTGTTTTATTGCCACTAGTCTCTAGTCAGTGTGTTAA
TCTTACAACCAGAACTCAATTACCCCCTGCATACACTAATTCTTTCACAC
GTGGTGTTTATTACCCTGACAAAGTTTTCAGATCCTCAGTTTTACATTCA
ACTCAGGACTTGTTCTTACCTTTCTTTTCCAATGTTACTTGGTTCCATGC
TATACATGTCTCTGGGACCAATGGTACTAAGAGGTTTGATAACCCTGTCC
TACCATTTAATGATGGTGTTTATTTTGCTTCCACTGAGAAGTCTAACATA
ATAAGAGGCTGGATTTTTGGTACTACTTTAGATTCGAAGACCCAGTCCCT
ACTTATTGTTAATAACGCTACTAATGTTGTTATTAAAGTCTGTGAATTTC
AATTTTGTAATGATCCATTTTTGGGTGTTTATTACCACAAAAACAACAAA
AGTTGGATGGAAAGTGAGTTCAGAGTTTATTCTAGTGCGAATAATTGCAC
TTTTGAATATGTCTCTCAGCCTTTTCTTATGGACCTTGAAGGAAAACAGG
GTAATTTCAAAAATCTTAGGGAATTTGTGTTTAAGAATATTGATGGTTAT
TTTAAAATATATTCTAAGCACACGCCTATTAATTTAGTGCGTGATCTCCC
TCAGGGTTTTTCGGCTTTAGAACCATTGGTAGATTTGCCAATAGGTATTA
ACATCACTAGGTTTCAAACTTTACGGTGCTGCAGCTTATTATGTGGGTTA
TCTTCAACCTAGGACTTTTCTATTAAAATATAATGAAAATGGAACCATTA
CAGATGCTGTAGACTGTGCACTTGACCCTCTCTCAGAAACAAAGTGTACG
TTGAAATCCTTCACTGTAGAAAAAGGAATCTATCAAACTTCTAACTTTAG
AGTCCAACCAACAGAATCTATTGTTAGATTTCCTAATATTACAAACTTGT
GCCCTTTTGGTGAAGTTTTTAACGCCACCAGATTTGCATCTGTTTATGCT
TGGAACAGGAAGAGAATCAGCAACTGTGTTGCTGATTATTCTGTCCTATA
TAATTCCGCATCATTTTCCACTTTTAAGTGTTATGGAGTGTCTCCTACTA
AATTAAATGATCTCTGCTTTACTAATGTCTATGCAGATTCATTTGTAATT
AGAGGTGATGAAGTCAGACAAATCGCTCCAGGGCAAACTGGAAAGATTGC
TGATTATAATTATAAATTACCAGATGATTTTACAGGCTGCGTTATAGCTT
GGAATTCTAACAATCTTGATTCTAAGGTTGGTGGTAATTATAATTACCTG
TATAGATTGTTTAGGAAGTCTAATCTCAAACCTTTTGAGAGAGATATTTC
AACTGAAATCTATCAGGCCGGTAGCACACCTTGTAATGGTGTTGAAGGTT
TTAATTGTTACTTTCCTTTACAATCATATGGTTTCCAACCCACTAATGGT
GTTGGTTACCAACCATACAGAGTAGTAGTACTTTCTTTTGAACTTCTACA
TGCACCAGCAACTGTTTGTGGACCTAAAAAGTCTACTAATTTGGTTAAAA
ACAAATGTGTCAATTTCAACTTCAATGGTTTAACAGGCACAGGTGTTCTT
ACTGAGTCTAACAAAAAGTTTCTGCCTTTCCAACAATTTGGCAGAGACAT
TGCTGACACTACTGATGCTGTCCGTGATCCACAGACACTTGAGATTCTTG
ACATTACACCATGTTCTTTTGGTGGTGTCAGTGTTATAACACCAGGAACA
AATACTTCTAACCAGGTTGCTGTTCTTTATCAGGATGTTAACTGCACAGA
AGTCCCTGTTGCTATTCATGCAGATCAACTTACTCCTACTTGGCGTGTTT
ATTCTACAGGTTCTAATGTTTTTCAAACACGTGCAGGCTGTTTAATAGGG
GCTGAACATGTCAACAACTCATATGAGTGTGACATACCCATTGGTGCAGG
TATATGCGCTAGTTATCAGACTCAGACTAATTCTCCTCGGCGGGCACGTA
GTGTAGCTAGTCAATCCATCATTGCCTACACTATGTCACTTGGTGCAGAA
AATTCAGTTGCTTACTCTAATAACTCTATTGCCATACCCACAAATTTTAC
TATTAGTGTTACCACAGAAATTCTACCAGTGTCTATGACCAAGACATCAG
TAGATTGTACAATGTACATTTGTGGTGATTCAACTGAATGCAGCAATCTT
TTGTTGCAATATGGCAGTTTTTGTACACAATTAAACCGTGCTTTAACTGG
AATAGCTGTTGAACAAGACAAAAACACCCAAGAAGTTTTTGCACAAGTCA
AACAAATTTACAAAACACCACCAATTAAAGATTTTGGTGGTTTTAATTTT
TCACAAATATTACCAGATCCATCAAAACCAAGCAAGAGGTCATTTATTGA
AGATCTACTTTTCAACAAAGTGACACTTGCAGATGCTGGCTTCATCAAAC
AATATGGTGATTGCCTTGGTGATATTGCTGCTAGAGACCTCATTTGTGCA
CAAAAGTTTAACGGCCTTACTGTTTTGCCACCTTTGCTCACAGATGAAAT
GATTGCTCAATACACTTCTGCACTGTTAGCGGGTACAATCACTTCTGGTT
GGACCTTTGGTGCAGGTGCTGCATTACAAATACCATTTGCTATGCAAATG
GCTTATAGGTTTAATGGTATTGGAGTTACACAGAATGTTCTCTATGAGAA
CCAAAAATTGATTGCCAACCAATTTAATAGTGCTATTGGCAAAATTCAAG
ACTCACTTTCTTCCACAGCAAGTGCACTTGGAAAACTTCAAGATGTGGTC
AACCAAAATGCACAAGCTTTAAACACGCTTGTTAAACAACTTAGCTCCAA
TTTTGGTGCAATTTCAAGTGTTTTAAATGATATCCTTTCACGTCTTGACA
AAGTTGAGGCTGAAGTGCAAATTGATAGGTTGATCACAGGCAGACTTCAA
AGTTTGCAGACATATGTGACTCAACAATTAATTAGAGCTGCAGAAATCAG
AGCTTCTGCTAATCTTGCTGCTACTAAAATGTCAGAGTGTGTACTTGGAC
AATCAAAAAGAGTTGATTTTTGTGGAAAGGGCTATCATCTTATGTCCTTC
CCTCAGTCAGCACCTCATGGTGTAGTCTTCTTGCATGTGACTTATGTCCC
TGCACAAGAAAAGAACTTCACAACTGCTCCTGCCATTTGTCATGATGGAA
AAGCACACTTTCCTCGTGAAGGTGTCTTTGTTTCAAATGGCACACACTGG
TTTGTAACACAAAGGAATTTTTATGAACCACAAATCATTACTACAGACAA
CACATTTGTGTCTGGTAACTGTGATGTTGTAATAGGAATTGTCAACAACA
CAGTTTATGATCCTTTGCAACCTGAATTAGACTCATTCAAGGAGGAGTTA
GATAAATATTTTAAGAATCATACATCACCAGATGTTGATTTAGGTGACAT
CTCTGGCATTAATGCTTCAGTTGTAAACATTCAAAAAGAAATTGACCGCC
TCAATGAGGTTGCCAAGAATTTAAATGAATCTCTCATCGATCTCCAAGAA
CTTGGAAAGTATGAGCAGTATATAAAATGGCCATGGTACATTTGGCTAGG
TTTTATAGCTGGCTTGATTGCCATAGTAATGGTGACAATTATGCTTTGCT
GTATGACCAGTTGCTGTAGTTGTCTCAAGGGCTGTTGTTCTTGTGGATCC
TGCTGCAAATTTGATGAAGACGACTCTGAGCCAGTGCTCAAAGGAGTCAA
ATTACATTACACATAA
SARS-CoV-2 spike protein wild-type nucleic
acid sequence (SEQ ID NO: 2596):
MFVFLVLLPLVSSQCVNLTTRTQLPPAYTNSFTRGVYYPDKVFRSSVLHS
TQDLFLPFFSNVTWFHAIHVSGTNGTKRFDNPVLPFNDGVYFASTEKSNI
IRGWIFGTTLDSKTQSLLIVNNATNVVIKVCEFQFCNDPFLGVYYHKNNK
SWMESEFRVYSSANNCTFEYVSQPFLMDLEGKQGNFKNLREFVFKNIDGY
FKIYSKHTPINLVRDLPQGFSALEPLVDLPIGINITRFQTLLALHRSYLT
PGDSSSGWTAGAAAYYVGYLQPRTFLLKYNENGTITDAVDCALDPLSETK
CTLKSFTVEKGIYQTSNERVQPTESIVRFPNITNLCPFGEVFNATRFASV
YAWNRKRISNCVADYSVLYNSASFSTFKCYGVSPTKLNDLCFTNVYADSF
VIRGDEVRQIAPGQTGKIADYNYKLPDDFTGCVIAWNSNNLDSKVGGNYN
YLYRLFRKSNLKPFERDISTEIYQAGSTPCNGVEGFNCYFPLQSYGFQPT
NGVGYQPYRVVVLSFELLHAPATVCGPKKSTNLVKNKCVNFNFNGLTGTG
VLTESNKKFLPFQQFGRDIADTTDAVRDPQTLEILDITPCSFGGVSVITP
GTNTSNQVAVLYQDVNCTEVPVAIHADQLTPTWRVYSTGSNVFQTRAGCL
IGAEHVNNSYECDIPIGAGICASYQTQTNSPRRARSVASQSIIAYTMSLG
AENSVAYSNNSIAIPTNFTISVTTEILPVSMTKTSVDCTMYICGDSTECS
NLLLQYGSFCTQLNRALTGIAVEQDKNTQEVFAQVKQIYKTPPIKDFGGF
NFSQILPDPSKPSKRSFIEDLLFNKVTLADAGFIKQYGDCLGDIAARDLI
CAQKFNGLTVLPPLLTDEMIAQYTSALLAGTITSGWTFGAGAALQIPFAM
QMAYRENGIGVTQNVLYENQKLIANQFNSAIGKIQDSLSSTASALGKLQD
VVNQNAQALNTLVKQLSSNFGAISSVLNDILSRLDKVEAEVQIDRLITGR
LQSLQTYVTQQLIRAAEIRASANLAATKMSECVLGQSKRVDFCGKGYHLM
SFPQSAPHGVVFLHVTYVPAQEKNFTTAPAICHDGKAHFPREGVFVSNGT
HWFVTQRNFYEPQUITTDNTFVSGNCDVVIGIVNNTVYDPLQPELDSFKE
ELDKYFKNHTSPDVDLGDISGINASVVNIQKEIDRLNEVAKNLNESLIDL
QELGKYEQYIKWPWYIWLGFIAGLIAIVMVTIMLCCMTSCCSCLKGCCSC
GSCCKFDEDDSEPVLKGVKLHYT

### Variants of SARS-CoV-2 Nucleocapsid Protein

[0096] In some aspects, various novel variants of SARS-CoV-2 nucleocapsid protein are described herein. In some embodiments, various novel variants of SARS-CoV-2 nucleocapsid protein are described herein and annotated in Table 1. In some embodiments, a variant of SARS-CoV-2 nucleocapsid protein comprises at least one substitution, deletion and/or insertion of any variant of SARS-CoV-2 nucleocapsid protein described herein.

TABLE 1
Annotation of example nucleocapsid amino acid sequences
provided in the sequence listing (SEQ ID NOs: 598-1194).

| Nucleocapsid aa ORF splits | start | end |
|---|---|---|
| Start Codon | 1 | 1 |
| Molecule/1106289 [dsDNA] (Tag \| 6xHis) (SEQ ID NO: 2599)) | 2 | 7 |
| Molecule/180976 [dsDNA] (Linker \| 4aa GGSG) (SEQ ID NO: 2600) | 8 | 11 |
| Molecule/1106083 [dsDNA] (GST - encoded for Escherichia coli) | 12 | 242 |
| Molecule/180976 [dsDNA] (Linker \| 4aa GGSG) (SEQ ID NO: 2600)) | 243 | 246 |
| Molecule/1106295 [dsDNA] (TEV - encoded for Escherichia coli) | 247 | 253 |
| Nucleocapsid variant | 254 | 671 |

[0097] In some embodiments, the present disclosure pertains to: A non-naturally occurring variant of the SARS-CoV-2 nucleocapsid protein, wherein the amino acid sequence of the variant is amino acids 254-671 of any of SEQ ID NOs: 598 to 1194.

[0098] In some embodiments, the present disclosure pertains to: A non-naturally occurring variant of the SARS-CoV-2 nucleocapsid protein, wherein the amino acid sequence of the variant comprises a span of at least 15 contiguous amino acids of amino acids 254-671 of any of SEQ ID NOs: 598 to 1194, wherein the span comprises at least one variation from the corresponding span of the wild-type SARS-CoV-2 nucleocapsid protein.

[0099] In some embodiments, the present disclosure pertains to: A non-naturally occurring variant of the SARS-CoV-2 nucleocapsid protein, wherein the amino acid sequence of the variant has a substitution, insertion or deletion at one or more of: amino acids at positions 50, 53, 54, 55, 56, 57, 59, 62, 65, 68, 72, 74, 76, 79, 81, 86, 87, 90, 91, 94, 100, 101, 105, 107, 109, 111, 113, 114, 115, 118, 120, 123, 125, 126, 127, 128, 130, 131, 134, 135, 136, 139, 140, 141, 144, 148, 150, 152, 154, 155, 157, 158, 159, 160, 161, 162, 163, 166, 167, 169, 170, 173, 188, 201, 202, 206, 250, 252, 254, 255, 257, 260, 264, 267, 268, 273, 274, 276, 280, 281, 282, 289, 290, 291, 292, 293, 294, 296, 297, 298, 299, 300, 304, 308, 311, 312, 316, 319, 321, 322, 323, 324, 325, 327, 329, 336, 338, 341, 342, 343, 347, 348, 351, 355, or 360, and a deletion of amino acid position 1, relative to the wild-type nucleocapsid protein amino acid sequence (SEQ ID NO: 2594).

[0100] In some embodiments, a deletion of amino acid position 1 is described as d1 or D1 or A1.

[0101] In some embodiments, the present disclosure pertains to: A non-naturally occurring variant of the SARS-CoV-2 nucleocapsid protein, wherein the amino acid sequence of the variant has a substitution (e.g., a variation from the wild-type SARS-CoV-2 nucleocapsid protein) at one or more of: amino acids at positions 50, 53, 54, 55, 56, 57, 59, 62, 65, 68, 72, 74, 76, 79, 81, 86, 87, 90, 91, 94, 100, 101, 105, 107, 109, 111, 113, 114, 115, 118, 120, 123, 125, 126, 127, 128, 130, 131, 134, 135, 136, 139, 140, 141, 144, 148, 150, 152, 154, 155, 157, 158, 159, 160, 161, 162, 163, 166, 167, 169, 170, 173, 188, 201, 202, 206, 250, 252, 254, 255, 257, 260, 264, 267, 268, 273, 274, 276, 280, 281, 282, 289, 290, 291, 292, 293, 294, 296, 297, 298, 299, 300, 304, 308, 311, 312, 316, 319, 321, 322, 323, 324, 325, 327, 329, 336, 338, 341, 342, 343, 347, 348, 351, 355, or 360, and a deletion of amino acid position 1, relative to the wild-type nucleocapsid protein amino acid sequence (SEQ ID NO: 2594).

[0102] In some embodiments, the present disclosure pertains to: A non-naturally occurring variant of the SARS-CoV-2 nucleocapsid protein, wherein the amino acid sequence of the variant has a substitution, insertion or deletion (e.g., a variation from the wild-type SARS-CoV-2 nucleocapsid protein) at two or more of: amino acids at positions 50, 53, 54, 55, 56, 57, 59, 62, 65, 68, 72, 74, 76, 79, 81, 86, 87, 90, 91, 94, 100, 101, 105, 107, 109, 111, 113, 114, 115,118, 120, 123, 125, 126, 127, 128, 130, 131, 134, 135, 136, 139, 140, 141, 144, 148, 150, 152, 154, 155, 157, 158, 159, 160, 161, 162, 163, 166, 167, 169, 170, 173, 188, 201, 202, 206, 250, 252, 254, 255, 257, 260, 264, 267, 268, 273, 274, 276, 280, 281, 282, 289, 290, 291, 292, 293, 294, 296, 297, 298, 299, 300, 304, 308, 311, 312, 316, 319, 321, 322, 323, 324, 325, 327, 329, 336, 338, 341, 342, 343, 347, 348, 351, 355, or 360, and a deletion of amino acid position 1, relative to the wild-type nucleocapsid protein amino acid sequence (SEQ ID NO: 2594).

[0103] In some embodiments, the present disclosure pertains to: A non-naturally occurring variant of the SARS-CoV-2 nucleocapsid protein, wherein the amino acid sequence of the variant has a substitution (e.g., a variation from the wild-type SARS-CoV-2 nucleocapsid protein) at two or more of: amino acids at positions 50, 53, 54, 55, 56, 57, 59, 62, 65, 68, 72, 74, 76, 79, 81, 86, 87, 90, 91, 94, 100, 101, 105, 107, 109, 111, 113, 114, 115, 118, 120, 123, 125, 126, 127, 128, 130, 131, 134, 135, 136, 139, 140, 141, 144, 148, 150, 152, 154, 155, 157, 158, 159, 160, 161, 162, 163, 166, 167, 169, 170, 173, 188, 201, 202, 206, 250, 252, 254, 255, 257, 260, 264, 267, 268, 273, 274, 276, 280, 281, 282, 289, 290, 291, 292, 293, 294, 296, 297, 298, 299, 300, 304, 308, 311, 312, 316, 319, 321, 322, 323, 324, 325, 327, 329, 336, 338, 341, 342, 343, 347, 348, 351, 355, or 360, and a deletion of amino acid position 1, relative to the wild-type nucleocapsid protein amino acid sequence (SEQ ID NO: 2594).

[0104] In some embodiments, the present disclosure pertains to: A non-naturally occurring variant of the SARS-CoV-2 nucleocapsid protein, wherein the amino acid sequence of the variant has a substitution, insertion or deletion (e.g., a variation from the wild-type SARS-CoV-2 nucleocapsid protein) at three or more of: amino acids at positions 50, 53, 54, 55, 56, 57, 59, 62, 65, 68, 72, 74, 76, 79, 81, 86, 87, 90, 91, 94, 100, 101, 105, 107, 109, 111, 113, 114, 115, 118, 120, 123, 125, 126, 127, 128, 130, 131, 134, 135, 136, 139, 140, 141, 144, 148, 150, 152, 154, 155, 157, 158, 159, 160, 161, 162, 163, 166, 167, 169, 170, 173, 188, 201, 202, 206, 250, 252, 254, 255, 257, 260, 264, 267, 268, 273, 274, 276, 280, 281, 282, 289, 290, 291, 292, 293, 294, 296, 297, 298, 299, 300, 304, 308, 311, 312, 316, 319, 321, 322, 323, 324, 325, 327, 329, 336, 338, 341, 342, 343, 347, 348, 351, 355, or 360, and a deletion of amino acid position 1, relative to the wild-type nucleocapsid protein amino acid sequence (SEQ ID NO: 2594).

[0105] In some embodiments, the present disclosure pertains to: A non-naturally occurring variant of the SARS-CoV-2 nucleocapsid protein, wherein the amino acid sequence of the variant has a substitution (e.g., a variation from the wild-type SARS-CoV-2 nucleocapsid protein) at three or more of: amino acids at positions 50, 53, 54, 55, 56, 57, 59, 62, 65, 68, 72, 74, 76, 79, 81, 86, 87, 90, 91, 94, 100, 101, 105, 107, 109, 111, 113, 114,115, 118, 120, 123, 125, 126, 127, 128, 130, 131, 134, 135, 136, 139, 140, 141, 144, 148, 150, 152, 154, 155, 157, 158, 159, 160, 161, 162, 163, 166, 167, 169, 170, 173, 188, 201, 202, 206, 250, 252, 254, 255, 257, 260, 264, 267, 268, 273, 274, 276, 280, 281, 282, 289, 290, 291, 292, 293, 294, 296, 297, 298, 299, 300, 304, 308, 311, 312, 316, 319, 321, 322, 323, 324, 325, 327, 329, 336, 338, 341, 342, 343, 347, 348, 351, 355, or 360, and a deletion of amino acid position 1, relative to the wild-type nucleocapsid protein amino acid sequence (SEQ ID NO: 2594).

[0106] In some embodiments, the present disclosure pertains to: A non-naturally occurring variant of the SARS-CoV-2 nucleocapsid protein, wherein the amino acid sequence of the variant comprises amino acids 254-671 of any of SEQ ID NOs: 598 to 1194.

[0107] In some embodiments, the present disclosure pertains to: A non-naturally occurring variant of the SARS-CoV-2 nucleocapsid protein, wherein the amino acid sequence of the variant comprises any of SEQ ID NOs: 598 to 1194.

[0108] In some embodiments, the present disclosure pertains to: A non-naturally occurring variant of the SARS-CoV-2 nucleocapsid protein, wherein the amino acid sequence of the variant is amino acids 254-671 any of SEQ ID NOs: 598 to 1194.

[0109] An isolated recombinant nucleic acid encoding a non-naturally occurring variant of the SARS-CoV-2 nucleocapsid protein, wherein the nucleic acid has a sequence comprising any of SEQ ID NOs: 1 to 597, or the complementary sequence thereof.

[0110] In some embodiments, the present disclosure pertains to: A host cell comprising an isolated recombinant nucleic acid encoding a non-naturally occurring variant of the SARS-CoV-2 nucleocapsid protein, wherein the nucleic acid has a sequence comprising any of SEQ ID NOs: 1 to 597, or the complementary sequence thereof.

### Additional Variants of SARS-CoV-2 Nucleocapsid Protein

[0111] In some aspects, various novel variants of SARS-CoV-2 nucleocapsid protein are described herein. In some embodiments, various novel variants of SARS-CoV-2 nucleocapsid protein are described herein in Table 2. In some embodiments, a variant of SARS-CoV-2 nucleocapsid protein comprises at least one substitution, deletion and/or insertion of any variant of SARS-CoV-2 nucleocapsid protein described herein.

TABLE 2
Annotation of additional example nucleocapsid amino acid sequences
provided in the sequence listing (SEQ ID NOs 3203-3799).

| Nucleocapsid aa ORF splits | start | end |
|---|---|---|
| Start Codon | 1 | 1 |
| Molecule/2048679 [dsDNA] (MBP \| MALE_ECOLI \| malE \| Escherichia coli \| | 2 | 367 |
| Maltose/maltodextrin-binding periplasmic protein \| d1-26 d393-396 \| E. coli recode 1) | | |
| Molecule/180976 [dsDNA] (Linker \| 4aa GGSG) (SEQ ID NO: 2600) | 368 | 371 |
| Molecule/1106295 [dsDNA] (TEV - encoded for Escherichia Coli. Constraints: Gen9, | 372 | 378 |
| Twist, Common Restriction Enzymes, Standard Ginkgo Encoding Constraints) | | |
| Nucleocapsid variant | 379 | 796 |
| Molecule/180976 [dsDNA] (Linker \| 4aa GGSG) (SEQ ID NO: 2600)) | 797 | 800 |
| Molecule/1106289 [dsDNA] (Tag \| 6xHis) (SEQ ID NO: 2599)) | 801 | 806 |

TABLE 3
Sequences of components of additional nucleocapsid
amino acid sequences provided in Table 2.

| Nucleocapsid | Functional | nt |
|---|---|---|
| aa ORF splits | description | |
| Start Codon | start codon | atg |
| Molecule/ | solubility | aaaatcgaagaaggtaaactggtaatctggattaacggcgataaaggctataacggtct |
| 2048679 | tag | cgctgaagtcggtaagaaattcgagaaagataccggaattaaagtcaccgttgagcatc |
| [dsDNA] (MBP\| | | cggataaactggaagagaaattcccacaggttgcggcaactggcgatggccctgacatt |
| MALE_ECOLI\| | | atcttctgggcacacgaccgctttggtggctacgctcaatctggcctgttggctgaaat |
| malE\| | | caccggcgctggataaagaactgaaagcgaaaggtaagagcgcgctgatgttcaacctg |
| Escherichia | | caagaaccgtacttcacctggccgctgattgctgctgacgggggttatgogttcaagta |
| coli\| | | tgaaaacggcaagtacgacattaaagacgtgggcgtggataacgctggcgcgaaagcgg |
| Maltose/malto | | gtctgaccttcctggttgacctgattaaaaacaaacacatgaatgcagacaccgattac |
| dextrin- | | tccatcgcagaagctgcctttaataaaggcgaaacagcgatgaccatcaacggcccgtg |
| binding | | ggcatggtccaacatcgacaccagcaaagtgaattatggtgtaacggtactgccgacct |
| periplasmic | | tcaagggtcaaccatccaaaccgttcgttggcgtgctgagogcaggtattaacgccgcc |
| protein\|d1-26 | | agtccgaacaaagagctggcgaaagagttcctcgaaaactatctgctgactgatgaagg |
| d393-396\|E. | | tctggaagcggttaataaagacaaaccgctgggtgccgtagcgctgaagtcttacgagg |
| coli recode 1) | | aagagttggcgaaagatccacgtattgccgccaccatggaaaacgcccagaaaggtgaa |
| | | atcatgccgaacatcccgcagatgtccgctttctggtatgccgtgcgtactgcggtgat |
| | | caacgccgccagcggtcgtcagactgtcgatgaagccctgaaagacgcgcagact |
| | | (SEQ ID NO: 2601) |
| Molecule/ | linker | ggtggttctggt (SEQ ID NO: 2602) |
| 180976 [dsDNA] | | |
| (Linker\|4aa | | |
| GGSG) (SEQ | | |
| ID NO: 2600)) | | |
| Molecule/ | protease cut | gagaacctgtactttcaaagc (SEQ ID NO: 2603) |
| 1106295 | site | |
| [dsDNA] (TEV - | | |
| encoded for | | |
| Escherichia | | |
| Coli | | |
| Constraints: | | |
| Gen9, Twist, | | |
| Common | | |
| Restriction | | |
| Enzymes, | | |
| Standard | | |
| Ginkgo | | |
| Encoding | | |
| Constraints) | | |
| Nucleocapsid | nucleocapsid | cagaatggtgagcgtagtggagccaggtctaagcagcgccgtccccagggtctgccgaa |
| variant | | caacacggcgagctggtttactccgcttgttcaatttggtaaagaagacttaaaattcc |
| | | cgccgggccagggcgtcccgatcaacactaactcttccccggatgatcagattggttat |
| | | taccgcagagcaactcgtcggattcgcggcggcgacggtaaaatgaaagatttgccacc |
| | | gaagtggtacttttactatctcggcaccggtccgcacgctgatctgccctacgggcaaa |
| | | agaaggacggggtagtgtgggtggctcgacctggtgccctgaatactccaaaagatcat |
| | | atcggcacccgtaaccctgctaataacgctgcgatcccactgcaactgcctccgggtac |
| | | aaaactgccaaaaggcttctatgcagaagggtcgcgtggtggcagccaggcgagtaggc |
| | | aggtaacggtggtgacgctgctctggcgctgctactgctggacaggctgaaccagctgg |
| | | agtcgaagatgagtggtaaaggccaacagcagcagggccagaccgttaccaaaaagagc |
| | | gcagctgaagcatctaaaaaaccgcgacagaacgatcaggaattaatcogccaggggac |
| | | cgactacaaacactggccgcaaattgcccagttcgccccatccgctagtgcttgatgac |
| | | aaggacccgaactttaaagaccaggttattctgcttaacaaacatattgatgcctataa |
| | | aactttcccgccgaccgaacccaaaaaggacaaaaagaaaaaagctgatgaaacccagg |
| | | ctctacogcagcgtcagaaaaaacagcaaactgtgactctgctgccagctgcggacctg |
| | | gatgatttttccaagcagctgcaacagtctatgagctctgcggactctacgcaggct |
| | | (SEQ ID NO: 2604) |
| Molecule/ | linker | ggtggttctggt (SEQ ID NO: 2602) |
| 180976 [dsDNA] | | |
| (Linker\|4aa | | |
| GGSG) (SEQ | | |
| ID NO: 2600)) | | |
| Molecule/ | purification | caccatcatcaccatcat (SEQ ID NO: 2605) |
| 1106289 | tag | |
| [dsDNA] | | |
| (Tag\|6xHis) | | |
| (SEQ ID NO: | | |
| 2599)) | | |

[0112] In some embodiments, the present disclosure pertains to: A non-naturally occurring variant of the SARS-CoV-2 nucleocapsid protein, wherein the amino acid sequence of the variant comprises amino acids 379-796 of any of SEQ ID NOs: 3202-3799.

[0113] In some embodiments, the present disclosure pertains to: A non-naturally occurring variant of the SARS-CoV-2 nucleocapsid protein, wherein the amino acid sequence of the variant comprises any of SEQ ID NOs: 3202-3799.

[0114] In some embodiments, the present disclosure pertains to: A non-naturally occurring variant of the SARS-CoV-2 nucleocapsid protein, wherein the amino acid sequence of the variant is amino acids 379-796 any of SEQ ID NOs: 3202-3799.

[0115] An isolated recombinant nucleic acid encoding a non-naturally occurring variant of the SARS-CoV-2 nucleocapsid protein, wherein the nucleic acid has a sequence comprising any of SEQ ID NOs: 2606-3202, or the complementary sequence thereof.

[0116] In some embodiments, the present disclosure pertains to: A host cell comprising an isolated recombinant nucleic acid encoding a non-naturally occurring variant of the SARS-CoV-2 nucleocapsid protein, wherein the nucleic acid has a sequence comprising any of SEQ ID NOs: 2606-3202, or the complementary sequence thereof.

### Amino Acid Substitutions of Variants of SARS-CoV-2 Nucleocapsid Protein

[0117] In some embodiments, the present disclosure pertains to: A non-naturally occurring variant of the SARS-CoV-2 nucleocapsid protein, wherein the amino acid sequence of the variant comprises at least one, at least two, at least three, at least four, at least five, at least six, at least seven, at least eight, at least nine, at least ten, at least eleven, at least twelve, at least thirteen, at least fourteen, at least fifteen, at least sixteen, at least seventeen, at least eighteen, at least nineteen or at least twenty of the following mutations A50L, A50V, A50Y, F53Y, T54Q, A55G, A55P, L56I, T57K, T57V, H59F, H59K, H59N, H59Q, E62Q, K65S, K65T, R68A, R68E, R68K, R68P, R68Q, V72A, V721, V72M, V72T, V72W, I74D, I74K, 174L, I74T, I74V, T76A, T76D, T76E, T76K, T76N, T76P, T76Q, T76S, S79K, S79N, S79Q, S79T, D81S, Y86A, Y86C, Y86D, Y86E, Y86G, Y86H, Y86K, Y86M, Y86N, Y86P, Y86Q, Y86R, Y86S, Y86T, Y86W, Y87W, A90C, A90D, A90E, A90F, A90H, A901, A90K, A90L, A90M, A90Q, A90R, A90S, A90T, A90V, A90Y, T91I, T91Q, T91V, I94F, I94K, I94M, I94V, I94W, I94Y, K100Q, M101K, M101R, S105A, S105D, S105K, S105L, S105N, S105P, R107A, R107E, R107F, R107K, R107L, R107N, R107S, R107V, R107Y, Y109A, Y109F, Y109H, Y109S, Y111N, L113H, L113I, L113S, L113T, G114R, T115H, T115S, E118H, E118Y, G120A, G120D, G120E, G120H, G120K, G120N, G120Q, G120S, G120T, Y123F, A125D, A125E, A125H, A125Q, A125S, A125T, N126A, N126D, N126E, N126I, N126K, N126Q, N126R, N126S, N126T, N126V, K127H, K127M, K127Q, D128A, D128E, D128N, D128P, D128Q, D128S, D128T, D128V, I130V, I131F, I131H, I131L, I131T, I131V, I131Y, A134H, T135A, T135E, T135G, T135H, T135I, T135K, T135M, T135Q, T135R, T135S, T135V, E136D, E136K, E136N, E136P, L139D, L139K, L139M, L139N, L139Q, L139R, N140T, T141K, D144G, D144S, D144T, T148D, T148K, T148N, T148S, T148V, N150D, A152D, A152E, A152N, N154F, N154H, N154K, N154Q, N154Y, A155D, A155E, A155P, A155Q, A155S, A155T, I157A, I157C, I157D, I157E, I157F, I157G, I157H, I157K, I157L, I157M, I157N, I157P, I157Q, I157R, I157S, I157T, I157V, I157W, I157Y, V158A, V158C, V158D, V158E, V158G, V158H, V158K, V158L, V158M, V158N, V158P, V158Q, V158R, V158S, V158T, V158W, V158Y, L159C, L159I, L159N, L159T, L159V, Q160R, L161F, P162A, Q163A, Q163D, Q163E, Q163K, Q163N, Q163P, Q163S, Q163T, T166E, T166G, T166K, T166Q, T166S, T166V, T166W, L167I, L167P, K169E, K169P, G170N, A173C, A173M, A173N, A173S, S188E, S201E, S202E, S206E, S250D, S250K, S250N, S250T, A252D, A254M, A254N, S255A, K257A, K257H, K257I, K257R, K257V, Q260C, Q260W, A264P, A267D, A267E, A267F, A267G, A267H, A267K, A267N, A267Q, A267S, A267T, A267V, Y268C, Y268F, A273C, F274Y, R276A, R276E, R276K, R276L, R276P, R276S, R276T, E280D, E280H, E280K, E280N, E280Q, E280R, Q281D, Q281K, Q281P, T282L, Q289A, Q289D, Q289E, Q289K, Q289L, Q289S, E290D, E290K, E290N, E290Q, L291F, L291M, 1292L, 1292N, 1292T, 1292V, R293E, R293K, Q294E, Q294K, Q294L, Q294N, T296S, T296V, D297E, Y298D, K299P, K299S, H300G, H300K, H300N, H300Q, H300R, H300Y, 1304L, A308I, A308L, A308V, A311T, A311V, S312A, S312Q, G316F, R319E, R319H, R319K, R319Q, G321D, G321E, G321K, G321S, G321T, M322A, M322L, M322S, M322T, M322V, E323K, E323R, E323T, E323V, V324A, V324C, V324D, V324E, V324G, V324H, V324I, V324K, V324L, V324M, V324N, V324P, V324Q, V324R, V324S, V324T, V324W, V324Y, T325A, T325N, T325Q, T325S, S327D, S327N, T329I, T329V, A336K, A336S, A336T, K338T, D341E, D341K, D341P, D341Q, D341R, D341S, K342D, K342N, K342S, K342T, D343N, K347D, K347E, K347L, K347N, K347Q, K347R, D348E, D348K, D348N, I351E, I351K, K355E, K355Q, and/or Y360W relative to the wild-type nucleocapsid protein amino acid sequence (SEQ ID NO: 2594).

### Variants of SARS-CoV-2 Spike Protein

[0118] In some embodiments, various novel variants of SARS-CoV-2 spike protein are described herein. In some embodiments, various novel variants of SARS-CoV-2 spike protein are described herein and annotated in Table 4.

TABLE 4
Annotation of example spike protein amino acid sequences
provided in the sequence listing (SEQ ID NOs: 1795-2394).

| Spike aa ORF | start | end |
|---|---|---|
| Molecule/17747 [dsDNA] (Start codon) | 1 | 1 |
| Molecule/4155324 [dsDNA] (secretion signal mu-phosphatase) | 2 | 32 |
| Spike variant | 33 | 1230 |
| Molecule/4155309 [dsDNA] (linker \| GSGR(SEQ ID NO: 3800) \| H. sapiens | 1231 | 1234 |
| recode 1) | | |
| Molecule/4155318 [dsDNA] (Epitope \| TEV protease \| H. sapiens recode 1) | 1235 | 1241 |
| Molecule/4155310 [dsDNA] (linker \| GGGSG (SEQ ID NO: 3801) \| H. sapiens | 1242 | 1246 |
| recode 1) | | |
| Molecule/4155311 [dsDNA] (T6 fibritin foldon trimerization domain \| H. | 1247 | 1273 |
| sapiens recode 1) | | |
| Molecule/4155312 [dsDNA] (Tag \| 8xHis (SEQ ID NO: 2598\| H. sapiens | 1274 | 1281 |
| recode 1) | | |

[0119] In some embodiments, a variant of SARS-CoV-2 spike protein comprises at least one substitution, deletion and/or insertion of any variant of SARS-CoV-2 spike protein described herein (e.g., SEQ ID NOs 1795-2394).

[0120] In some embodiments, the present disclosure pertains to: A non-naturally occurring variant of the SARS-CoV-2 spike protein, wherein the amino acid sequence of the variant comprises amino acids 33-1230 of any of SEQ ID NOs: 1795 to 2394.

[0121] In some embodiments, the present disclosure pertains to: A non-naturally occurring variant of the SARS-CoV-2 spike protein, wherein the amino acid sequence of the variant comprises any of SEQ ID NOs: 1795 to 2394.

[0122] In some embodiments, the present disclosure pertains to: A non-naturally occurring variant of the SARS-CoV-2 spike protein, wherein the amino acid sequence of the variant is amino acids 33-1230 of any of SEQ ID NOs: 1795 to 2394.

[0123] In some embodiments, the present disclosure pertains to: A non-naturally occurring variant of the SARS-CoV-2 spike protein, wherein the amino acid sequence of the variant is any of SEQ ID NOs: 1795 to 2394.

[0124] In some embodiments, the present disclosure pertains to: A non-naturally occurring variant of the SARS-CoV-2 spike protein, wherein the amino acid sequence of the variant comprises a span of at least 15 contiguous amino acids of amino acids 33-1230 of any of SEQ ID NOs: 1795 to 2394, wherein the span comprises at least one variation from the corresponding span of the wild-type SARS-CoV-2 spike protein.

[0125] In some embodiments, the present disclosure pertains to: A non-naturally occurring variant of the SARS-CoV-2 spike protein, wherein the amino acid sequence of the variant has a substitution, insertion or deletion (e.g., a variation from the wild-type SARS-CoV-2 spike protein) at one or more of: amino acids at positions 32, 33, 41, 42, 46, 47, 50, 68, 71, 77, 78, 83, 84, 87, 90, 94, 95, 100, 101, 108, 112, 113, 114, 129, 132, 134, 135, 137, 138, 140, 141, 142, 153, 155, 157, 159, 171, 172, 173, 174, 175, 176, 177, 179, 180, 181, 187, 188, 202, 206, 207, 208, 222, 224, 226, 227, 228, 237, 241, 243, 245, 249, 259, 261, 262, 266, 271, 273, 276, 279, 280, 284, 292, 293, 297, 299, 302, 324, 325, 335, 339, 345, 352, 354, 356, 378, 399, 405, 417, 444, 461, 472, 477, 514, 529, 530, 537, 540, 541, 546, 547, 554, 556, 569, 570, 572, 573, 575, 580, 582, 586, 588, 598, 606, 607, 619, 622, 623, 626, 627, 630, 646, 655, 668, 682, 683, 684, 685, 688, 690, 693, 704, 706, 711, 713, 719, 723, 726, 727, 732, 734, 739, 747, 748, 750, 754, 761, 764, 768, 772, 774, 778, 779, 780, 788, 817, 826, 831, 834, 838, 839, 841, 844, 845, 855, 858, 859, 872, 875, 876, 878, 879, 882, 884, 895, 912, 921, 922, 929, 932, 933, 936, 937, 939, 940, 942, 943, 946, 953, 955, 960, 961, 977, 981, 982, 986, 987, 990, 991, 993, 1016, 1023, 1027, 1034, 1038, 1040, 1041, 1045, 1055, 1060, 1070, 1072, 1080, 1084, 1088, 1101, 1103, 1104, 1113, 1114, 1125, 1130, or 1133, and a deletion of amino acids positions at 1 to 13, and a deletion of amino acids at positions 1212-1273, relative to the wild-type spike protein amino acid sequence (SEQ ID NO: 2596).

[0126] In some embodiments, the present disclosure pertains to: A non-naturally occurring variant of the SARS-CoV-2 spike protein, wherein the amino acid sequence of the variant has a substitution (e.g., a variation from the wild-type SARS-CoV-2 spike protein) at one or more of: amino acids at positions 32, 33, 41, 42, 46, 47, 50, 68, 71, 77, 78, 83, 84, 87, 90, 94, 95, 100, 101,108, 112, 113, 114, 129,132, 134, 135, 137, 138,140, 141, 142, 153, 155, 157, 159, 171, 172, 173, 174, 175, 176, 177, 179, 180, 181, 187, 188, 202, 206, 207, 208, 222, 224, 226, 227, 228, 237, 241, 243, 245, 249, 259, 261, 262, 266, 271, 273, 276, 279, 280, 284, 292, 293, 297, 299, 302, 324, 325, 335, 339, 345, 352, 354, 356, 378, 399, 405, 417, 444, 461, 472, 477, 514, 529, 530, 537, 540, 541, 546, 547, 554, 556, 569, 570, 572, 573, 575, 580, 582, 586, 588, 598, 606, 607, 619, 622, 623, 626, 627, 630, 646, 655, 668, 682, 683, 684, 685, 688, 690, 693, 704, 706, 711, 713, 719, 723, 726, 727, 732, 734, 739, 747, 748, 750, 754, 761, 764, 768, 772, 774, 778, 779, 780, 788, 817, 826, 831, 834, 838, 839, 841, 844, 845, 855, 858, 859, 872, 875, 876, 878, 879, 882, 884, 895, 912, 921, 922, 929, 932, 933, 936, 937, 939, 940, 942, 943, 946, 953, 955, 960, 961, 977, 981, 982, 986, 987, 990, 991, 993, 1016, 1023, 1027, 1034, 1038, 1040, 1041, 1045, 1055, 1060, 1070, 1072, 1080, 1084, 1088, 1101, 1103, 1104, 1113, 1114, 1125, 1130, or 1133, and a deletion of amino acids at positions 1- to 13, and a deletion of amino acids at positions 1212-1273, relative to the wild-type spike protein amino acid sequence (SEQ ID NO: 2596).

[0127] In some embodiments, the present disclosure pertains to: A non-naturally occurring variant of the SARS-CoV-2 spike protein, wherein the amino acid sequence of the variant has a substitution, insertion or deletion (e.g., a variation from the wild-type SARS-CoV-2 spike protein) at two or more of: amino acids at positions 32, 33, 41, 42, 46, 47, 50, 68, 71, 77, 78, 83, 84, 87, 90, 94, 95, 100, 101, 108, 112, 113, 114, 129, 132, 134, 135, 137, 138, 140, 141, 142, 153, 155, 157, 159, 171, 172, 173, 174, 175, 176, 177, 179, 180, 181, 187, 188, 202, 206, 207, 208, 222, 224, 226, 227, 228, 237, 241, 243, 245, 249, 259, 261, 262, 266, 271, 273, 276, 279, 280, 284, 292, 293, 297, 299, 302, 324, 325, 335, 339, 345, 352, 354, 356, 378, 399, 405, 417, 444, 461, 472, 477, 514, 529, 530, 537, 540, 541, 546, 547, 554, 556, 569, 570, 572, 573, 575, 580, 582, 586, 588, 598, 606, 607, 619, 622, 623, 626, 627, 630, 646, 655, 668, 682, 683, 684, 685, 688, 690, 693, 704, 706, 711, 713, 719, 723, 726, 727, 732, 734, 739, 747, 748, 750, 754, 761, 764, 768, 772, 774, 778, 779, 780, 788, 817, 826, 831, 834, 838, 839, 841, 844, 845, 855, 858, 859, 872, 875, 876, 878, 879, 882, 884, 895, 912, 921, 922, 929, 932, 933, 936, 937, 939, 940, 942, 943, 946, 953, 955, 960, 961, 977, 981, 982, 986, 987, 990, 991, 993, 1016, 1023, 1027, 1034, 1038, 1040, 1041, 1045, 1055, 1060, 1070, 1072, 1080, 1084, 1088, 1101, 1103, 1104, 1113, 1114, 1125, 1130, or 1133, and a deletion of amino acids at positions 1-13, and a deletion of amino acids 1212-1273, relative to the wild-type spike protein amino acid sequence (SEQ ID NO: 25%).

[0128] In some embodiments, the present disclosure pertains to: A non-naturally occurring variant of the SARS-CoV-2 spike protein, wherein the amino acid sequence of the variant has a substitution (e.g., a variation from the wild-type SARS-CoV-2 spike protein) at two or more of: amino acids at positions 32, 33, 41, 42, 46, 47, 50, 68, 71, 77, 78, 83, 84, 87, 90, 94, 95, 100, 101, 108, 112, 113, 114, 129, 132, 134, 135, 137, 138, 140, 141, 142, 153, 155, 157, 159, 171, 172, 173, 174, 175, 176, 177, 179, 180, 181, 187, 188, 202, 206, 207, 208, 222, 224, 226, 227, 228, 237, 241, 243, 245, 249, 259, 261, 262, 266, 271, 273, 276, 279, 280, 284, 292, 293, 297, 299, 302, 324, 325, 335, 339, 345, 352, 354, 356, 378, 399, 405, 417, 444, 461, 472, 477, 514, 529, 530, 537, 540, 541, 546, 547, 554, 556, 569, 570, 572, 573, 575, 580, 582, 586, 588, 598, 606, 607, 619, 622, 623, 626, 627, 630, 646, 655, 668, 682, 683, 684, 685, 688, 690, 693, 704, 706, 711, 713, 719, 723, 726, 727, 732, 734, 739, 747, 748, 750, 754, 761, 764, 768, 772, 774, 778, 779, 780, 788, 817, 826, 831, 834, 838, 839, 841, 844, 845, 855, 858, 859, 872, 875, 876, 878, 879, 882, 884, 895, 912, 921, 922, 929, 932, 933, 936, 937, 939, 940, 942, 943, 946, 953, 955, 960,961, 977, 981, 982, 986, 987, 990, 991, 993, 1016, 1023, 1027, 1034, 1038, 1040, 1041, 1045, 1055, 1060, 1070, 1072, 1080, 1084, 1088, 1101, 1103, 1104, 1113, 1114, 1125, 1130, or 1133, and a deletion of amino acids at positions 1 to 13, and a deletion of amino acids at positions 1212-1273, relative to the wild-type spike protein amino acid sequence (SEQ ID NO: 2596).

[0129] In some embodiments, the present disclosure pertains to: A non-naturally occurring variant of the SARS-CoV-2 spike protein, wherein the amino acid sequence of the variant has a substitution, insertion or deletion (e.g., a variation from the wild-type SARS-CoV-2 spike protein) at three or more of: amino acids at positions 32, 33, 41, 42, 46, 47, 50, 68, 71, 77, 78, 83, 84, 87, 90, 94, 95, 100, 101, 108, 112, 113, 114, 129, 132, 134, 135, 137, 138, 140, 141, 142, 153, 155, 157, 159, 171, 172, 173, 174, 175, 176, 177, 179, 180, 181, 187, 188, 202, 206, 207, 208, 222, 224, 226, 227, 228, 237, 241, 243, 245, 249, 259, 261, 262, 266, 271, 273, 276, 279, 280, 284, 292, 293, 297, 299, 302, 324, 325, 335, 339, 345, 352, 354, 356, 378, 399, 405, 417, 444, 461, 472, 477, 514, 529, 530, 537, 540, 541, 546, 547, 554, 556, 569, 570, 572, 573, 575, 580, 582, 586, 588, 598, 606, 607, 619, 622, 623, 626, 627, 630, 646, 655, 668, 682, 683, 684, 685, 688, 690, 693, 704, 706, 711, 713, 719, 723, 726, 727, 732, 734, 739, 747, 748, 750, 754, 761, 764, 768, 772, 774, 778, 779, 780, 788, 817, 826, 831, 834, 838, 839, 841, 844, 845, 855, 858, 859, 872, 875, 876, 878, 879, 882, 884, 895, 912, 921, 922, 929, 932, 933, 936, 937, 939, 940, 942, 943, 946, 953, 955, 960, 961, 977, 981, 982, 986, 987, 990, 991, 993, 1016, 1023, 1027, 1034, 1038, 1040, 1041, 1045, 1055, 1060, 1070, 1072, 1080, 1084, 1088, 1101, 1103, 1104, 1113, 1114, 1125, 1130, or 1133, and a deletion of amino acids at positions 1-13, and a deletion of amino acids at positions 1212-1273, relative to the wild-type spike protein amino acid sequence (SEQ ID NO: 2596).

[0130] In some embodiments, the present disclosure pertains to: A non-naturally occurring variant of the SARS-CoV-2 spike protein, wherein the amino acid sequence of the variant has a substitution (e.g., a variation from the wild-type SARS-CoV-2 spike protein) at three or more of: amino acids at positions 32, 33, 41, 42, 46, 47, 50, 68, 71, 77, 78, 83, 84, 87, 90, 94, 95, 100, 101, 108, 112, 113, 114, 129,132, 134, 135, 137, 138, 140, 141, 142, 153, 155, 157, 159, 171, 172, 173, 174, 175, 176, 177, 179, 180, 181, 187, 188, 202, 206, 207, 208, 222, 224, 226, 227, 228, 237, 241, 243, 245, 249, 259, 261, 262, 266, 271, 273, 276, 279, 280, 284, 292, 293, 297, 299, 302, 324, 325, 335, 339, 345, 352, 354, 356, 378, 399, 405, 417, 444, 461, 472, 477, 514, 529, 530, 537, 540, 541, 546, 547, 554, 556, 569, 570, 572, 573, 575, 580, 582, 586, 588, 598, 606, 607, 619, 622, 623, 626, 627, 630, 646, 655, 668, 682, 683, 684, 685, 688, 690, 693, 704, 706, 711, 713, 719, 723, 726, 727, 732, 734, 739, 747, 748, 750, 754, 761, 764, 768, 772, 774, 778, 779, 780, 788, 817, 826, 831, 834, 838, 839, 841, 844, 845, 855, 858, 859, 872, 875, 876, 878, 879, 882, 884, 895, 912, 921, 922, 929, 932, 933, 936, 937, 939, 940, 942, 943, 946, 953, 955, 960, 961, 977, 981, 982, 986, 987, 990, 991, 993, 1016, 1023, 1027, 1034, 1038, 1040, 1041, 1045, 1055, 1060, 1070, 1072, 1080, 1084, 1088, 1101, 1103, 1104, 1113, 1114, 1125, 1130, or 1133, and a deletion of amino acids at positions 1 to 13, and a deletion of amino acids at positions 1212-1273, relative to the wild-type spike protein amino acid sequence (SEQ ID NO: 25%).

[0131] An isolated recombinant nucleic acid encoding a non-naturally occurring variant of the SARS-CoV-2 spike protein, wherein the nucleic acid has a sequence set forth in SEQ ID NOs. 1195-1794, or the complementary sequence thereof.

[0132] In some embodiments, the present disclosure pertains to: A host cell comprising an isolated recombinant nucleic acid encoding a non-naturally occurring variant of the SARS-CoV-2 spike protein, wherein the nucleic acid has a sequence set forth in SEQ ID NOs. 1195-1794, or the complementary sequence thereof.

### Additional Variants of SARS-CoV-2 Spike Protein

[0133] In some embodiments, various additional novel variants of SARS-CoV-2 spike protein are described herein. In some embodiments, various novel variants of SARS-CoV-2 spike protein are described herein in and annotated in Table 5.

TABLE 5
Annotation of spike protein amino acid sequences provided
in the sequence listing (SEQ ID NOs: 4299-4791).

| Nucleocapsid aa ORF splits | start | end |
|---|---|---|
| Molecule/17747 [dsDNA] (Start codon) | 1 | 1 |
| Molecule/4155324 [dsDNA] (secretion signal \| | 2 | 32 |
| mu-phosphatase) | | |
| Spike S1 region variant | 33 | 705 |
| Molecule/4256240 [dsDNA] (Tag \| 10xHis(SEQ ID NO: | 706 | 715 |
| 3802)) | | |

TABLE 6
Sequences of spike protein amino acid sequences provided in Table 5.

| Nucleocapsid | Functional | nt |
|---|---|---|
| aa ORF splits | description | |
| Molecule/ | start codon | atg |
| 17747 [dsDNA] | | |
| (Start codon) | | |
| Molecule/ | secretion | ggcatcctgccaagcccaggaatgcccgccctgctgtctctggtgagcctgctgtccgt |
| 4155324 | signal | gctgctgatgggatgcgtggcagagacaggcaca (SEQ ID NO: 3803) |
| [dsDNA] | | |
| (secretion | | |
| signal\|mu- | | |
| phosphatase) | | |
| Spike S1 | spike s1 | cagtgcgtgaacctgaccacaaggacccagctgccccctgcctataccaattctttcac |
| region variant | region | acggggcgtgtactatcccgacaaggtgtttagaagctccgtgctgcactccacacagg |
| 5324 | | atctgtttctgcctttcttttctaacgtgacctggttccacgccatccacgtgtccggc |
| | | accaatggcacaaagcggttcgacaatcccgtgctgccttttaacgatggcgtgtactt |
| | | cgccagcaccgagaagtccaacatcatcagaggctggatctttggcaccacactggact |
| | | ctaagacacagagcctgctgatcgtgaacaatgccaccaacgtggtgatcaaggtgtgc |
| | | gagttccagttttgtaatgatccattcctgggcgtgtactatcacaagaacaataagtc |
| | | ctggatggagtctgagtttcgcgtgtattctagcgccaacaattgcacatttgagtacg |
| | | tgagccagcccttcctgatggacctggagggcaagcagggcaatttcaagaacctgagg |
| | | gagttcgtgtttaagaatatcgatggctacttcaagatctacagcaagcacaccccaat |
| | | caacctggtgcgcgacctgccacagggattctccgccctggagccactggtggatctgc |
| | | ccatcggcatcaacatcacccggtttcagacactgctggccctgcacagatcctacctg |
| | | acaccaggcgactcctctagoggatggaccgcaggagctgccgcctactatgtgggcta |
| | | tctgcagccccggaccttcctgctgaagtacaacgagaatggcaccatcacagacgcag |
| | | tggattgcgccctggaccccctgtctgagacaaagtgtacactgaagagctttaccgtg |
| | | gagaagggcatctatcagacaagcaatttcagggtgcagcctaccgagtccatcgtgcg |
| | | ctttcccaatatcacaaacctgtgcccttttggcgaggtgttcaacgccaccagattcg |
| | | ccagcgtgtacgcctggaatcggaagagaatctccaactgcgtggccgactattctgtg |
| | | ctgtacaactccgcctctttcagcacctttaagtgctatggcgtgtctcccacaaagct |
| | | gaatgatctgtgctttaccaacgtgtacgccgatagcttcgtgatcaggggagacgaag |
| | | tgagacagatcgcaccaggacagacaggaaagatcgcagactacaattataagctgcct |
| | | gacgatttcaccggctgcgtgatcgcctggaactccaacaatctggattctaaagtggg |
| | | cggcaactacaattatctgtacaggctgtttcgcaagtccaatctgaagccattcgagc |
| | | gggacatctccacagagatctaccaggccggctctaccccctgcaatggcgtggagggc |
| | | tttaactgttatttccctctgcagtcttacggcttccagccaacaaacggcgtgggcta |
| | | tcagccctacagagtggtggtgctgtcctttgaggaactgcacgcaccagcaacagtgt |
| | | gcggcccaaagaagtctaccaatctggtgaagaacaagtgcgtgaacttcaacttcaac |
| | | ggactgaccggcacaggcgtgctgaccgagagcaataagaagttcctgccttttcagca |
| | | gttcggcagggacatcgcagataccacagacgccgtgcgcgaccctcagaccctggaga |
| | | tcctggacatcacaccatgcagcttcggcggcgtgtccgtgatcacaccaggcaccaat |
| | | acatccaaccaggtggccgtgctgtatcaggacgtgaattgtaccgaggtgcccgtggc |
| | | aatccacgcagatcagctgacccctacatggcgggtgtactctaccggcagcaacgtgt |
| | | tccagacaaggtgccagctaccagacccagacaaactccccatctggagcaggctcc |
| | | (SEQ ID NO: 3804) |
| Molecule/ | purification | caccatcaccatcaccateaccatcaccac (SEQ ID NO: 3805) |
| 4256240 | tag | |
| [dsDNA] | | |
| (Tag\|10xHis) | | |
| (SEQ ID NO: | | |
| 3802)) | | |

[0134] In some embodiments, a variant of SARS-CoV-2 spike protein comprises at least one substitution, deletion and/or insertion of any variant of SARS-CoV-2 spike protein described herein (e.g., SEQ ID NOs 42994791).

[0135] In some embodiments, the present disclosure pertains to: A non-naturally occurring variant of the SARS-CoV-2 spike protein, wherein the amino acid sequence of the variant comprises amino acids 33-705 of any of SEQ ID NOs: 4299-4791.

[0136] In some embodiments, the present disclosure pertains to: A non-naturally occurring variant of the SARS-CoV-2 spike protein, wherein the amino acid sequence of the variant comprises any of SEQ ID NOs: 4299-4791.

[0137] In some embodiments, the present disclosure pertains to: A non-naturally occurring variant of the SARS-CoV-2 spike protein, wherein the amino acid sequence of the variant is amino acids 33-705 of any of SEQ ID NOs: 4299-4791.

[0138] In some embodiments, the present disclosure pertains to: A non-naturally occurring variant of the SARS-CoV-2 spike protein, wherein the amino acid sequence of the variant is any of SEQ ID NOs: 4299-4791.

[0139] In some embodiments, the present disclosure pertains to: A non-naturally occurring variant of the SARS-CoV-2 spike protein, wherein the amino acid sequence of the variant comprises a span of at least 15 contiguous amino acids of amino acids 33-705 of any of SEQ ID NOs: 42994791, wherein the span comprises at least one variation from the corresponding span of the wild-type SARS-CoV-2 spike protein.

[0140] In some embodiments, the present disclosure pertains to: A non-naturally occurring variant of the SARS-CoV-2 spike protein, wherein the amino acid sequence of the variant has a substitution, insertion or deletion (e.g., a variation from the wild-type SARS-CoV-2 spike protein) at one or more of: amino acids at positions 36, 46, 47, 49, 50, 63, 64, 68, 70, 71, 81, 84, 92, 94, 95, 97, 98, 101, 108, 112, 115, 123, 125, 129, 132, 136, 138, 140, 146, 153, 155, 159, 161, 167, 171, 172, 177, 178, 184, 186, 187, 188, 192, 202, 205, 206, 207, 209, 213, 221, 222, 225, 226, 228, 236, 237, 239, 240, 241, 245, 249, 252, 257, 258, 260, 262, 264, 284, 292, 298, 299, 302, 316, 321, 324, 325, 329, 335, 338, 339, 344, 345, 350, 354, 356, 367, 368, 375, 377, 378, 379, 393, 399, 417, 419, 420, 424, 432, 439, 443, 445, 459, 460, 461, 464, 467, 470, 472, 475, 477, 480, 482, 484, 487, 488, 489, 490, 496, 501, 503, 504, 505, 514, 517, 518, 519, 522, 526, 528, 530, 534, 537, 546, 551, 557, 566, 567, 568, 569, 571, 573, 574, 582, 585, 588, 592, 595, 596, 601, 603, 608, 621, 622, 623, 624, 625, 627, 630, 635, 636, 637, 642, 651, 653, 655, 666, 668, 673, 678, 682, 683, and/or 685, and a deletion of amino acids positions at 1 to 13, and a deletion of amino acids at positions 687-1273, relative to the wild-type spike protein amino acid sequence (SEQ ID NO: 2596).

[0141] In some embodiments, the present disclosure pertains to: A non-naturally occurring variant of the SARS-CoV-2 spike protein, wherein the amino acid sequence of the variant has a substitution (e.g., a variation from the wild-type SARS-CoV-2 spike protein) at one or more of: amino acids at positions 36, 46, 47, 49, 50, 63, 64, 68, 70, 71, 81, 84, 92, 94, 95, 97, 98, 101, 108, 112, 115, 123, 125, 129, 132, 136, 138, 140, 146, 153, 155, 159, 161, 167, 171, 172, 177, 178, 184, 186, 187, 188, 192, 202, 205, 206, 207, 209, 213, 221, 222, 225, 226, 228, 236, 237, 239, 240, 241, 245, 249, 252, 257, 258, 260, 262, 264, 284, 292, 298, 299, 302, 316, 321, 324, 325, 329, 335, 338, 339, 344, 345, 350, 354, 356, 367, 368, 375, 377, 378, 379, 393, 399, 417, 419, 420, 424, 432, 439, 443, 445, 459, 460, 461, 464, 467, 470, 472, 475, 477, 480, 482, 484, 487, 488, 489, 490, 496, 501, 503, 504, 505, 514, 517, 518, 519, 522, 526, 528, 530, 534, 537, 546, 551, 557, 566, 567, 568, 569, 571, 573, 574, 582, 585, 588, 592, 595, 596, 601, 603, 608, 621, 622, 623, 624, 625, 627, 630, 635, 636, 637, 642, 651, 653, 655, 666, 668, 673, 678, 682, 683, and/or 685, and a deletion of amino acids positions at 1 to 13, and a deletion of amino acids at positions 687-1273, relative to the wild-type spike protein amino acid sequence (SEQ ID NO: 2596).

[0142] In some embodiments, the present disclosure pertains to: A non-naturally occurring variant of the SARS-CoV-2 spike protein, wherein the amino acid sequence of the variant has a substitution, insertion or deletion (e.g., a variation from the wild-type SARS-CoV-2 spike protein) at two or more of: amino acids at positions 36, 46, 47, 49, 50, 63, 64, 68, 70, 71, 81, 84, 92, 94, 95, 97, 98, 101, 108, 112, 115, 123, 125, 129, 132, 136, 138, 140, 146, 153, 155, 159, 161, 167, 171, 172, 177, 178, 184, 186, 187, 188, 192, 202, 205, 206, 207, 209, 213, 221, 222, 225, 226, 228, 236, 237, 239, 240, 241, 245, 249, 252, 257, 258, 260, 262, 264, 284, 292, 298, 299, 302, 316, 321, 324, 325, 329, 335, 338, 339, 344, 345, 350, 354, 356, 367, 368, 375, 377, 378, 379, 393, 399, 417, 419, 420, 424, 432, 439, 443, 445, 459, 460, 461, 464, 467, 470, 472, 475, 477, 480, 482, 484, 487, 488, 489, 490, 496, 501, 503, 504, 505, 514, 517, 518, 519, 522, 526, 528, 530, 534, 537, 546, 551, 557, 566, 567, 568, 569, 571, 573, 574, 582, 585, 588, 592, 595, 596, 601, 603, 608, 621, 622, 623, 624, 625, 627, 630, 635, 636, 637, 642, 651, 653, 655, 666, 668, 673, 678, 682, 683, and/or 685, and a deletion of amino acids positions at 1 to 13, and a deletion of amino acids at positions 687-1273, relative to the wild-type spike protein amino acid sequence (SEQ ID NO: 2596).

[0143] In some embodiments, the present disclosure pertains to: A non-naturally occurring variant of the SARS-CoV-2 spike protein, wherein the amino acid sequence of the variant has a substitution (e.g., a variation from the wild-type SARS-CoV-2 spike protein) at two or more of: amino acids at positions 36, 46, 47, 49, 50, 63, 64, 68, 70, 71, 81, 84, 92, 94, 95, 97, 98, 101, 108, 112, 115, 123, 125, 129, 132, 136, 138, 140, 146, 153, 155, 159, 161, 167, 171, 172, 177, 178, 184, 186, 187, 188, 192, 202, 205, 206, 207, 209, 213, 221, 222, 225, 226, 228, 236, 237, 239, 240, 241, 245, 249, 252, 257, 258, 260, 262, 264, 284, 292, 298, 299, 302, 316, 321, 324, 325, 329, 335, 338, 339, 344, 345, 350, 354, 356, 367, 368, 375, 377, 378, 379, 393, 399, 417, 419, 420, 424, 432, 439, 443, 445, 459, 460, 461, 464, 467, 470, 472, 475, 477, 480, 482, 484, 487, 488, 489, 490, 496, 501, 503, 504, 505, 514, 517, 518, 519, 522, 526, 528, 530, 534, 537, 546, 551, 557, 566, 567, 568, 569, 571, 573, 574, 582, 585, 588, 592, 595, 596, 601, 603, 608, 621, 622, 623, 624, 625, 627, 630, 635, 636, 637, 642, 651, 653, 655, 666, 668, 673, 678, 682, 683, and/or 685, and a deletion of amino acids positions at 1 to 13, and a deletion of amino acids at positions 687-1273, relative to the wild-type spike protein amino acid sequence (SEQ ID NO: 2596).

[0144] In some embodiments, the present disclosure pertains to: A non-naturally occurring variant of the SARS-CoV-2 spike protein, wherein the amino acid sequence of the variant has a substitution, insertion or deletion (e.g., a variation from the wild-type SARS-CoV-2 spike protein) at three or more of: amino acids at positions 36, 46, 47, 49, 50, 63, 64, 68, 70, 71, 81, 84, 92, 94, 95, 97, 98, 101, 108, 112, 115, 123, 125, 129, 132, 136, 138, 140, 146, 153, 155, 159, 161, 167, 171, 172, 177, 178, 184, 186, 187, 188, 192, 202, 205, 206, 207, 209, 213, 221, 222, 225, 226, 228, 236, 237, 239, 240, 241, 245, 249, 252, 257, 258, 260, 262, 264, 284, 292, 298, 299, 302, 316, 321, 324, 325, 329, 335, 338, 339, 344, 345, 350, 354, 356, 367, 368, 375, 377, 378, 379, 393, 399, 417, 419, 420, 424, 432, 439, 443, 445, 459, 460, 461, 464, 467, 470, 472, 475, 477, 480, 482, 484, 487, 488, 489, 490, 496, 501, 503, 504, 505, 514, 517, 518, 519, 522, 526, 528, 530, 534, 537, 546, 551, 557, 566, 567, 568, 569, 571, 573, 574, 582, 585, 588, 592, 595, 596, 601, 603, 608, 621, 622, 623, 624, 625, 627, 630, 635, 636, 637, 642, 651, 653, 655, 666, 668, 673, 678, 682, 683, and/or 685, and a deletion of amino acids positions at 1 to 13, and a deletion of amino acids at positions 687-1273, relative to the wild-type spike protein amino acid sequence (SEQ ID NO: 2596).

[0145] In some embodiments, the present disclosure pertains to: A non-naturally occurring variant of the SARS-CoV-2 spike protein, wherein the amino acid sequence of the variant has a substitution (e.g., a variation from the wild-type SARS-CoV-2 spike protein) at three or more of: amino acids at positions 36, 46, 47, 49, 50, 63, 64, 68, 70, 71, 81, 84, 92, 94, 95, 97, 98, 101, 108, 112, 115, 123, 125, 129, 132, 136, 138, 140, 146, 153, 155, 159, 161, 167, 171, 172, 177, 178, 184, 186, 187, 188, 192, 202, 205, 206, 207, 209, 213, 221, 222, 225, 226, 228, 236, 237, 239, 240, 241, 245, 249, 252, 257, 258, 260, 262, 264, 284, 292, 298, 299, 302, 316, 321, 324, 325, 329, 335, 338, 339, 344, 345, 350, 354, 356, 367, 368, 375, 377, 378, 379, 393, 399, 417, 419, 420, 424, 432, 439, 443, 445, 459, 460, 461, 464, 467, 470, 472, 475, 477, 480, 482, 484, 487, 488, 489, 490, 496, 501, 503, 504, 505, 514, 517, 518, 519, 522, 526, 528, 530, 534, 537, 546, 551, 557, 566, 567, 568, 569, 571, 573, 574, 582, 585, 588, 592, 595, 596, 601, 603, 608, 621, 622, 623, 624, 625, 627, 630, 635, 636, 637, 642, 651, 653, 655, 666, 668, 673, 678, 682, 683, and/or 685, and a deletion of amino acids positions at 1 to 13, and a deletion of amino acids at positions 687-1273, relative to the wild-type spike protein amino acid sequence (SEQ ID NO: 2596).

[0146] An isolated recombinant nucleic acid encoding a non-naturally occurring variant of the SARS-CoV-2 nucleocapsid protein, wherein the nucleic acid has a sequence comprising any of SEQ ID NOs: 3806-4298, or the complementary sequence thereof.

[0147] In some embodiments, the present disclosure pertains to: A host cell comprising an isolated recombinant nucleic acid encoding a non-naturally occurring variant of the SARS-CoV-2 nucleocapsid protein, wherein the nucleic acid has a sequence comprising any of SEQ ID NOs: 3806-4298, or the complementary sequence thereof.

### Additional Variants of SARS-CoV-2 Spike Protein

[0148] In some embodiments, various additional novel variants of SARS-CoV-2 spike protein are described herein. In some embodiments, various novel variants of SARS-CoV-2 spike protein are described herein (e.g., SEQ ID NOs: 48164838).

[0149] In some embodiments, the present disclosure pertains to: A non-naturally occurring variant of the SARS-CoV-2 spike protein, wherein the amino acid sequence comprises any of the amino acid sequences set forth in SEQ ID NOs: 4816-4838.

[0150] In some embodiments, the present disclosure pertains to: A non-naturally occurring variant of the SARS-CoV-2 spike protein, wherein the amino acid sequence of the variant is any of the amino acid sequences set forth in SEQ ID NOs: 4816-4838.

[0151] In some embodiments, the present disclosure pertains to: A non-naturally occurring variant of the SARS-CoV-2 spike protein, wherein the amino acid sequence of the variant comprises amino acids 33-705 of any of SEQ ID NOs: 4816-4838.

[0152] In some embodiments, the present disclosure pertains to: A non-naturally occurring variant of the SARS-CoV-2 spike protein, wherein the amino acid sequence of the variant is amino acids 33-705 of any of SEQ ID NOs: 4816-4838.

[0153] In some embodiments, the present disclosure pertains to: A non-naturally occurring variant of the SARS-CoV-2 spike protein, wherein the amino acid sequence of the variant comprises a span of at least 15 contiguous amino acids of amino acids 33-705 of any of SEQ ID NOs: 4816-4838, wherein the span comprises at least one variation from the corresponding span of the wild-type SARS-CoV-2 spike protein.

[0154] In some embodiments, the present disclosure pertains to: A non-naturally occurring variant of the SARS-CoV-2 spike protein, wherein the amino acid sequence of the variant has a substitution, insertion or deletion (e.g., a variation from the wild-type SARS-CoV-2 spike protein) at one or more of: amino acids at positions 115, 200, 370, 372, 375, 376 and/or 415 and a deletion of amino acids positions at 1 to 13, and a deletion of amino acids at positions 687-1273, relative to the wild-type spike protein amino acid sequence (SEQ ID NO: 2596).

[0155] In some embodiments, the present disclosure pertains to: A non-naturally occurring variant of the SARS-CoV-2 spike protein, wherein the amino acid sequence of the variant has a substitution at one or more of: amino acids at positions 115, 200, 370, 372, 375, 376 and/or 415, and a deletion of amino acids positions at 1 to 13, and a deletion of amino acids at positions 687-1273, relative to the wild-type spike protein amino acid sequence (SEQ ID NO: 2596).

[0156] In some embodiments, the present disclosure pertains to: A non-naturally occurring variant of the SARS-CoV-2 spike protein, wherein the amino acid sequence of the variant has a substitution, insertion or deletion (e.g., a variation from the wild-type SARS-CoV-2 spike protein) at two or more of: amino acids at positions 115, 200, 370, 372, 375, 376 and/or 415, and a deletion of amino acids positions at 1 to 13, and a deletion of amino acids at positions 687-1273, relative to the wild-type spike protein amino acid sequence (SEQ ID NO: 2596).

[0157] In some embodiments, the present disclosure pertains to: A non-naturally occurring variant of the SARS-CoV-2 spike protein, wherein the amino acid sequence of the variant has a substitution (e.g., a variation from the wild-type SARS-CoV-2 spike protein) at two or more of: amino acids at positions 115, 200, 370, 372, 375, 376 and/or 415, and a deletion of amino acids positions at 1 to 13, and a deletion of amino acids at positions 687-1273, relative to the wild-type spike protein amino acid sequence (SEQ ID NO: 2596).

[0158] In some embodiments, the present disclosure pertains to: A non-naturally occurring variant of the SARS-CoV-2 spike protein, wherein the amino acid sequence of the variant has a substitution, insertion or deletion (e.g., a variation from the wild-type SARS-CoV-2 spike protein) at three or more of: amino acids at positions 115, 200, 370, 372, 375, 376 and/or 415, and a deletion of amino acids positions at 1 to 13, and a deletion of amino acids at positions 687-1273, relative to the wild-type spike protein amino acid sequence (SEQ ID NO: 2596).

[0159] In some embodiments, the present disclosure pertains to: A non-naturally occurring variant of the SARS-CoV-2 spike protein, wherein the amino acid sequence of the variant has a substitution at three or more of: amino acids at positions 115, 200, 370, 372, 375, 376 and/or 415, and a deletion of amino acids positions at 1 to 13, and a deletion of amino acids at positions 687-1273, relative to the wild-type spike protein amino acid sequence (SEQ ID NO: 25%).

[0160] An isolated recombinant nucleic acid encoding a non-naturally occurring variant of the SARS-CoV-2 spike protein, wherein the nucleic acid has a sequence set forth in SEQ ID NOs. 4793-4815, or the complementary sequence thereof.

[0161] In some embodiments, the present disclosure pertains to: A host cell comprising an isolated recombinant nucleic acid encoding a non-naturally occurring variant of the SARS-CoV-2 spike protein, wherein the nucleic acid has a sequence set forth in SEQ ID NOs. 4793-4815, or the complementary sequence thereof.

### Variants of SARS-CoV-2 Spike Ectodomain

[0162] In some embodiments, various novel variants of SARS-CoV-2 spike ectodomain protein are described herein. In some embodiments, various novel variants of SARS-CoV-2 spike ectodomain protein are described herein in (e.g., SEQ ID NOs: 5248-5656).

[0163] In some embodiments, the present disclosure pertains to: A non-naturally occurring variant of the SARS-CoV-2 spike ectodomain protein, wherein the amino acid sequence comprises any of the amino acid sequences set forth in SEQ ID NOs: 5248-5656.

[0164] In some embodiments, the present disclosure pertains to: A non-naturally occurring variant of the SARS-CoV-2 spike protein, wherein the amino acid sequence of the variant comprises amino acids 33-1230 of any of SEQ ID NOs: 5248-5656.

[0165] In some embodiments, the present disclosure pertains to: A non-naturally occurring variant of the SARS-CoV-2 spike protein, wherein the amino acid sequence of the variant is amino acids 33-1230 of any of SEQ ID NOs: 5248-5656.

[0166] In some embodiments, the present disclosure pertains to: A non-naturally occurring variant of the SARS-CoV-2 spike protein, wherein the amino acid sequence of the variant comprises a span of at least 15 contiguous amino acids of amino acids 33-1230 of any of SEQ ID NOs: 5248-5656, wherein the span comprises at least one variation from the corresponding span of the wild-type SARS-CoV-2 spike protein.

[0167] In some embodiments, the present disclosure pertains to: A non-naturally occurring variant of the SARS-CoV-2 spike ectodomain protein, wherein the amino acid sequence of the variant is any of the amino acid sequences set forth in SEQ ID NOs: 5248-5656.

[0168] In some embodiments, the present disclosure pertains to: A non-naturally occurring variant of the SARS-CoV-2 spike protein, wherein the amino acid sequence of the variant has a substitution, insertion or deletion (e.g., a variation from the wild-type SARS-CoV-2 spike protein) at one or more of: amino acids at positions 41, 115, 226, 282, 319, 330, 331, 332, 338, 341, 348, 349, 351, 352, 353, 357, 358, 359, 360, 362, 363, 364, 365, 366, 367, 369, 370, 371, 372, 373, 375, 376, 385, 388, 389, 390, 393, 399, 401, 407, 408, 409, 410, 417, 418, 419, 422, 424, 438, 439, 440, 443, 445, 461, 462, 464, 465, 466, 467, 469, 470, 471, 472, 477, 478, 479, 480, 481, 482, 488,491, 496, 512, 514, 518, 519, 520, 522, 528, 546, 558, 569, 588, 591, 697, 701, 702, 704, 705, 711, 787, 869, 890, 895, 899, 904, 963, 964, 968, 969, 978, 979, 984, 985, 988, 1030, 1040, 1041, 1045, 1047, 1072, 1144, and/or 1145 and a deletion of amino acids positions at 1 to 13, and a deletion of amino acids at positions 1212 to 1273, relative to the wild-type spike protein amino acid sequence (SEQ ID NO: 2596).

[0169] In some embodiments, the present disclosure pertains to: A non-naturally occurring variant of the SARS-CoV-2 spike protein, wherein the amino acid sequence of the variant has a substitution (e.g., a variation from the wild-type SARS-CoV-2 spike protein) at one or more of: amino acids at positions 41, 115, 226, 282, 319, 330, 331, 332, 338, 341, 348, 349, 351, 352, 353, 357, 358, 359, 360, 362, 363, 364, 365, 366, 367, 369, 370, 371, 372, 373, 375, 376, 385, 388, 389, 390, 393, 399, 401, 407, 408, 409, 410, 417, 418, 419, 422, 424, 438, 439, 440, 443, 445, 461, 462, 464, 465, 466, 467, 469, 470, 471, 472, 477, 478, 479, 480, 481, 482, 488, 491, 496, 512, 514, 518, 519, 520, 522, 528, 546, 558, 569, 588, 591, 697, 701, 702, 704, 705, 711, 787, 869, 890, 895, 899, 904, 963, 964, 968, 969, 978, 979, 984, 985, 988, 1030, 1040, 1041, 1045, 1047, 1072, 1144, and/or 1145 and a deletion of amino acids positions at 1 to 13, and a deletion of amino acids at positions 1212 to 1273, relative to the wild-type spike protein amino acid sequence (SEQ ID NO: 2596).

[0170] In some embodiments, the present disclosure pertains to: A non-naturally occurring variant of the SARS-CoV-2 spike protein, wherein the amino acid sequence of the variant has a substitution, insertion or deletion (e.g., a variation from the wild-type SARS-CoV-2 spike protein) at two or more of: amino acids at positions 41, 115, 226, 282, 319, 330, 331, 332, 338, 341, 348, 349, 351, 352, 353, 357, 358, 359, 360, 362, 363, 364, 365, 366, 367, 369, 370, 371, 372, 373, 375, 376, 385, 388, 389, 390, 393, 399,401, 407, 408, 409, 410, 417, 418, 419, 422, 424, 438, 439, 440, 443, 445, 461, 462, 464, 465, 466, 467, 469, 470, 471, 472, 477, 478, 479, 480, 481, 482, 488, 491,496, 512, 514, 518, 519, 520, 522, 528, 546, 558, 569, 588, 591, 697, 701, 702, 704, 705, 711, 787, 869, 890, 895, 899, 904, 963, 964, 968, 969, 978, 979, 984, 985, 988, 1030, 1040, 1041, 1045, 1047, 1072, 1144, and/or 1145 and a deletion of amino acids positions at 1 to 13, and a deletion of amino acids at positions 1212 to 1273, relative to the wild-type spike protein amino acid sequence (SEQ ID NO: 2596).

[0171] In some embodiments, the present disclosure pertains to: A non-naturally occurring variant of the SARS-CoV-2 spike protein, wherein the amino acid sequence of the variant has a substitution (e.g., a variation from the wild-type SARS-CoV-2 spike protein) at two or more of: amino acids at positions 41, 115, 226, 282, 319, 330, 331, 332, 338, 341, 348, 349, 351, 352, 353, 357, 358, 359, 360, 362, 363, 364, 365, 366, 367, 369, 370, 371, 372, 373, 375, 376, 385, 388, 389, 390, 393, 399,401, 407, 408, 409, 410, 417, 418, 419, 422, 424, 438, 439, 440, 443, 445, 461, 462, 464, 465, 466, 467, 469, 470, 471, 472, 477, 478, 479,480, 481, 482, 488, 491, 496, 512, 514, 518, 519, 520, 522, 528, 546, 558, 569, 588, 591, 697, 701, 702, 704, 705, 711, 787, 869, 890, 895, 899, 904, 963, 964, 968, 969, 978, 979, 984, 985, 988, 1030, 1040, 1041, 1045, 1047, 1072, 1144, and/or 1145 and a deletion of amino acids positions at 1 to 13, and a deletion of amino acids at positions 1212 to 1273, relative to the wild-type spike protein amino acid sequence (SEQ ID NO: 2596).

[0172] In some embodiments, the present disclosure pertains to: A non-naturally occurring variant of the SARS-CoV-2 spike protein, wherein the amino acid sequence of the variant has a substitution, insertion or deletion (e.g., a variation from the wild-type SARS-CoV-2 spike protein) at three or more of: amino acids at positions 41, 115, 226, 282, 319, 330, 331, 332, 338, 341, 348, 349, 351, 352, 353, 357, 358, 359, 360, 362, 363, 364, 365, 366, 367, 369, 370, 371, 372, 373, 375, 376, 385, 388, 389, 390, 393, 399, 401, 407, 408, 409, 410, 417, 418, 419, 422, 424, 438, 439, 440, 443, 445, 461, 462, 464, 465, 466, 467, 469, 470, 471, 472, 477, 478, 479, 480, 481, 482, 488, 491, 496, 512, 514, 518, 519, 520, 522, 528, 546, 558, 569, 588, 591, 697, 701, 702, 704, 705, 711, 787, 869, 890, 895, 899, 904, 963, 964, 968, 969, 978, 979, 984, 985, 988, 1030, 1040, 1041, 1045, 1047, 1072, 1144, and/or 1145 and a deletion of amino acids positions at 1 to 13, and a deletion of amino acids at positions 1212 to 1273, relative to the wild-type spike protein amino acid sequence (SEQ ID NO: 2596).

[0173] In some embodiments, the present disclosure pertains to: A non-naturally occurring variant of the SARS-CoV-2 spike protein, wherein the amino acid sequence of the variant has a substitution (e.g., a variation from the wild-type SARS-CoV-2 spike protein) at three or more of: amino acids at positions 41, 115, 226, 282, 319, 330, 331, 332, 338, 341, 348, 349, 351, 352, 353, 357, 358, 359, 360, 362, 363, 364, 365, 366, 367, 369, 370, 371, 372, 373, 375, 376, 385, 388, 389, 390, 393, 399, 401, 407, 408, 409, 410, 417, 418, 419, 422, 424, 438, 439, 440, 443, 445, 461, 462, 464, 465, 466, 467, 469, 470, 471, 472, 477, 478, 479, 480, 481, 482, 488, 491, 496, 512, 514, 518, 519, 520, 522, 528, 546, 558, 569, 588, 591, 697, 701, 702, 704, 705, 711, 787, 869, 890, 895, 899, 904, 963, 964, 968, 969, 978, 979, 984, 985, 988, 1030, 1040, 1041, 1045, 1047, 1072, 1144, and/or 1145 and a deletion of amino acids positions at 1 to 13, and a deletion of amino acids at positions 1212 to 1273, relative to the wild-type spike protein amino acid sequence (SEQ ID NO: 2596).

[0174] An isolated recombinant nucleic acid encoding a non-naturally occurring variant of the SARS-CoV-2 spike protein, wherein the nucleic acid has a sequence set forth in SEQ ID NOs. 4839-5247, or the complementary sequence thereof.

[0175] In some embodiments, the present disclosure pertains to: A host cell comprising an isolated recombinant nucleic acid encoding a non-naturally occurring variant of the SARS-CoV-2 spike protein, wherein the nucleic acid has a sequence set forth in SEQ ID NOs. 4839-5247, or the complementary sequence thereof.

### Amino Acid Substitution in Variants of SARS-CoV-2 Spike Protein

[0176] In some embodiments, the present disclosure pertains to: A non-naturally occurring variant of the SARS-CoV-2 spike protein, wherein the amino acid sequence of the variant comprises at least one, at least two, at least three, at least four, at least five, at least six, at least seven, at least eight, at least nine, at least ten, at least eleven, at least twelve, at least thirteen, at least fourteen, at least fifteen, at least sixteen, at least seventeen, at least eighteen, at least nineteen or at least twenty of the following mutations V36I, S46E, S46K, S46N, S46Q, V47W, H49V, S501, S50L, T63K, T63L, W64Q, W64R, I68A, I68C, I68D, I68E, I68G, I68H, I68K, I68L, I68M, I68N, I68Q, I68R, I68S, I68W, I68Y, V70G, S71C, S71E, S71K, S71Q, S71R, N81F, N81V, N81Y, L84V, F92S, F92V, S94A, S94M, S94N, T951, T95V, K971, S98D, I101F, T108A, T108I, T108N, T108V, S112G, Q115D, Q115E, A123E, A123N, N125F, N125K, N125M, N125Q, N125Y, K129I, K129V, E132F, E132R, E132Y, C136F, C136H, C136M, C136S, C136T, C136V, C136Y, D138R, F140H, H146E, H146F, H146L, H146Q, M153P, S155E, S155K, V159K, S161D, T167K, V171H, V171Y, S172Q, S172V, S172W, M177G, M177K, M177S, M177T, D178Q, G184D, F186W, K187H, N188L, N188W, F192Y, K202Y, S205M, K206R, H207P, P209E, V213W, V213Y, S221L, A222P, P225C, L226A, L226E, L226H, L226K, L226Q, L226R, L226T, D228I, T236I, R237I, R237Y, Q239A, Q239E, Q239L, Q239S, T240F, T240P, T240Y, L241F, L241I, L241V, L241Y, H245G, H245S, L249K, L249N, L249Q, G252E, G252I, G252R, G252T, G252V, G257L, W258D, W258E, A260E, A260M, A262I, A264Q, T284F, T284W, A292N, A292S, A292T, A292Y, E298K, T299I, T302L, S316T, Q321E, E324C, E324F, E324I, E324T, E324V, S325V, F329Y, L335A, L335C, L335E, L335F, L335H, L335K, L335N, L335P, L335Q, L335R, L335S, L335T, L335Y, F338L, G339D, G339W, A344E, T345P, V350S, N354I, N354R, N354V, K356R, V367E, L368W, S375A, S375T, F377I, K378Q, C379W, T393V, S399D, S399E, S399I, S399L, S399Q, S399R, S399V, K417A, K417E, K417H, K417I, K417N, K417P, K417T, K417V, A419H, D420L, K424V, C432I, N439S, S443A, V445P, S459D, S459L, S459M, N460H, L461I, L461T, F464V, F464W, D467F, D467Y, T470E, T470I, T470K, T470R, T470V, I472A, I472C, I472D, I472E, I472F, I472H, I472K, I472M, I472N, I472Q, I472W, I472Y, A475S, S477G, S477K, S477L, S477N, C480A, C480S, C480T, C480Y, G482E, G482M, G482Q, E484P, N487L, N487P, C488A, C488Q, Y489D, Y489H, Y489K, Y489N, Y489Q, F490C, F490N, F490P, F490T, G496T, G496V, N501F, N501Y, V503A, V503D, V503E, V503K, V503P, V503R, V503T, G504D, G504E, G504N, G504Q, G504R, G504T, Y505D, Y505E, Y505H, Y505K, Y505N, Y505Q, Y505R, S514E, S514I, S514L, L517C, L517D, L517E, L517N, L517P, L517R, L517T, L518E, L518H, L518K, L518Q, L518T, H519D, H519F, H519L, A522H, G526P, K528R, S530T, V534R, V534T, K537E, L546E, V55I F, K557R, G566A, G566L, G566M, G566Q, G566S, G566T, R567L, D568K, D568S, D568T, D568W, 1569D, 1569P, D571G, T573L, D574R, L582P, L585I, T588I, T588V, F592A, F592C, F592D, F592E, F592H, F592K, F592M, F592N, F592Q, F592R, F592S, F592T, F592Y, V595K, S596F, S596L, S596Y, G601A, G601D, G601N, G601Q, G601S, N603R, V608F, P621Q, V622A, V622C, V622D, V622E, V622K, V622N, V622S, V622T, V622W, A623Q, I624Q, H625F, D627Q, D627R, T630R, V635A, V635D, V635E, V635K, V635M, V635N, V635Q, V635T, Y636E, S637A, S637N, V642Y, I651V, A653F, A653I, A653V, H655F, H655P, H655Y, 1666V, A668N, S673T, T678R, R682S, R683G, R685G, F32G, F32K, F32S, F32T, F32V, T33K, T33R, K41D, K41E, K41M, V421, S46D, S46N, V471, V47T, S50D, S50G, S50L, S50M, S50N, I68L, I68W, S71K, K77V, R78A, R78D, R78E, R78N, R78Q, V831, L84I, N87G, N87K, N87R, V90I, S94A, S94N, S94T, T951, I100V, I101V, T108S, S112G, S112N, K113T, T114S, K129R, E132N, E132Y, Q134N, F135L, N137A, N137D, N137E, N137K, N137Q, N137Y, D138N, F140M, I141F, G142A, G142S, G142T, G142V, M153R, S155A, S155D, S155E, S155F, S155I, S155K, S155L, S155N, S155Q, S155R, S155T, S155V, S155Y, F157W, V159W, V171A, V171K, V171N, V171S, V171T, S172E, S172H, S172K, S172P, S172Q, Q173D, Q173K, Q173R, P174A, P174D, P174S, F175L, F175N, L176A, L176D, L176E, L176H, L176K, L176M, L176N, L176P, L176Q, L176R, L176S, L176T, M177F, M177I, M177L, M177P, M177T, M177Y, L179T, L179V, E180A, E180D, E180G, E180N, E180S, G181E, G181P, K187H, N188D, N188H, N188Q, N188T, N188W, K202Y, K206G, K206T, H207F, H207W, H207Y, T208E, T208Q, A222P, A222V, E224K, E224P, E224Q, E224R, L226D, L226I, L226K, L226N, L226S, L226T, V227A, V227F, V227L, V227M, V227T, V227W, D228E, D228K, D228N, D228S, D228T, D228V, R237H, L241F, L241I, A243S, H245S, L249R, T259D, T259E, T259G, T259N, T259Q, T259R, T259S, G261E, G261F, G261S, A262S, Y266F, Y266W, Q271E, Q271K, R273T, L276M, Y279F, N280D, T284Y, A292D, A292G, A292N, A292S, A292T, L293F, L293H, L293Q, L293Y, S297A, T299A, T299L, T299V, T302K, T302R, T302S, T302Y, E324Y, S325E, L335A, L335C, L335E, G339D, T345P, A352N, N354E, N354R, K356H, K356Q, K356Y, K378Q, S399I, S399V, D405S, K417E, K417P, K417T, K444T, L461M, I472A, I472Q, S477C, S514K, K529D, S530P, K537E, K537Q, K537R, K537V, N540D, F541Y, L546R, T547K, E554D, E554P, E554S, N556S, 1569A, 1569L, I569T, 1569V, A570S, T572A, T572C, T572F, T572I, T572L, T572M, T572N, T572Q, T572R, T572S, T572V, T573L, A575S, Q580T, L582G, L582N, L582S, D586C, T588Q, T588R, T588S, T588V, 1598V, N606S, Q607A, Q607E, E619D, E619H, V622A, V622D, V622E, V622G, V622H, V622K, V622L, V622N, V622P, V622Q, V622R, V622S, V622T, V622Y, A623D, A623G, A623S, A623T, A626S, D627N, T630R, R646Q, H655Y, A668N, R682S, R683G, A684S, R685G, A688S, Q690D, Q690E, Q690K, Q690N, 1693V, S704P, S704T, A706P, S711E, S711N, A713S, T719A, T719K, T719L, T719M, T719N, T719Q, T719S, T719V, T719Y, T723Q, 1726F, 1726V, 1726Y, L727I, L727M, T732A, T732D, T732P, T732Q, T734V, T739A, T739E, T739S, T747E, T747P, T747S, E748R, S750L, L754K, L754S, T761D, T761S, N764E, T768A, T768E, T768H, T768N, T768Q, T768R, T768S, V772A, V772D, V772E, V772I, V772K, V772L, V772M, V772N, V772Q, V772R, V772S, Q774E, T778L, Q779L, E780N, 1788M, F817A, V826A, V826D, V826E, V826I, V826L, V826T, V826W, A831L, 1834V, G838K, D839E, D839K, L841M, L841T, 1844Q, 1844V, A845D, A845N, A845S, F855Y, L858I, T859M, Q872A, Q872M, S875A, A876S, L878I, L878V, A879S, 1882A, S884A, S884G, S884T, Q895V, T912Q, K921Q, L922I, L922K, L922M, L922Q, S929A, S929D, S929E, S929K, S929N, S929Q, S929R, S929T, G932K, G932S, K933A, K933H, K933N, K933Q, D936E, D936K, S937G, S939R, S939T, S940T, A942S, S943N, S943T, G946S, N953E, N953K, N953S, N955Q, N960A, N960D, N960E, N960H, N960I, N960K, N960M, N960Q, N960S, N960T, T961E, L977I, L981Y, S982N, K986P, K986Q, K986R, V987P, E990Q, V991A, 1993V, A1016T, N1023Q, T1027E, L1034K, K1038N, V1040Y, D1041G, K1045N, S1055A, V10601, A1070T, E1072F, A1080G, D1084E, H1088F, H1088W, H1088Y, H1101A, H101E, H1101K, H1101M, H1101Q, H1101R, HI 101S, H1101Y, F1103Y, V1104I, Q1113R, I1114L, I1114N, I1114P, I1114S, I1114T, I1114V, N1125S, I1130F, I1130Y V11331 Q115L, Q115V, Y200F, Y2001, Y200V, N370R, A372P, S375N, S375R, S375V, S375W, T376A, T376C, T376E, T376L, T376M, T376Q, T376S, T415H, T415P, T415S, T415W, T415Y K41N, Q15A, Q115E, Q115M, Q115P, Q115T, L226A, L226E, L226Q, L226W, N282T, N282Y, R319Q, P330T, N331A, N331D, N331P, N331R, N331V, 1332V, F3381, F338L, F338M, F338Y, V3411, V341Y, A348C, A348G, A348P, A348S, A348V, S349P, Y35I A, Y35I S, A352D, A352Q, A352S, W353F, W353P, W353Y, R357V, 1358V, S359T, N360G, N360K, V3621, A363F, D364N, Y365F, S366R, V367A, V367E, V367G, V3671, V367K, V367L, V367N, V367Q, V367R, V367S, V367T, Y369F, N370A, N370D, N370E, N370K, N370L, N370Q, N370S, N370T, S371T, A372C, A372D, A372E, A372G, A372K, A372P, A372Q, A372S, A372T, S373T, S375A, S375C, S375D, S375E, S375K, S375M, S375Q, S375T, S375V, T376S, T385S, N388D, N388T, D389H, L390Q, T393P, T393V, S399K, S399L, S399N, S399Q, S399R, S399T, V401L, V407I, V407L, R408K, Q409E, 1410V, K417A, K417C, K417D, K417H, K417I, K417N, K417Q, K417R, K417S, K417V, 1418V, A419H, A419R, N422T, N422V, K424L, K424N, K424Q, K424R, K424T, K424V, S438A, N439A, N439C, N439D, N439E, N439G, N439H, N439I, N439K, N439Q, N439R, N439S, N439V, N440D, N440E, N440G, N440K, N440L, N440Q, N440S, N440T, S443A, S443C, V445A, V445C, V445D, V445E, V445I, V445K, V445L, V445M, V445N, V445P, V445Q, V445R, L461F, L461R, K462A, K462C, K462D, K462E, K462G, K462N, K462Q, K462R, K462S, F464V, F464Y, E465A, E465G, E465K, E465R, E465S, R466D, R466F, R4661, R466K, R466L, R466N, R466Q, R466S, R466V, D467F, D467N, D467Y, S469A, S469C, S469D, S469E, S469G, S469K, S469L, S469N, S469Q, S469T, T470A, T470C, T470D, T470E, T470F, T470G, T470H, T470K, T470L, T470M, T470N, T470P, T470Q, T470R, T470S, T470V, T470W, T470Y, E471A, E471C, E471D, E471G, E4711, E471K, E471L, E471M, E471N, E471Q, E471R, E471S, E471T, E471V, I472C, I472D, I472E, I472F, I472G, I472H, I472K, I472M, I472N, I472R, I472S, I472T, I472V, I472W, I472Y, S477A, S477G, S477K, T478S, P479V, C480A, C480G, C480Q, C480S, C480T, C480Y, N481T, G482A, G482S, C488A, C488E, C488H, C488Q, C488R, C488S, C488W, C488Y, P491A, G496D, G496T, G496V, V5121, S514A, S514E, S514F, S514I, S514L, S514N, S514Q, S514T, S514V, L518A, L518D, L5181, L518K, L518N, L518Q, L518R, L518S, L518T, L518V, H519A, H519C, H519D, H519E, H519F, H519G, H519K, H519L, H519M, H519N, H519P, H519Q, H519R, H519S, H519W, H519Y, A520Y, A522C, A522H, K528R, L546E, L546H, L546V, K558Q, 1569M, T588E, T5881, T588K, S591P, M697A, M697C, M697E, M697Q, M697R, M697S, M697V, A701D, E702T, E702V, S704C, S704E, S7041, S704K, S704M, S704N, S704Q, S704R, S704V, V705I, S711A, S711H, Q787H, M869L, M869Q, A890F, A890R, A890Y, Q8951, Q895T, A899D, Y904W, V963I, K964A, S968Y, N969K, N969R, N969S, N969T, N978W, D979A, D979E, D979N, D979S, L984A, L984I, L984S, L984V, D985A, D985E, D985N, D985P, D985S, E988A, E988D, E988Q, E988S, S1030Q, V1040Q, D1041H, K1045E, K1045P, K1045Q, K1045R, K1045T, Y1047F, E1072A, E1072C, E1072D, E1072G, E1072H, E1072M, E1072N, E1072Q, E1072R, E1072S, E1072T, E1072W, E1072Y, E1144R and/or L1145R relative to the wild-type spike protein amino acid sequence (SEQ ID NO: 2596).

### Variants of SARS-CoV-2 Spike Protein RBD (Receptor Binding Domain)

[0177] In some embodiments, various novel variants of SARS-CoV-2 spike protein receptor binding domain (RBD) are described herein. In some embodiments, various novel variants of SARS-CoV-2 spike protein receptor binding domain (RBD) are described herein and annotated in Table 7. In some embodiments, a variant of SARS-CoV-2 spike protein receptor binding domain (RBD) comprises at least one substitution, deletion and/or insertion of any variant of SARS-CoV-2 spike protein receptor binding domain (RBD) described herein, e.g., in SEQ ID NOs: 2494-2592.

TABLE 7
Annotation of spike protein RBD amino acid sequences provided
in the sequence listing SEQ ID NOs: 2494-2592.

| RBD aa ORF | start | end |
|---|---|---|
| Molecule/17747 [dsDNA] (Start codon) | 1 | 1 |
| Molecule/4155324 [dsDNA] (secretion signal \| | 2 | 32 |
| mu-phosphatase) | | |
| RBD variant | 33 | 236 |
| Molecule/4155312 [dsDNA] (Tag \| 8xHis \| (SEQ | 237 | 244 |
| ID NO: 2598) H. sapiens recode 1) | | |

[0178] In some embodiments, the present disclosure pertains to: A non-naturally occurring variant of the SARS-CoV-2 spike protein RBD, wherein the amino acid sequence of the variant comprises amino acids 33-236 of any of SEQ ID NOs: 2494 to 2592.

[0179] In some embodiments, the present disclosure pertains to: A non-naturally occurring variant of the SARS-CoV-2 spike protein RBD, wherein the amino acid sequence of the variant comprises any of SEQ ID NOs: 2494 to 2592.

[0180] In some embodiments, the present disclosure pertains to: A non-naturally occurring variant of the SARS-CoV-2 spike protein RBD, wherein the amino acid sequence of the variant is amino acids 33-236 of any of SEQ ID NOs: 2494 to 2592.

[0181] In some embodiments, the present disclosure pertains to: A non-naturally occurring variant of the SARS-CoV-2 spike protein RBD, wherein the amino acid sequence of the variant is any of SEQ ID NOs: 2494 to 2592.

[0182] In some embodiments, the present disclosure pertains to: A non-naturally occurring variant of the SARS-CoV-2 spike protein RBD, wherein the amino acid sequence of the variant comprises amino acids 33-236 of any of SEQ ID NOs: 2494 to 2592, and wherein the span comprises at least one variation from the corresponding span of the wild-type SARS-CoV-2 spike protein RBD protein.

[0183] In some embodiments, the present disclosure pertains to: A non-naturally occurring variant of the SARS-CoV-2 spike protein RBD, wherein the amino acid sequence of the variant has a substitution, insertion or deletion (e.g., a variation from the wild-type SARS-CoV-2 spike protein RBD) at one or more of: amino acids at positions 335, 339, 340, 356, 357, 362, 366, 368, 372, 393, 394, 399, 402, 403, 404, 405, 406, 410, 414, 417, 438, 439, 450, 477, 478, 483, 484, 486, 489, 490, 501, 502, or 504, and a deletion of amino acids at positions 1 to 327 and a deletion of amino acids at positions 532 to 1273, relative to the wild-type spike protein amino acid sequence (SEQ ID NO: 2596).

[0184] In some embodiments, the present disclosure pertains to: A non-naturally occurring variant of the SARS-CoV-2 spike protein RBD (receptor binding domain), wherein the amino acid sequence of the variant has a substitution (e.g., a variation from the wild-type SARS-CoV-2 spike protein RBD) at one or more of: amino acids at positions 335, 339, 340, 356, 357, 362, 366, 368, 372, 393, 394, 399, 402, 403, 404, 405, 406, 410, 414, 417, 438, 439, 450, 477, 478, 483, 484, 486, 489, 490, 501, 502, or 504, and a deletion of amino acids at positions 1 to 327 and a deletion of amino acids at positions 532 to 1273, relative to the wild-type spike protein amino acid sequence (SEQ ID NO: 2596).

[0185] In some embodiments, the present disclosure pertains to: A non-naturally occurring variant of the SARS-CoV-2 spike protein RBD (receptor binding domain), wherein the amino acid sequence of the variant has a substitution, insertion or deletion (e.g., a variation from the wild-type SARS-CoV-2 spike protein RBD) at two or more of: amino acids at positions 335, 339, 340, 356, 357, 362, 366, 368, 372, 393, 394, 399, 402, 403, 404, 405, 406, 410, 414,417, 438, 439, 450, 477, 478, 483, 484, 486, 489, 490, 501, 502, or 504, and a deletion of amino acids at positions 1 to 327 and a deletion of amino acids at positions 532 to 1273, relative to the wild-type spike protein amino acid sequence (SEQ ID NO: 2596).

[0186] In some embodiments, the present disclosure pertains to: A non-naturally occurring variant of the SARS-CoV-2 spike protein RBD, wherein the amino acid sequence of the variant has a substitution (e.g., a variation from the wild-type SARS-CoV-2 spike protein RBD) at two or more of: amino acids at positions 335, 339, 340, 356, 357, 362, 366, 368, 372, 393, 394, 399, 402, 403, 404, 405, 406,410, 414, 417, 438, 439, 450, 477, 478, 483, 484, 486, 489, 490, 501, 502, or 504, and a deletion of amino acids at positions 1 to 327 and a deletion of amino acids at positions 532 to 1273, relative to the wild-type spike protein amino acid sequence (SEQ ID NO: 2596).

[0187] In some embodiments, the present disclosure pertains to: A non-naturally occurring variant of the SARS-CoV-2 spike protein RBD (receptor binding domain), wherein the amino acid sequence of the variant has a substitution, insertion or deletion (e.g., a variation from the wild-type SARS-CoV-2 spike protein RBD) at three or more of: amino acids at positions 335, 339, 340, 356, 357, 362, 366, 368, 372, 393, 394, 399, 402, 403, 404, 405, 406, 410, 414, 417, 438, 439, 450, 477, 478, 483, 484, 486, 489,490, 501, 502, or 504, and a deletion of amino acids at positions 1 to 327 and a deletion of amino acids at positions 532 to 1273, relative to the wild-type spike protein amino acid sequence (SEQ ID NO: 2596).

[0188] In some embodiments, the present disclosure pertains to: A non-naturally occurring variant of the SARS-CoV-2 spike protein RBD (receptor binding domain), wherein the amino acid sequence of the variant has a substitution (e.g., a variation from the wild-type SARS-CoV-2 spike protein RBD) at three or more of: amino acids at positions 335, 339, 340, 356, 357, 362, 366, 368, 372, 393, 394, 399, 402, 403, 404, 405, 406, 410, 414, 417, 438, 439, 450, 477, 478, 483, 484, 486, 489, 490, 501, 502, or 504, and a deletion of amino acids at positions 1 to 327 and a deletion of amino acids at positions 532 to 1273, relative to the wild-type spike protein amino acid sequence (SEQ ID NO: 2596).

[0189] In some embodiments, the present disclosure pertains to: A non-naturally occurring variant of the SARS-CoV-2 spike protein RBD (receptor binding domain), wherein the variant is described in Table 7 herein.

[0190] An isolated recombinant nucleic acid encoding a non-naturally occurring variant of the SARS-CoV-2 spike protein RBD (receptor binding domain), wherein the nucleic acid has a sequence comprising any of SEQ ID NOs: 2395 to 2493, or the complementary sequence thereof.

[0191] In some embodiments, the present disclosure pertains to: A host cell comprising an isolated recombinant nucleic acid encoding a non-naturally occurring variant of the SARS-CoV-2 spike protein RBD (receptor binding domain), wherein the nucleic acid has a sequence comprising any of SEQ ID NOs: 2395 to 2493, or the complementary sequence thereof.

### Additional Variants of SARS-CoV-2 Spike Protein RBD (Receptor Binding Domain)

[0192] In some embodiments, various novel variants of SARS-CoV-2 spike protein receptor binding domain (RBD) are described herein. In some embodiments, various novel variants of SARS-CoV-2 spike protein receptor binding domain (RBD) are described herein and annotated in SEQ ID NOs: 5957-6256.

[0193] In some embodiments, the present disclosure pertains to: A non-naturally occurring variant of the SARS-CoV-2 spike protein RBD (receptor binding domain), wherein the variant comprises an amino acid sequence listed in SEQ ID NOs: 5957-6256.

[0194] In some embodiments, the present disclosure pertains to: A non-naturally occurring variant of the SARS-CoV-2 spike protein RBD (receptor binding domain), wherein the variant is set forth in SEQ ID NOs: 5957-6256.

[0195] In some embodiments, the present disclosure pertains to: A non-naturally occurring variant of the SARS-CoV-2 spike protein RBD, wherein the amino acid sequence of the variant has a substitution, insertion or deletion (e.g., a variation from the wild-type SARS-CoV-2 spike protein RBD) at one or more of: amino acids at positions 330, 331, 332, 338, 341, 348, 349, 351, 352, 353, 358, 362, 363, 364, 365, 366, 367, 370, 371, 373, 376, 384, 391, 392, 393, 394, 395, 399, 401, 406, 407, 408, 409, 418, 419, 422, 424, 434, 439, 440, 443, 445, 453, 456, 461, 462, 464, 465, 466, 467, 469, 470, 471, 472, 479, 480, 481, 482, 488, 491, 496, 504, 508, 512, 514, 518, 519 and/or 520 and a deletion of amino acids at positions 1 to 327 and a deletion of amino acids at positions 532-1273, relative to the wild-type spike protein amino acid sequence (SEQ ID NO: 2596).

[0196] In some embodiments, the present disclosure pertains to: A non-naturally occurring variant of the SARS-CoV-2 spike protein RBD (receptor binding domain), wherein the amino acid sequence of the variant has a substitution (e.g., a variation from the wild-type SARS-CoV-2 spike protein RBD) at one or more of: amino acids at positions 330, 331, 332, 338, 341, 348, 349, 351, 352, 353, 358, 362, 363, 364, 365, 366, 367, 370, 371, 373, 376, 384, 391, 392, 393, 394, 395, 399, 401, 406, 407,408, 409, 418, 419, 422, 424, 434, 439, 440, 443, 445, 453, 456, 461, 462, 464, 465, 466, 467, 469, 470, 471, 472, 479, 480, 481, 482, 488, 491, 496, 504, 508, 512, 514, 518, 519 and/or 520 and a deletion of amino acids at positions 1 to 327 and a deletion of amino acids at positions 532-1273, relative to the wild-type spike protein amino acid sequence (SEQ ID NO: 2596).

[0197] In some embodiments, the present disclosure pertains to: A non-naturally occurring variant of the SARS-CoV-2 spike protein RBD (receptor binding domain), wherein the amino acid sequence of the variant has a substitution, insertion or deletion (e.g., a variation from the wild-type SARS-CoV-2 spike protein RBD) at two or more of: amino acids at positions 330, 331, 332, 338, 341, 348, 349, 351, 352, 353, 358, 362, 363, 364, 365, 366, 367, 370, 371, 373, 376, 384, 391, 392, 393, 394, 395, 399, 401, 406, 407, 408, 409, 418, 419, 422, 424, 434, 439, 440, 443, 445, 453, 456, 461, 462, 464, 465, 466, 467, 469, 470, 471, 472, 479, 480, 481, 482, 488, 491, 496, 504, 508, 512, 514, 518, 519 and/or 520 and a deletion of amino acids at positions 1 to 327 and a deletion of amino acids at positions 532-1273, relative to the wild-type spike protein amino acid sequence (SEQ ID NO: 25%).

[0198] In some embodiments, the present disclosure pertains to: A non-naturally occurring variant of the SARS-CoV-2 spike protein RBD, wherein the amino acid sequence of the variant has a substitution (e.g., a variation from the wild-type SARS-CoV-2 spike protein RBD) at two or more of: amino acids at positions 330, 331, 332, 338, 341, 348, 349, 351, 352, 353, 358, 362, 363, 364, 365, 366, 367, 370, 371, 373, 376, 384, 391, 392, 393, 394, 395, 399, 401, 406, 407, 408, 409, 418, 419, 422, 424, 434, 439, 440, 443, 445, 453, 456, 461, 462, 464, 465, 466, 467, 469, 470, 471, 472, 479, 480, 481, 482, 488, 491, 496, 504, 508, 512, 514, 518, 519 and/or 520 and a deletion of amino acids at positions 1 to 327 and a deletion of amino acids at positions 532-1273, relative to the wild-type spike protein amino acid sequence (SEQ ID NO: 2596).

[0199] In some embodiments, the present disclosure pertains to: A non-naturally occurring variant of the SARS-CoV-2 spike protein RBD (receptor binding domain), wherein the amino acid sequence of the variant has a substitution, insertion or deletion (e.g., a variation from the wild-type SARS-CoV-2 spike protein RBD) at three or more of: amino acids at positions 330, 331, 332, 338, 341, 348, 349, 351, 352, 353, 358, 362, 363, 364, 365, 366, 367, 370, 371, 373, 376, 384, 391, 392, 393, 394, 395, 399, 401, 406, 407, 408, 409, 418, 419, 422, 424, 434, 439, 440, 443, 445, 453, 456, 461, 462, 464, 465, 466, 467, 469, 470, 471, 472, 479, 480, 481, 482, 488, 491, 496, 504, 508, 512, 514, 518, 519 and/or 520 and a deletion of amino acids at positions 1 to 327 and a deletion of amino acids at positions 532-1273, relative to the wild-type spike protein amino acid sequence (SEQ ID NO: 2596).

[0200] In some embodiments, the present disclosure pertains to: A non-naturally occurring variant of the SARS-CoV-2 spike protein RBD (receptor binding domain), wherein the amino acid sequence of the variant has a substitution (e.g., a variation from the wild-type SARS-CoV-2 spike protein RBD) at three or more of: amino acids at positions 330, 331, 332, 338, 341, 348, 349, 351, 352, 353, 358, 362, 363, 364, 365, 366, 367, 370, 371, 373, 376, 384, 391, 392, 393, 394, 395, 399, 401, 406, 407,408, 409, 418, 419, 422, 424, 434, 439, 440, 443, 445, 453, 456, 461, 462, 464, 465, 466, 467, 469, 470, 471, 472, 479, 480, 481, 482, 488, 491, 496, 504, 508, 512, 514, 518, 519 and/or 520 and a deletion of amino acids at positions 1 to 327 and a deletion of amino acids at positions 532-1273, relative to the wild-type spike protein amino acid sequence (SEQ ID NO: 2596).

[0201] An isolated recombinant nucleic acid encoding a non-naturally occurring variant of the SARS-CoV-2 spike protein RBD (receptor binding domain), wherein the nucleic acid has a sequence comprising of any of SEQ ID NOs: 5657-5956, or the complementary sequence thereof.

[0202] In some embodiments, the present disclosure pertains to: A host cell comprising an isolated recombinant nucleic acid encoding a non-naturally occurring variant of the SARS-CoV-2 spike protein RBD (receptor binding domain), wherein the nucleic acid has a sequence comprising of any of SEQ ID NOs: 5657-5956, or the complementary sequence thereof.

### Amino Acid Substitutions in Variants of SARS-CoV-2 Spike Protein RBD (Receptor Binding Domain)

[0203] In some embodiments, the present disclosure pertains to: A non-naturally occurring variant of the SARS-CoV-2 spike protein, wherein the amino acid sequence of the variant comprises at least one, at least two, at least three, at least four, at least five, at least six, at least seven, at least eight, at least nine, at least ten, at least eleven, at least twelve, at least thirteen, at least fourteen, at least fifteen, at least sixteen, at least seventeen, at least eighteen, at least nineteen or at least twenty of the following mutations L335R, L335V, G339D, G339H, G339N, E340K, E340R, K356L, K356T, K356V, R357K, R357V, V3621, S366T, L368F, A372C, A372D, A372F, A372G, A372H, A372N, A372Q, A372S, A372T, A372V, T393S, N394S, S399Y, 1402V, R403P, G404F, D405S, E406D, 1410V, Q414E, K417A, K417E, K417F, K417L, K417T, K417V, S438A, N439A, N439S, N450Q, N450S, S477A, S477G, S477Q, T478A, T478D, T478E, T4781, T478K, T478N, T478Q, T478S, V483A, V483Q, V483R, E484A, E484K, E484P, E484Q, E484R, E484S, E484T, E484V, E484Y, F4861, F486L, F486P, F486T, F486V, F486Y, Y489R, F490A, F490D, F490E, F490G, F490H, F490K, F490L, F490M, F490N, F490P, F490R, F490S, F490T, F490V, F490W, F490Y, N501D, N501E, N501L, G502P, G504A, G504D, G504E, P330T, N331A, N331D, N331P, N331R, N331V, 1332V, F3381, F338L, F338M, F338Y, V3411, V341Y, A348C, A348G, A348P, A348S, A348V, S349P, Y351A, Y351S, A352D, A352N, A352Q, A352S, W353F, W353P, W353Y, 1358F, 1358L, 1358M, 1358V, 1358W, 1358Y, V362K, V362Q, V362S, V362T, V362W, V362Y, A363F, A363W, D364N, Y365F, Y3651, Y365L, Y365M, Y365V, Y365W, S366R, V367A, V367E, V367G, V3671, V367K, V367L, V367N, V367Q, V367R, V367S, V367T, N370A, N370D, N370E, N370K, N370L, N370Q, N370S, N370T, S371T, S373T, T376S, P384A, P384K, P384M, C391N, F392A, F392V, F392W, T393P, T393V, N394T, V395I, S399I, S399K, S399L, S399N, S399Q, S399R, S399T, S399V, V401L, E406H, E406Q, V4071, V407L, R408K, Q409E, 1418V, A419H, A419R, N422T, N422V, K424L, K424N, K424Q, K424R, K424T, K424V, I434F, N439C, N439D, N439E, N439G, N439H, N439I, N439K, N439Q, N439R, N439V, N440D, N440E, N440G, N440K, N440L, N440Q, N440S, N440T, S443A, S443C, V445A, V445C, V445D, V445E, V4451, V445K, V445L, V445M, V445N, V445P, V445Q, V445R, Y453R, F456H, L461F, L461R, K462A, K462C, K462D, K462E, K462G, K462N, K462Q, K462R, K462S, F464V, F464Y, E465A, E465G, E465K, E465R, E465S, R466D, R466F, R4661, R466K, R466L, R466N, R466Q, R466S, R466V, D467F, D467N, D467Y, S469A, S469C, S469D, S469E, S469G, S469K, S469L, S469N, S469Q, S469T, T470A, T470C, T470D, T470E, T470F, T470G, T470H, T470K, T470L, T470M, T470N, T470P, T470Q, T470R, T470S, T470V, T470W, T470Y, E471A, E471C, E471D, E471G, E4711, E471K, E471L, E471M, E471N, E471Q, E471R, E471S, E471T, E471V, I472A, I472C, I472D, I472E, I472F, I472G, I472H, I472K, I472M, I472N, I472Q, I472R, I472S, I472T, I472V, I472W, I472Y, P479V, C480A, C480G, C480Q, C480S, C480T, C480Y, N48 IT, G482A, G482S, C488A, C488E, C488H, C488Q, C488R, C488S, C488W, C488Y, P491A, G496A, G496D, G496N, G496S, G496T, G496V, G504K, G504M, G504N, Y508H, V5121, S514A, S514E, S514F, S514I, S514K, S514L, S514N, S514Q, S514T, S514V, L518A, L518D, L5181, L518K, L518N, L518Q, L518R, L518S, L518T, L518V, H519A, H519C, H519D, H519E, H519F, H519G, H519K, H519L, H519M, H519N, H519P, H519Q, H519R, H519S, H519W, H519Y, and/or A520Y relative to the wild-type spike protein amino acid sequence (SEQ ID NO: 2596).

### Vaccine Compositions

[0204] In certain aspects, provided herein are compositions (e.g., vaccine compositions) comprising one or more (e.g., one, two, three, etc.) of the variants provided herein and/or one or more of the nucleic acids provided herein. In some embodiments, the composition comprises a nucleocapsid protein variant. In some embodiments, the composition comprises a spike protein variant. In some embodiments, the composition comprises a spike protein RBD variant. In some embodiments, the composition comprises a nucleocapsid protein variant and a spike protein variant. In some embodiments, the composition comprises a nucleocapsid protein variant and a spike protein RBD variant. In certain embodiments, the composition comprises a spike protein variant and a spike protein RBD variant. In some embodiments, the composition comprises a nucleocapsid protein variant, a spike protein variant and a spike protein RBD variant.

[0205] In certain embodiments, the compositions (e.g., vaccine compositions disclosed herein) disclosed herein further comprise and/or are administered with an adjuvant. Adjuvants suitable for use in animals include, but are not limited to, Freund's complete or incomplete adjuvants, Sigma Adjuvant System (SAS), and Ribi adjuvants. Adjuvants suitable for use in humans include, but are not limited to, MF59 (an oil-in-water emulsion adjuvant); Montanide ISA 51 or 720 (a mineral oil-based or metabolizable oil-based adjuvant): aluminum hydroxide, -phosphate, or -oxide; HAVLOGEN® (an acrylic acid polymer-based adjuvant, Intervet Inc., Millsboro, Del.); polyacrylic acids; oil-in-water or water-in-oil emulsion based on, for example a mineral oil, such as BAYOL™ or MARCOL™ (Esso Imperial Oil Limited, Canada), or a vegetable oil such as vitamin E acetate; saponins; and Onchocerca volvulus activation-associated protein-1 (Ov ASP-1) (see US 20060039921, which is incorporated by reference herein for all it discloses regarding Ov ASP-1 adjuvants). However, components with adjuvant activity are widely known and, generally, any adjuvant may be utilized.

[0206] In some embodiments, the present disclosure pertains to a vaccine comprising a nucleic acid encoding a variant disclosed herein (e.g., an mRNA encoding a variant disclosed herein). The vaccine may further comprise any one or more of: solvents, dispersion media, diluents, or other liquid vehicles, dispersion or suspension aids, surface active agents, isotonic agents, thickening or emulsifying agents, preservatives, excipients of the present invention can include, without limitation, lipidoids, liposomes, lipid nanoparticles, polymers, lipoplexes, core-shell nanoparticles, peptides, proteins, cells transfected with polynucleotide, primary construct, hyaluronidase, polymer based-self assembly nanoparticles, inorganic nanoparticles, semi-conductive and metallic nanoparticles, gels, hydrogels, molded nanoparticles, molded microparticles, NanoJackets, NanoLiposomes, or nanoparticle mimics and/or combinations thereof.

[0207] The polynucleotide (e.g., mRNA) of the invention can be formulated using one or more liposomes, lipoplexes, or lipid nanoparticles. In one embodiment, pharmaceutical compositions of polynucleotide include liposomes. Liposomes are artificially-prepared vesicles which may primarily be composed of a lipid bilayer and may be used as a delivery vehicle for the administration of nutrients and pharmaceutical formulations. Liposomes can be of different sizes such as, but not limited to, a multilamellar vesicle (MLV) which may be hundreds of nanometers in diameter and may contain a series of concentric bilayers separated by narrow aqueous compartments, a small unicellular vesicle (SUV) which may be smaller than 50 nm in diameter, and a large unilamellar vesicle (LUV) which may be between 50 and 500 nm in diameter. Liposome design may include, but is not limited to, opsonins or ligands in order to improve the attachment of liposomes to unhealthy tissue or to activate events such as, but not limited to, endocytosis. Liposomes may contain a low or a high pH in order to improve the delivery of the pharmaceutical formulations.

[0208] The formation of liposomes may depend on physicochemical characteristics such as, but not limited to, the pharmaceutical formulation entrapped and the liposomal ingredients, the nature of the medium in which the lipid vesicles are dispersed, the effective concentration of the entrapped substance and its potential toxicity, any additional processes involved during the application and/or delivery of the vesicles, the optimization size, polydispersity and the shelf-life of the vesicles for the intended application, and the batch-to-batch reproducibility and possibility of large-scale production of safe and efficient liposomal products.

[0209] In one embodiment, pharmaceutical compositions described herein may include, without limitation, liposomes such as those formed from 1,2-dioleyloxy-N,N-dimethylaminopropane (DODMA) liposomes, DiLa2 liposomes from Marina Biotech (Bothell, Wash.), 1,2-dilinoleyloxy-3-dimethylaminopropane (DLin-DMA), 2,2-dilinoleyl-4-(2-dimethylaminoethyl)-[1,3]-dioxolane (DLin-KC2-DMA), and MC3 (US20100324120; herein incorporated by reference in its entirety) and liposomes which may deliver small molecule drugs such as, but not limited to, DOXIL® from Janssen Biotech, Inc. (Horsham, Pa.). Additional mRNA vaccine formulations can be found in U.S. Pat. No. 9,675,668, hereby incorporated by reference in its entirety.

[0210] Vaccines and/or immunogenic compositions according to the various embodiments disclosed herein can be prepared and/or marketed in the form of a liquid, frozen suspension, or in a lyophilized form. Typically, vaccines and/or immunogenic compositions prepared according to the present disclosure contain a pharmaceutically acceptable carrier or diluent customarily used for such compositions. Carriers include, but are not limited to, stabilizers, preservatives, and buffers. Suitable stabilizers are, for example SPGA, Tween compositions (such as are available from A.G. Scientific, Inc., San Diego, Calif.), carbohydrates (such as sorbitol, mannitol, starch, sucrose, dextran, glutamate, or glucose), proteins (such as dried milk serum, albumin, or casein), or degradation products thereof. Examples of suitable buffers include alkali metal phosphates. Suitable preservatives include thimerosal, merthiolate, and gentamicin. Diluents include water, aqueous buffer (such as buffered saline), alcohols, and polyols (such as glycerol).

[0211] Formulations disclosed herein may additionally comprise a pharmaceutically acceptable excipient, which, as used herein, includes, but is not limited to, any and all solvents, dispersion media, diluents, or other liquid vehicles, dispersion or suspension aids, surface active agents, isotonic agents, thickening or emulsifying agents, preservatives, and the like, as suited to the particular dosage form desired. Various excipients for formulating pharmaceutical compositions and techniques for preparing the composition are known in the art (see Remington: The Science and Practice of Pharmacy, 21st Edition, A. R. Gennaro, Lippincott, Williams & Wilkins. Baltimore, Md., 2006; incorporated herein by reference in its entirety).

[0212] Further, in various formulations of the proteins and/or compositions, suitable excipients, stabilizers, and the like may be added as are known by persons of ordinary skill in the art. Formulations of the compositions described herein may be prepared by any method known or hereafter developed in the art of pharmacology. Such preparatory methods may include the step of associating the active ingredient with an excipient and/or one or more other accessory ingredients.

[0213] Relative amounts of the active ingredient, the pharmaceutically acceptable excipient, and/or any additional ingredients in a pharmaceutical composition in accordance with the present disclosure may vary, depending upon the identity, size, and/or condition of the subject being treated and further depending upon the route by which the composition is to be administered. For example, the composition may comprise between 0.1% and 99% (w/w) of the active ingredient.

### Diagnostic Test Kits

[0214] In certain aspects, provided herein are diagnostic test kits comprising one or more of the variant proteins disclosed herein. In certain embodiments, the diagnostic test kits provided herein are sensitive, specific, and/or inexpensive high throughput diagnostic test kits for the diagnosis of SARS-CoV-2 exposure. In some embodiments, the present disclosure pertains to a diagnostic test kit useful for determining if a subject has been exposed and/or is infected with SARS-CoV-2. The present disclosure also pertains to: A system or kit for the serological detection of exposure to and/or infection by SARS-CoV-2.

[0215] In some embodiments, the present disclosure pertains to a diagnostic test kit comprising a variant of SARS-CoV-2 nucleocapsid protein, spike protein and/or spike protein RBD (receptor binding domain). In some embodiments, the variant of SARS-CoV-2 nucleocapsid protein, spike protein and/or spike protein receptor binding domain (RBD) is described herein.

[0216] The present disclosure also pertains to the use of a variant of SARS-CoV-2 nucleocapsid protein, spike protein and/or spike protein RBD (receptor binding domain), which are strongly reactive with, and sensitive to an antibody to SARS-CoV-2 in a patient sample. In some embodiments, a variant of SARS-CoV-2 nucleocapsid protein, spike protein and/or spike protein receptor binding domain (RBD) can be used in any type of serological assay or platform, now known or later developed, to screen for the presence of antibody to SARS-CoV-2 and to determine if a subject has had an infection by and/or exposure to SARS-CoV-2. In some embodiments, a variant of SARS-CoV-2 nucleocapsid protein, spike protein and/or spike protein receptor binding domain (RBD) can also be used to test for and monitor humoral responses to vaccines and immunomodulatory drugs, thus, being useful for the development of treatment and preventative agents for SARS-CoV-2.

[0217] The current disclosure provides compositions, methods, devices, and kits for detecting the exposure to, and infection by, SARS-CoV-2. Specifically, the current disclosure allows for the rapid differential serological detection of exposure to, and infection by SARS-CoV-2.

[0218] The compositions, methods, devices, and kits for detection of exposure to, and infection by SARS-CoV-2 comprise a variant of SARS-CoV-2 nucleocapsid protein, spike protein and/or spike protein RBD (receptor binding domain), isolated and non-isolated, which are strongly reactive with, and specific for SARS-CoV-2, i.e., reactive and specific epitopes of antibody to SARS-CoV-2.

[0219] In some embodiments, a diagnostic test kit is a serological assay.

[0220] In some embodiments, the present disclosure pertains to: A method for the serological detection of exposure to and/or infection by SARS-CoV-2, comprising the use of a variant of SARS-CoV-2 nucleocapsid protein, a variant of the spike protein and/or a variant of the spike protein receptor binding domain (RBD) which are reactive with, and specific for SARS-CoV-2 antibody.

[0221] In some embodiments, the present disclosure pertains to: A method for the serological detection of exposure to and/or infection by SARS-CoV-2 in a sample, comprises: contacting the sample with a variant of SARS-CoV-2 nucleocapsid protein, spike protein and/or spike protein receptor binding domain (RBD) or a variant of SARS-CoV-2 nucleocapsid protein, spike protein and/or spike protein receptor binding domain (RBD) which are reactive with, and specific for a SARS-CoV-2 antibody; and detecting the binding between the antibody in the sample and the variant.

[0222] In some embodiments, the present disclosure pertains to: A method for the serological detection of exposure to and/or infection by SARS-CoV-2 in a sample, comprises: contacting the sample with a microarray comprising a variant of SARS-CoV-2 nucleocapsid protein, spike protein and/or spike protein receptor binding domain (RBD) which are reactive with, and specific for SARS-CoV-2 antibody.

[0223] In certain embodiments, the detecting step comprises performing an ELISA assay. In other embodiments, the detecting step comprises performing a lateral flow immunoassay. In other embodiments, the detecting step comprises performing an agglutination assay. In other embodiments, the detecting step comprises spinning the sample in an analytical or centrifugal rotor. In other embodiments, the detecting step comprises analyzing the sample using a Western blot, a slot blot, or a dot blot. In still other embodiments, the detecting step comprises analyzing the sample with an electrochemical sensor, an optical sensor, or an opto electronic sensor. In certain embodiments, the detecting step comprises performing a wavelength shift assay.

[0224] In certain embodiments, the diagnostic test kit comprises a variant of SARS-CoV-2 nucleocapsid protein, spike protein and/or spike protein receptor binding domain (RBD) attached to or immobilized upon a solid support. In one embodiment, the variant is attached to the solid support through a metallic (e.g., gold) nanolayer. In certain embodiments, the solid support is a bead or plurality of beads (e.g., a colloidal particle, a metallic nanoparticle or nanoshell, or a latex bead), a flow path in a lateral flow immunoassay device (e.g., a porous membrane), a flow path in an analytical or centrifugal rotor, a blot (e.g., Western blot, a slot blot, or dot blot), or a tube or a well (e.g., in a plate suitable for an ELISA assay or microarray). In certain embodiments, the solid support comprises metal, glass, a cellulose-based material (e.g., nitrocellulose), or a polymer (e.g., polystyrene, polyethylene, polypropylene, polyester, nylon, or polysulfone).

[0225] The present disclosure also pertains to the use of a variant of SARS-CoV-2 nucleocapsid protein, spike protein and/or spike protein receptor binding domain (RBD) which are strongly reactive with, and sensitive to an antibody to SARS-CoV-2 in a patient sample. In some embodiments, a variant of SARS-CoV-2 nucleocapsid protein, spike protein and/or spike protein receptor binding domain (RBD) can be used in any type of serological assay or platform, now known or later developed, to screen for the presence of antibody to SARS-CoV-2 and to determine if a subject has had an infection by and/or exposure to SARS-CoV-2. In some embodiments, a variant of SARS-CoV-2 nucleocapsid protein, spike Protein and/or spike protein receptor binding domain (RBD) can also be used to test for and monitor humoral responses to vaccines and immunomodulatory drugs, thus, being useful for the development of treatment and preventative agents for SARS-CoV-2.

[0226] As one of ordinary skill in the art would know, a number of different conventional assays are useful for detecting formation of a complex comprising an antibody and a viral protein or variant thereof. For example, the detecting step can comprise performing an ELISA assay, performing an immunofluorescence assay, performing a lateral flow immunoassay, performing an agglutination assay, performing a wavelength shift assay, performing a Western blot, slot blot, or dot blot, analyzing the sample in an analytical or centrifugal rotor, or analyzing the sample with an electrochemical, optical, or opto-electronic sensor. These different assays are described herein and/or are well known to those skilled in the art.

[0227] Thus, the variant of SARS-CoV-2 nucleocapsid protein, spike protein and/or spike protein receptor binding domain (RBD) of the present disclosure can be used in any assay, format or platform for antibody detection including but not limited to ELISA, Luminex, Western blot assays, and spotted arrays, as well as those platforms that are later developed.

[0228] In certain embodiments, the assay comprises: immobilizing the antibody(s) in the sample; adding a variant of SARS-CoV-2 nucleocapsid protein, spike protein and/or spike protein RBD (receptor binding domain): and detecting the degree of antibody bound to the variant, e.g., by the variant being labeled or by adding a labeled substance, such as a labeled binding partner (e.g., streptavidin-HRP or streptavidin-colloidal gold complex) or a labeled antibody which specifically recognizes the variant of SARS-CoV-2 nucleocapsid protein, spike protein and/or spike protein RBD (receptor binding domain).

[0229] In other embodiments, the assay comprises: immobilizing a variant of SARS-CoV-2 nucleocapsid protein, spike protein and/or spike protein RBD (receptor binding domain); adding the sample containing antibody: and detecting the amount of antibody bound to the variant, e.g., by adding another variant conjugated, directly or indirectly, to a label (e.g., metallic nanoparticle or metallic nanoshell, fluorescent label, or enzyme (e.g., horseradish peroxidase or alkaline phosphatase)) or by adding a labeled substance, such as a binding partner or a labeled antibody which specifically recognizes the sample antibody (e.g., anti-human IgG antibody, or anti-human IgM antibody).

[0230] In other embodiments, the assay comprises: immobilizing a variant of SARS-CoV-2 nucleocapsid protein, spike protein and/or spike protein RBD (receptor binding domain); adding the sample containing antibody: and detecting the amount of antibody bound to the variant, e.g., by adding a first binding partner which specifically recognizes the sample antibody (e.g., anti-human IgG antibody, or anti-human IgM antibody), and further adding a second binding partner, wherein the second binding partner is labeled and recognizes said first binding partner.

[0231] In still other embodiments, the assay comprises: reacting the variant of SARS-CoV-2 nucleocapsid protein, spike protein and/or spike protein receptor binding domain (RBD) and the sample containing antibody without any of the reactants being immobilized, and then detecting the amount of complexes of an antibody and the variant, e.g., by the variant being labeled or by adding a labeled substance, such as a labeled binding partner (e.g., streptavidin-HRP or streptavidin colloidal gold complex) or a labeled antibody which specifically recognizes the variant.

[0232] Immobilization of a variant can be either covalent or non-covalent, and the non-covalent immobilization can be non-specific (e.g., non-specific binding to a polystyrene surface in a microtiter well). Specific or semi-specific binding to a solid or semi solid carrier, support or surface, can be achieved by the variant of SARS-CoV-2 nucleocapsid protein, spike protein and/or spike protein receptor binding domain (RBD) having, associated with it, a moiety which enables its covalent or non-covalent binding to the solid or semi-solid carrier, support or surface. For example, the moiety can have affinity to a component attached to the carrier, support or surface. In this case, the moiety may be, for example, a biotin or biotinyl group or an analogue thereof bound to an amino acid group of the variant of SARS-CoV-2 nucleocapsid protein, spike protein and/or spike protein RBD (receptor binding domain), and the component is then avidin, streptavidin, neutravidin, or an analogue thereof.

[0233] Suitable carriers, supports, and surfaces include, but are not limited to, metallic nanolayers, beads (e.g., magnetic beads, colloidal particles or metallic nanoparticles or nanoshells, such as colloidal gold, or particles or nanoparticles comprising silica, latex, polystyrene, polycarbonate, or PDVF), latex of co-polymers such as styrene-divinyl benzene, hydroxylated styrene-divinyl benzene, polystyrene, carboxylated polystyrene, beads of carbon black, non-activated or polystyrene or polyvinyl chloride activated glass, epoxy activated porous magnetic glass, gelatin or polysaccharide particles or other protein particles, red blood cells, mono- or polyclonal antibody or Fab fragments of such antibody.

[0234] The protocols for immunoassays using antigens for detection of specific antibody are well known in art. For example, a conventional sandwich assay can be used, or a conventional competitive assay format can be used.

[0235] Devices for performing specific binding assays, especially immunoassays, are known and can be readily adapted for use in the present methods. Solid-phase assay devices include microtiter plates, flow-through assay devices (e.g., lateral flow immunoassay devices), dipsticks, and immunocapillary or immunochromatographic immunoassay devices.

[0236] In embodiments, the solid or semi-solid surface or carrier is the floor or wall in a microtiter well, a filter surface or membrane (e.g., a nitrocellulose membrane or a PVDF (polyvinylidene fluoride) membrane), a hollow fiber, a beaded chromatographic medium (e.g., an agarose or polyacrylamide gel), a magnetic bead, a fibrous cellulose matrix, an HPLC matrix, an FPLC matrix, a substance having molecules of such a size that the molecules with the variant of SARS-CoV-2 nucleocapsid protein, spike protein and/or spike protein receptor binding domain (RBD) bound thereto, when dissolved or dispersed in a liquid phase, can be retained by means of a filter, a substance capable of forming micelles or participating in the formation of micelles allowing a liquid phase to be changed or exchanged without entraining the micelles, a water-soluble polymer, or any other suitable carrier, support or surface.

[0237] In some embodiments, the variant of SARS-CoV-2 nucleocapsid protein, spike protein and/or spike protein receptor binding domain (RBD) is provided with a suitable label which enables detection. Conventional labels may be used which are capable, alone or in concert with other compositions or compounds, of providing a detectable signal. Suitable labels include, but are not limited to, enzymes (e.g., HRP, beta-galactosidase, or alkaline phosphatase), fluorescent labels, radioactive labels, colored latex particles, and metal-conjugated labels (e.g., metallic nanolayers, metallic nanoparticle- or metallic nanoshell-conjugated labels). Suitable metallic nanoparticle or metallic nanoshell labels include, but are not limited to, gold particles, silver particles, copper particles, platinum particles, cadmium particles, composite particles, gold hollow spheres, gold-coated silica nanoshells, and silica-coated gold shells. Metallic nanolayers suitable for detectable layers include nanolayers comprised of cadmium, zinc, mercury, and noble metals, such as gold, silver, copper, and platinum.

[0238] Suitable detection methods include, but are not limited to, detection of an agent which is tagged, directly or indirectly, with a colorimetric assay (e.g., for detection of HRP or beta galactosidase activity), visual inspection using light microscopy, immunofluorescence microscopy, including confocal microscopy, or by flow cytometry (FACS), autoradiography (e.g., for detection of a radioactively labeled agent), electron microscopy, immunostaining, subcellular fractionation, or the like. In one embodiment, a radioactive element (e.g., a radioactive amino acid) is incorporated directly into the variant. In another embodiment, a fluorescent label is associated with the variant via biotin/avidin interaction, association with a fluorescein conjugated antibody, or the like. In one embodiment, a detectable specific binding partner for the antibody is added to the mixture. For example, the binding partner can be a detectable secondary antibody or other binding agent (e.g., protein A, protein G, protein L or combinations thereof) which binds to the first antibody. This secondary antibody or other binding agent can be labeled with, for example, a radioactive, enzymatic, fluorescent, luminescent, metallic nanoparticle or metallic nanoshell (e.g. colloidal gold), or other detectable label, such as an avidin/biotin system. In another embodiment, the binding partner is a variant of SARS-CoV-2 nucleocapsid protein, spike protein and/or spike protein RBD (receptor binding domain), which can be conjugated directly or indirectly to an enzyme, such as horseradish peroxidase or alkaline phosphatase or other signaling moiety. In such embodiments, the detectable signal is produced by adding a substrate of the enzyme that produces a detectable signal, such as a chromogenic, fluorogenic, or chemiluminescent substrate.

[0239] In some embodiments, the detection procedure comprises visibly inspecting a complex comprising an antibody and a variant of SARS-CoV-2 nucleocapsid protein, spike protein and/or spike protein receptor binding domain (RBD) complex for a color change, or inspecting the complex for a physical-chemical change. Physical-chemical changes may occur with oxidation reactions or other chemical reactions. They may be detected by eye, using a spectrophotometer, or the like.

[0240] One assay format is a lateral flow immunoassay format. Antibodies to human or animal immunoglobulins, can be labeled with a signal generator or reporter (e.g., colloidal gold) that is dried and placed on a glass fiber pad (sample application pad or conjugate pad). The diagnostic a variant of SARS-CoV-2 nucleocapsid protein, spike protein and/or spike protein receptor binding domain (RBD) is immobilized on membrane, such as nitrocellulose or a PVDF (polyvinylidene fluoride) membrane. When a sample is applied to the sample application pad (or flows through the conjugate pad), it dissolves the labeled reporter, which then binds to all antibody in the sample. The resulting complexes are then transported into the next membrane (PVDF or nitrocellulose containing the variant by capillary action. If antibody against the variant are present, they bind to the variant striped on the membrane, thereby generating a signal (e.g., a band that can be seen or visualized). An additional antibody specific to the labeled antibody or a second labeled antibody can be used to produce a control signal.

[0241] An alternative format for the lateral flow immunoassay comprises the variant of SARS-CoV-2 nucleocapsid protein, spike protein and/or spike protein receptor binding domain (RBD) or compositions being conjugated to a ligand (e.g., biotin) and complexed with labeled ligand receptor (e.g., streptavidin-colloidal gold). The labeled complex can be placed on the sample application pad or conjugate pad. Anti-human IgG/IgM or anti animal IgG/IgM antibody are immobilized on a membrane, such as nitrocellulose of PVDF, at a test site. When sample is added to the sample application pad, an antibody in the sample reacts with a labeled variant such that the antibody becomes indirectly labeled. The antibody in the sample are then transported into the next membrane (PVDF or nitrocellulose containing the variant) by capillary action and bind to the immobilized anti-human IgG/IgM or anti-animal IgG/lgM antibody. If any of the sample antibody are bound to the variant, the label associated with the variant can be seen or visualized at the test site.

[0242] Another assay for the screening of blood products or other physiological or biological fluids is an enzyme linked immunosorbent assay, i.e., an ELISA. In some embodiments, in an ELISA, a variant of SARS-CoV-2 nucleocapsid protein, spike protein and/or spike protein receptor binding domain (RBD) is adsorbed to the surface of a microtiter well directly or through a capture matrix (e.g., an antibody). Residual, non-specific protein-binding sites on the surface are then blocked with an appropriate agent, such as bovine serum albumin (BSA), heat-inactivated normal goat serum (NGS), or BLOTTO (a buffered solution of nonfat dry milk which also contains a preservative, salts, and an antifoaming agent). The well is then incubated with a biological sample suspected of containing specific antibody. The sample can be applied neat, or more often it can be diluted, usually in a buffered solution which contains a small amount (0.1-5.0% by weight) of protein, such as BSA, NGS, or BLOTTO. After incubating for a sufficient length of time to allow specific binding to occur, the well is washed to remove unbound protein and then incubated with an optimal concentration of an appropriate anti-immunoglobulin antibody that is conjugated to an enzyme or other label by standard procedures and is dissolved in blocking buffer. The label can be chosen from a variety of enzymes, including horseradish peroxidase (HRP), beta-galactosidase, alkaline phosphatase (ALP), and glucose oxidase. Sufficient time is allowed for specific binding to occur again, then the well is washed again to remove unbound conjugate, and a suitable substrate for the enzyme is added. Color is allowed to develop and the optical density of the contents of the well is determined visually or instrumentally (measured at an appropriate wave length). Conditions for performing ELISA assays are well-known in the art.

[0243] In another embodiment of an ELISA, a variant of SARS-CoV-2 nucleocapsid protein, spike protein and/or spike protein receptor binding domain (RBD) is immobilized on a surface, such as a ninety-six-well ELISA plate A sample is then added and the assay proceeds as above.

[0244] In still other embodiments, a variant of SARS-CoV-2 nucleocapsid protein, spike protein and/or spike protein receptor binding domain (RBD) is electro- or dot-blotted onto nitrocellulose paper. Subsequently, a sample, such as a biological fluid (e.g., serum or plasma) is incubated with the blotted antigen, and antibody in the biological fluid is allowed to bind to the antigen(s). The bound antibody can then be detected, e.g., by standard immunoenzymatic methods or by visualization using metallic nanoparticles or nanoshells coupled to secondary antibody or other antibody binding agents or combinations thereof.

[0245] It should be understood by one of skill in the art that any number of conventional protein assay formats, particularly immunoassay formats, may be designed to utilize the variant of SARS-CoV-2 nucleocapsid protein, spike protein and/or spike protein receptor binding domain (RBD) for the detection of SARS-CoV-2 antibody in a subject. This disclosure is thus not limited by the selection of the particular assay format, and is believed to encompass assay formats that are known to those of skill in the art. To date most serology has been performed using singleplex ELISA, complement fixation or neutralization assays. More recently, Luminex-based systems have been employed that can address up to 100 antigenic targets simultaneously (i.e., 100 individual pathogens, 100 individual antigenic targets for one pathogen, or some variation thereof) (Anderson et al. J. Immunol. Methods 2011; 366:79-88). Additionally, arrays are established that comprise spotted recombinant proteins expressed in vitro in E. coli, S. cerevisiae, baculoviruses, or cell-free, coupled transcription-translation systems (Vigil et al. Future Microbiol. 2010:5:241-51).

[0246] One goal of the present disclosure is to automate the process of SARS-CoV-2 antibody detection and make it inexpensive, quick and accurate as well as detect exposure per se rather than to rigorously characterize humoral responses to specific pathogens.

[0247] One assay that meets these requirements is a programmable array. One method to create and validate a programmable array that can measure the humoral immune response to SARS-CoV-2, thus enabling detection of exposure to SARS-CoV-2 (or its gene products in vaccines), comprises the following steps: 1) select a variant of SARS-CoV-2 nucleocapsid protein, spike protein and/or spike protein receptor binding domain (RBD) using bioinformatic methods; 2) test the variant printed on arrays for sensitivity and specificity using sera from humans and other animals who have been exposed to antigens of SARS-CoV-2; 3) examine the performance of algorithms typically employed for epitope prediction; 4) use assay results to develop smaller and less comprehensive variant libraries that can be deployed in smaller and more facile platforms, 5) optimize and validate assay protocols; and 6) develop software to automate assay analysis.

[0248] The presence of an elevated amount of a complex comprising an antibody and a variant of SARS-CoV-2 nucleocapsid protein, spike protein and/or spike protein receptor binding domain (RBD) complex indicates that the subject was exposed to and infected by the SARS-CoV-2 virus. A variant of SARS-CoV-2 nucleocapsid protein, spike protein and/or spike protein RBD (receptor binding domain), including a modified form thereof, which “binds specifically” to an antibody against a SARS-CoV-2 antigen interacts with the antibody, or forms or undergoes a physical association with it, in an amount and for a sufficient time to allow detection of the antibody.

[0249] Conditions for reacting a variant protein and antibody so that they react specifically are well known to those of skill in the art. See, e.g., Current Protocols in Immunology (Coligan et al., editors, John Wiley & Sons, Inc).

[0250] Once the variant of SARS-CoV-2 nucleocapsid protein, spike protein and/or spike protein receptor binding domain (RBD) and sample antibody are permitted to react in a suitable medium, an assay is performed to determine the presence or absence of the reaction. Any of the assays discussed herein can be used.

[0251] The methods and systems of the present disclosure may be used to detect exposure to antigens of SARS-CoV-2 in research and clinical settings.

[0252] One sample for use in the methods is a biological sample. A biological sample may be obtained from a tissue of a subject or bodily fluid from a subject including but not limited to nasopharyngeal aspirate, blood, cerebrospinal fluid, saliva, serum, plasma, urine, sputum, bronchial lavage, pericardial fluid, or peritoneal fluid, or a solid such as feces. The preferred biological sample is serum, plasma and urine. The subject may be any animal, particularly a vertebrate and more particularly a mammal, including, without limitation, a cow, dog, human, monkey, mouse, pig, or rat. In one embodiment, the subject is a human.

[0253] A sample may also be a research, clinical, or environmental sample, such as cells, cell culture, cell culture medium, and compositions for use as, or the development of pharmaceutical and therapeutic agents.

[0254] Additional applications include, without limitation, detection of the screening of blood products (e.g., screening blood products for infectious agents), biodefense, food safety, environmental contamination, forensics, and genetic-comparability studies. The present disclosure also provides methods and systems for detecting viral antibody in cells, cell culture, cell culture medium and other compositions used for the development of pharmaceutical and therapeutic agents.

[0255] The subject may have been exposed to antigens of SARS-CoV-2, suspected of having exposure to antigens of SARS-CoV-2 or believed not to have had exposure to antigens of SARS-CoV-2. In one embodiment, the subject is a female, and in a further embodiment the female subject may be pregnant or attempting to become pregnant. In one embodiment, the subject may have been found to be seropositive by SARS-CoV-2 ELISA.

[0256] In one embodiment, the subject may be a test subject, which has been administered a SARS-CoV-2 vaccine or immunomodulatory agent.

[0257] The systems and methods described herein support the detection and measure of a humoral immune response to SARS-CoV-2.

[0258] The method may optionally include a step for washing any unbound sample.

[0259] Any method of detection discussed herein or known in the art can be used for visualizing and/or quantifying the bound antibody.

[0260] The disclosure also includes reagents and kits for practicing the methods. These reagents and kits may vary.

[0261] In some embodiments, the variant of SARS-CoV-2 nucleocapsid protein, spike protein and/or spike protein receptor binding domain (RBD) are attached to or immobilized on a solid support through a metallic nanolayer (e.g., cadmium, zinc, mercury, gold, silver, copper, or platinum nanolayer). In certain embodiments, the solid support is a bead (e.g., a colloidal particle or a metallic nanoparticle or nanoshell), a flow path in a lateral flow immunoassay device, a flow path in an analytical or centrifugal rotor, a tube or a well (e.g., in a plate), or a sensor (e.g., an electrochemical, optical, or opto-electronic sensor).

[0262] Reagents for particular types of assays can also be provided in kits. Thus, the kits can include a population of beads (e.g., suitable for an agglutination assay or a lateral flow assay), or a plate (e.g., a plate suitable for an ELISA assay). In other embodiments, the kits comprise a device, such as a lateral flow immunoassay device, an analytical or centrifugal rotor, a Western blot, a dot blot, a slot blot, or an electrochemical, optical, or opto-electronic sensor.

[0263] In one particular embodiment, the kit would comprise a variant of SARS-CoV-2 nucleocapsid protein, spike protein and/or spike protein receptor binding domain (RBD) microarrays comprising a variant of SARS-CoV-2 nucleocapsid protein, a variant of the spike protein and/or a variant of the spike protein receptor binding domain (RBD) or a collection or set of a variant of SARS-CoV-2 nucleocapsid protein, spike protein and/or spike protein RBD (receptor binding domain), which are reactive with, and specific for SARS-CoV-2 antibody, comprising: the variant of SARS-CoV-2 nucleocapsid protein, spike protein and/or spike protein receptor binding domain (RBD) comprising the amino acid sequence DITWEKDAEXTGNSPRLDVA, wherein X is V or I (SEQ ID NO: 4792); or a variant of SARS-CoV-2 nucleocapsid protein, spike protein and/or spike protein receptor binding domain (RBD) chosen from the group consisting of the variant of SARS-CoV-2 nucleocapsid protein, spike protein and/or spike protein receptor binding domain (RBD) listed in SEQ ID NOs: 2-13; or a collection or set of a variant of SARS-CoV-2 nucleocapsid protein, spike protein and/or spike protein receptor binding domain (RBD) comprising amino acid sequences shifted one residue across the variant of SARS-CoV-2 nucleocapsid protein, spike protein and/or spike protein receptor binding domain (RBD) comprising the amino acid sequence DITWEKDAEXTGNSPRLDVA, wherein X is V or I (SEQ ID NO: 4792) (i.e., SEQ ID NOs: 14-22); or a collection or set of a variant of SARS-CoV-2 nucleocapsid protein, spike protein and/or spike protein receptor binding domain (RBD) comprising amino acid sequences shifted one residue across at least one a variant of SARS-CoV-2 nucleocapsid protein, spike protein and/or spike protein receptor binding domain (RBD) chosen from the group consisting of a variant of SARS-CoV-2 nucleocapsid protein, spike protein and/or spike protein receptor binding domain (RBD) listed in SEQ ID NOs: 2-13; or combinations thereof.

[0264] In addition, the kits can include various diluents and buffers, labeled conjugates or other agents for the detection of specifically bound antigens or antibody (e.g. labeling reagents), and other signal-generating reagents, such as enzyme substrates, cofactors and chromogens. In some embodiments, the kit comprises an anti-human IgG/lgM antibody conjugated to a detectable label (e.g., a metallic nanoparticle, metallic nanoshell, metallic nanolayer, fluorophore, colored latex particle, or enzyme) as a labeling reagent. In other embodiments, the kit comprises protein A, protein G, protein A/G fusion proteins, protein L, or combinations thereof conjugated to a detectable label (e.g., a metallic nanoparticle, metallic nanoshell, metallic nanolayer, fluorophore, colored latex particle, or enzyme) as a labeling reagent. In still other embodiments, the labeling reagents of the kit are a second collection or set of a variant of SARS-CoV-2 nucleocapsid protein, spike protein and/or spike protein receptor binding domain (RBD) conjugated to a detectable label (e.g., a metallic nanoparticle, metallic nanoshell, metallic nanolayer, fluorophore, colored latex particle, or enzyme). The second collection or set of a variant of SARS-CoV-2 nucleocapsid protein, spike protein and/or spike protein receptor binding domain (RBD) can be the same as or different than the collection or set of a variant of SARS-CoV-2 nucleocapsid protein, spike protein and/or spike protein RBD (receptor binding domain), which may optionally be attached to or immobilized upon a solid support.

[0265] Other components of a kit can easily be determined by one of skill in the art. Such components may include coating reagents, polyclonal or monoclonal capture antibody specific for a variant of SARS-CoV-2 nucleocapsid protein, spike protein and/or spike protein RBD (receptor binding domain), or a cocktail of two or more of the antibody, purified or semi-purified extracts of these antigens as standards, monoclonal antibody detector antibody, an anti-mouse, anti-dog, anti-cat, anti-chicken, or anti-human antibody conjugated to a detectable label, indicator charts for colorimetric comparisons, disposable gloves, decontamination instructions, applicator sticks or containers, a sample preparatory cup and buffers or other reagents appropriate for constituting a reaction medium allowing the formation of a variant of SARS-CoV-2 nucleocapsid protein, spike protein and/or spike protein RBD (receptor binding domain)-antibody complex.

[0266] Such kits provide a convenient, efficient way for a clinical laboratory to diagnose infection by SARS-CoV-2 virus. Thus, in certain embodiments, the kits further comprise instructions.

### Methods of Treatment

[0267] Provided herein are methods of treating and/or preventing a SARS-CoV-2 infection comprising administering the composition disclosed herein to a subject (e.g., administering vaccine compositions comprised protein variants and/or nucleic acids disclosed herein). In some embodiments, the composition comprises multiple variants provided herein (e.g., in some embodiments, the composition comprises a nucleocapsid variant, a spike protein variant and/or a spike protein RBD variant). The methods may comprise administering one dose of the composition or multiple doses of the composition.

[0268] Also disclosed herein are methods for inducing an immune response to a SARS-CoV-2 using the disclosed variants. Generally, the vaccine and/or composition may be administered subcutaneously, intradermally, submucosally, intranasally, or intramuscularly in an effective amount to prevent infection from the SARS-CoV-2 and/or treat an infection from the SARS-CoV-2. An effective amount to prevent infection is an amount of variants disclosed herein that will induce immunity in the immunized animals against challenge by a virulent virus such that infection is prevented or the severity is reduced. Immunity is defined herein as the induction of a significant higher level of protection in a subject after immunization compared to an unimmunized group. An effective amount to treat an infection is an amount of immunizing protein that induces an appropriate immune response against SARS-CoV-2 such that severity of the infection is reduced.

[0269] Protective immune responses can include humoral immune responses and cellular immune responses. Protection against SARS-CoV-2 is may be conferred through serum antibodies (humoral immune response) directed to the surface proteins. Cellular immune responses are useful in protection against SARS-CoV-2 virus infection with CD4+ and CD8+ T cell responses being particularly important. CD8+ immunity is of particular importance in killing virally infected cells.

[0270] Additionally, the disclosed variants and/or compositions can be administered using immunization schemes known by persons of ordinary skill in the art to induce protective immune responses. These include a single immunization or multiple immunizations in a prime-boost strategy. A boosting immunization can be administered at a time after the initial, prime, immunization that is days, weeks, months, or even years after the prime immunization. In certain embodiments, a boost immunization is administered 2 weeks, 1 month, 2, months, 3 months, 4 months, 5 months, or 6 months or more after the initial prime immunization. Additional multiple boost immunizations can be administered such as weekly, every other week, monthly, every other month, every third month, or more. In other embodiments, the boost immunization is administered every 3 weeks, every 4 weeks, every 5 weeks, every 6 weeks, every 7 weeks, every 8 weeks, every 9 weeks, every 10 weeks, every 11 w weeks, or every 12 weeks. In certain embodiments, boosting immunizations can continue until a protective anti-SARS-CoV-2 antibody titer is seen in the subject's serum. In certain embodiments, a subject is given one boost immunization, two boost immunizations, three boost immunizations, or four or more boost immunizations, as needed to obtain a protective antibody titer. In other embodiments, the adjuvant in the initial prime immunization and the adjuvant in the boost immunizations are different.

### Methods of Manufacture

[0271] Provided herein are methods of making a protein variant disclosed herein. The methods may comprise transfecting a cell with a nucleic acid disclosed herein and expanding the cells under conditions that allow cell propagation. The methods may further comprise isolating the protein variants from the propagated cells.

[0272] The level of protein variant of any of the variants described herein can be increased in a cell, e.g., by introducing into the cell a nucleic acid encoding the variant protein operably linked to a transcriptional regulatory sequence directing the expression of the protein in the cell. Methods for expressing nucleic acids in cells and appropriate transcriptional regulatory elements for doing so are well known in the art. Alternatively, any of the variant proteins described herein can be introduced into a cell, usually in the presence of a vector facilitating the entry of the protein into the cells, e.g., liposomes. Proteins can also be linked to transcytosis peptides for that purpose.

[0273] Host Cells

[0274] The protein variants may be expressed in any suitable expression system, including any suitable host cell. Suitable host cells include, but are not limited to: yeast cells, bacterial cells, algal cells, plant cells, fungal cells, insect cells, and animal cells, including mammalian cells. In one illustrative embodiment, suitable host cells include E. coli (e.g., Shuflle™ competent E. coli available from New England BioLabs in Ipswich, Mass.).

[0275] Other suitable host cells of the present disclosure include microorganisms of the genus Corynebacterium. In some embodiments, preferred Corynebacterium strains/species include: C. efficiens, with the deposited type strain being DSM44549, C. glutamicum, with the deposited type strain being ATCC13032, and C. ammoniagenes, with the deposited type strain being ATCC6871. In some embodiments the preferred host cell of the present disclosure is C. glutamicum.

[0276] Suitable host cells of the genus Corynebacterium, in particular of the species Corynebacterium glutamicum, are in particular the known wild-type strains: Corynebacterium glutamicum ATCC 13032, Corynebacterium acetoglutamicum ATCC15806, Corynebacterium aceloacidophilum ATCC13870, Corynebacterium melassecola ATCC17965, Corynebacterium thermoaminogenes FERM BP-1539, Brevibacterium flavum ATCC14067, Brevibacterium lactofermentum ATCC13869, and Brevibacterium divaricantum ATCC14020; and L-amino acid-producing mutants, or strains, prepared therefrom, such as, for example, the L-lysine-producing strains: Corynebacterium glutamicum FERM-P 1709, Brevibacterium flavum FERM-P 1708, Brevibacterium lactofermentum FERM-P 1712, Corynebacterium glutamicum FERM-P 6463, Corynebacterium glutamicum FERM-P 6464, Corynebacterium glutamicum DM58-1, Corynebacterium glutamicum DG52-5, Corynebacterium glutamicum DSM5714, and Corynebacterium glutamicum DSM12866.

[0277] Suitable yeast host cells include, but are not limited to: Candida, Hansenula, Saccharomyces, Schizosaccharomyces, Pichia, Kluyveromyces, and Yarrowia. In some embodiments, the yeast cell is Hansenula polymorpha, Saccharomyces cerevisiae, Saccharomyces carlsbergensis, Saccharomyces diastaticus, Saccharomyces norbensis, Saccharomyccs kluyveri, Schizosaccharomyces pombe, Komagataella phaffii, formerly known as Pichia pastoris, Pichia finlandica, Pichia trhalophila, Pichia kodamac, Pichia membranaefaciens, Pichia opuntiae, Pichia thermotolerans. Pichia salictaria, Pichia quercuum, Pichia pijperi, Pichia stipitis, Pichia methanolica, Pichia angusta, Kluyveromyces lactis, Candida albicans, or Yarrowia lipolytica.

[0278] In some embodiments, the yeast strain is an industrial polyploid yeast strain. Other non-limiting examples of fungal cells include cells obtained from Aspergillus spp., Penicillium spp., Fusarium spp., Rhizopus spp., Acremonium spp., Neurospora spp., Sordaria spp., Magnaporthe spp., Allomyces spp., Ustilago spp., Botrytis spp., and Trichoderma spp.

[0279] In certain embodiments, the host cell is an algal cell such as, Chlamydomonas (e.g., C. Reinhardtii) and Phormidium (P. sp. ATCC29409).

[0280] In other embodiments, the host cell is a prokaryotic cell. Suitable prokaryotic cells include gram positive, gram negative, and gram-variable bacterial cells. The host cell may be a species of, but not limited to: Agrobacterium, Alicyclobacillus, Anabaena, Anacystis, Acinetobacter, Acidothermus, Arthrobacter, Azobacter, Bacillus, Bifidobacterium, Brevibacterium, Butyriwbrio, Buchnera, Campestris, Camplynbacter, Closiridium, Corynebacterium, Chromatium, Coprococcus, Escherichia, Enterococcus, Enterobacter, Erwinia, Fusobacterium, Faecalibacterium, Francisella, Flavobacterium, Geobacillus, Haemophilus, Helicobacter, Klebsiella, Lactobacillus, Lactococcus, Ilyobacter, Micrococcus, Microbacterium, Mesorhizobium, Methylobacterium, Methylobacteriuim, Mycobacterium, Neisseria, Pantoea, Pseudomonas, Prochlorococcus, Rhodobacter, Rhodopseudomonas, Rhodopseudomonas, Roseburia, Rhodospirillum, Rhodococcus, Scenedesmus, Streptomyces, Streptococcus, Synecoccus, Saccharomonospora, Saccharopolyspora, Staphylococcus, Serratia, Salmonella, Shigella, Thermoanaerobacterium, Tropheryma, Tularensis, Temecula, Thermosvnechococcus, Thermococcus, Ureaplasma, Xanthomonas, Xylella, Yersinia, and Zymomonas.

[0281] In some embodiments, the bacterial host strain is an industrial strain. Numerous bacterial industrial strains are known and suitable for the methods and compositions described in this application.

[0282] In some embodiments, the bacterial host cell is of the Agrobacterium species (e.g., A. radiobacter, A. rhizogenes, A. rubi), the Arthrobacter species (e.g., A. aurescens, A. citreus, A. globformis, A. hydrocarboglutamicus, A. mysorens, A. nicotianae, A. paraffineus, A. protophonniae, A. roseoparaffinus, A. sulfureus, A. ureafaciens), the Bacillus species (e.g., B. thuringiensis, B. anthracis, B. megaterium, B. subtilis, B. lentus, B. circulars, B. pumilus, B. lautus, B. coagulans, B. brevis, B. firmus, B. alkaophius, B. licheniformis, B. clausii, B. stearothermophilus, B. halodurans and B. amyloliquefaciens. In particular embodiments, the host cell will be an industrial Bacillus strain including but not limited to B. subtilis, B. pumilus, B. licheniformis, B. megaterium, B. clausii, B. stearothermophilus and B. amyloliquefaciens. In some embodiments, the host cell will be an industrial Clostridium species (e.g., C. acetobutylicum, C. tetani E88, C. lituseburense, C. saccharobutylicum, C. perfringens, C. beijerinckii). In some embodiments, the host cell will be an industrial Corynebacterium species (e.g., C. glutamicum, C. acetoacidophilum). In some embodiments, the host cell will be an industrial Escherichia species (e.g., E. coli). In some embodiments, the host cell will be an industrial Erwinia species (e.g., E. uredovora, E. carotovora, E. ananas, E. herbicola, E. punctata, E. terreus). In some embodiments, the host cell will be an industrial Pantoea species (e.g., P. citrea, P. agglomerans). In some embodiments, the host cell will be an industrial Pseudomonas species, (e.g., P. putida, P. aeruginosa, P. mevalonii). In some embodiments, the host cell will be an industrial Streptococcus species (e.g., S. equisimiles, S. pyogenes, S. uberis). In some embodiments, the host cell will be an industrial Streptomyces species (e.g., S. ambofaciens, S. achromogenes, S. avermitilis, S. coelicolor, S. aureofaciens, S. aureus, S. fungicidicus, S. griseus, S. lividans). In some embodiments, the host cell will be an industrial Zymomonas species (e.g., Z. mobilis, Z. lipolytica), and the like.

[0283] The present disclosure is also suitable for use with a variety of animal cell types, including mammalian cells, for example, human (including 293, HeLa, WI38, PER.C6 and Bowes melanoma cells), mouse (including 3T3, NS0, NS1, Sp2/0), hamster (CHO, BHK), monkey (COS, FRhL, Vero), insect cells, for example fall armyworm (including Sf9 and Sf21), silkmoth (including BmN), cabbage looper (including BTI-Tn-5B1-4) and common fruit fly (including Schneider 2), and hybridoma cell lines.

[0284] In various embodiments, strains that may be used in the practice of the disclosure including both prokaryotic and eukaryotic strains, and are readily accessible to the public from a number of culture collections such as American Type Culture Collection (ATCC), Deutsche Sammlung von Mikroorganismen and Zellkulturen GmbH (DSM), Centraalbureau Voor Schimmelcultures (CBS), and Agricultural Research Service Patent Culture Collection, Northern Regional Research Center (NRRL). The present disclosure is also suitable for use with a variety of plant cell types.

[0285] The term “cell,” as used in this application, may refer to a single cell or a population of cells, such as a population of cells belonging to the same cell line or strain. Use of the singular term “cell” should not be construed to refer explicitly to a single cell rather than a population of cells. The host cell may comprise genetic modifications relative to a wild-type counterpart.

The genetically modified organisms provided herein include microorganisms and plants. In some embodiments, the genetically modified organisms are microorganisms. In some embodiments, the microorganisms are selected from yeast, bacteria, microalgae, insect cells, and plant cells. In some embodiments, the organisms are selected from yeast and bacteria.

### EXEMPLIFICATION

### Design and Screen of ECT Spike Variants

[0286] Coronaviruses (e.g., beta coronaviruses SARS-CoV, MERS-CoV, OC43, and HKU1; and alpha coronaviruses 229E and NL63) express a large repertoire of native antigens. Of prime focus is the spike protein, which interacts directly with the human ACE2 receptor and at present is the key antigen utilized in SARS-CoV 2 vaccines. One of the greatest challenges for spike-based vaccine development is stabilization of the pre-fusion conformation, which is the key structural conformation to maintain such that a robust and neutralizing antibody repertoire is elicited by the human body. The unstable immunogenic pre-fusion conformation of the SARS-CoV 2 spike protein was stabilized for cryo-electron microscopy (cryo-EM) by inclusion of two proline mutations in the S2 fusion domain. Despite these modifications, expression titers were low, suggesting room for further improvement in stability, which correlates with expression level. Applicant has created variants with additional mutations that can be introduced to improve stability and has identified unique, novel mutations to the spike protein which confer enhanced biophysical properties, chiefly stabilization of the pre-fusion conformation, yet retain their biological function of ACE2 and neutralizing antibody binding.

[0287] Applicant used “template” (Antigen ID 4155326), and added additional mutations to the ECT spike sequence. All variants described in this Example contain the mutations R682S, R683G, R685G, K986P, and V987P, in addition to the novel mutations designed and tested.

[0288] In an effort to engineer SARS-CoV 2 ECT spike variants for enhanced stability, producibility, and maintained or enhanced binding properties to known neutralizing antibodies and to the ACE2 human receptor, a library of approximately 600 unique variants of the ECT spike template protein were designed. This was done using a combination of structure and sequence based design approaches. The resultant designs were placed into a mammalian protein expression construct (FIG. 1) and ordered for DNA synthesis. Transfection grade DNA was then prepared from the synthesized plasmids, and from the initial set of 600 variant designs a total of 571 were successfully synthesized and had transfection-grade DNA prepared. The resultant set of plasmids were transiently transfected into HEK293 cells, and after culturing the supernatants containing secreted proteins were harvested by centrifugation and used directly and immediately in subsequent assays.

[0289] Supernatants containing variants of SARS-CoV 2 spike antigen were assessed for: (1) protein expression yield; (2) binding to recombinant human ACE2; (3) binding to pooled sera from humans isolated both pre-pandemic as well as from SARS-CoV 2 positive patients. Protein expression yields for variants ranged from 0% to 500% compared to the template, with approximately one sixth of the library (one hundred variants) demonstrating significantly improved expression yield. A collection of 17 hits from this collection, selected based on expression improvements and functional maintenance (sera and ACE2 binding), were advanced to further characterization in follow-up experiments.

[0290] In the follow up experiment, replicate 40 mL mammalian transient transfection expression cultures were prepared in culture flasks and the expressed proteins were purified from supernatants via Ni-NTA affinity chromatography using an FPLC. The eluted proteins were buffer exchanged, quantified, and aliquoted for storage at −80° C. Preparations were thawed on ice.

[0291] Quantification of the purified protein preps revealed that all but one (4157731) of the variants yielded more protein than the template (Table 8 and FIG. 2), indicating that these variants have enhanced biophysical properties which correlate with yield such as stability and solubility. Seven of the variants (4157678, 4157532, 4157936, 4157507, 4157465, 4157840, 4157462) demonstrated >2-fold improved protein yield compared to the template, and the best yielding variant, 4157678, demonstrated a 3.1-fold improvement in yield. This variant contained the mutation T768E relative to the template sequence. SEQ ID NOs for each variant tested can be found in Table 8.

TABLE 8

| | | Concentration | Purification yield |
|---|---|---|---|
| Variant ID | SEQ ID NO: | (mg/ml) | (mg) |
| 4155326 | Control | 0.066 | 0.25 |
| 4157426 | 1795 | 0.088 | 0.30 |
| 4157445 | 1962 | 0.091 | 0.38 |
| 4157462 | 1804 | 0.123 | 0.52 |
| 4157465 | 1805 | 0.084 | 0.57 |
| 4157507 | 2097 | 0.125 | 0.59 |
| 4157523 | 1824 | 0.083 | 0.38 |
| 4157532 | 2103 | 0.156 | 0.69 |
| 4157579 | 1996 | 0.112 | 0.40 |
| 4157668 | 2135 | 0.077 | 0.32 |
| 4157678 | 2343 | 0.168 | 0.77 |
| 4157731 | 2285 | 0.045 | 0.15 |
| 4157756 | 2156 | 0.115 | 0.47 |
| 4157787 | 2016 | 0.100 | 0.45 |
| 4157840 | 1812 | 0.127 | 0.53 |
| 4157841 | 1916 | 0.109 | 0.38 |
| 4157936 | 1955 | 0.154 | 0.63 |
| 4157945 | 2359 | 0.082 | 0.30 |

*Total mass (mg) and concentration (mg/ml) of the purified yield from 17 antigen variants. Variant ID 4155326 is the template for all the variants.

[0292] To assess the binding characteristics of the template and variants, Octet binding characterization experiments were performed using ACE2 and three different commercially available neutralizing antibodies (nAbs), deemed nAb1-3. Given the sensitivity limitations of the Octet instrument, the association constant, kₒₙ, was utilized as the primary metric for binding characterization, as it is generally the most reliable and robust metric derived from an Octet binding curve. A commercially available ECT spike protein (SPN-C52H8 from Acro Biosystems) was used as a positive control. All 17 variants demonstrated indistinguishable or improved kₒₙ as compared to the template antigen for all binding targets tested (Table 9 and FIG. 3). For FIG. 3A-D, Antigen ID 4155326, representing the template (starting) antigen sequence, was used as a positive control and to establish a baseline for comparison of binding constants. The data represent the average of four technical replicates±one standard deviation of the mean. Antigen IDs and their corresponding binding constants from these graphs are shown in Table 9.

TABLE 9

| | ACE2 | ACE2 | nAb1 | nAb1 | nAb2 | nAb2 | nAb3 | nAb3 |
|---|---|---|---|---|---|---|---|---|
| | k_on | k_on | k_on | k_on | k_on | k_on | k_on | k_on |
| Variant | Average | Standard | Average | Standard | Average | Standard | Average | Standard |
| ID | (1/Ms) | Deviation | (1/Ms) | Deviation | (1/Ms) | Deviation | (1/Ms) | Deviation |
| SPN- | 5.17E+04 | 1.63E+04 | 7.54E+04 | 3.02E+04 | 1.15E+05 | 3.28E+04 | 3.43E+04 | 1.64E+04 |
| C52H8 | | | | | | | | |
| 4155326 | 2.40E+04 | 1.35E+04 | 5.60E+04 | 1.39E+04 | 1.29E+05 | 3.08E+04 | 2.02E+04 | 1.03E+04 |
| 4157426 | 7.33E+04 | 1.30E+04 | 9.19E+04 | 2.25E+04 | 1.37E+05 | 3.45E+04 | 4.74E+04 | 1.18E+04 |
| 4157445 | 9.19E+04 | 1.75E+04 | 1.1IE+05 | 2.71E+04 | 1.46E+05 | 3.84E+04 | 5.54E+04 | 1.38E+04 |
| 4157462 | 6.96E+04 | 1.51E+04 | 7.68E+04 | 1.81E+04 | 1.48E+05 | 3.49E+04 | 3.25E+04 | 9.85E+03 |
| 4157465 | 6.44E+04 | 1.77E+04 | 9.78E+04 | 2.64E+04 | 1.37E+05 | 3.59E+04 | 4.68E+04 | 1.14E+04 |
| 4157507 | 7.97E+04 | 1.88E+04 | 1.09E+05 | 3.35E+04 | 1.64E+05 | 4.02E+04 | 5.19E+04 | 1.23E+04 |
| 4157523 | 8.27E+04 | 1.82E+04 | 1.15E+05 | 3.23E+04 | 1.63E+05 | 4.26E+04 | 5.75E+04 | 1.45E+04 |
| 4157532 | 4.66E+04 | 7.73E+03 | 4.87E+04 | 7.14E+03 | 1.43E+05 | 3.11E+04 | 1.98E+04 | 8.68E+03 |
| 4157579 | 8.76E+04 | 1.46E+04 | 1.06E+05 | 2.84E+04 | 1.41E+05 | 3.32E+04 | 5.23E+04 | 1.17E+04 |
| 4157668 | 5.18E+04 | 9.03E+03 | 1.02E+05 | 2.57E+04 | 1.48E+05 | 3.25E+04 | 4.08E+04 | 8.25E+03 |
| 4157678 | 7.78E+04 | 1.44E+04 | 9.39E+04 | 2.54E+04 | 1.50E+05 | 3.71E+04 | 4.88E+04 | 1.13E+04 |
| 4157731 | 1.79E+04 | 1.01E+04 | 8.50E+04 | 2.51E+04 | 1.10E+05 | 2.47E+04 | 2.79E+04 | 1.13E+04 |
| 4157756 | 6.72E+04 | 1.34E+04 | 6.29E+04 | 1.44E+04 | 1.27E+05 | 3.00E+04 | 2.78E+04 | 1.18E+04 |
| 4157787 | 2.89E+04 | 8.49E+03 | 5.30E+04 | 1.02E+04 | 1.30E+05 | 2.75E+04 | 2.06E+04 | 8.85E+03 |
| 4157840 | 3.84E+04 | 9.86E+03 | 6.23E+04 | 1.37E+04 | 1.30E+05 | 2.87E+04 | 2.77E+04 | 1.31E+04 |
| 4157841 | 7.48E+04 | 1.61E+04 | 1.11E+05 | 2.91E+04 | 1.64E+05 | 3.60E+04 | 4.75E+04 | 9.06E+03 |
| 4157936 | 3.80E+04 | 9.46E+03 | 5.84E+04 | 1.72E+04 | 1.04E+05 | 2.19E+04 | 2.59E+04 | 1.20E+04 |
| 4157945 | 5.83E+04 | 7.22E+03 | 9.29E+04 | 2.57E+04 | 1.95E+05 | 4.42E+04 | 4.29E+04 | 9.30E+03 |

* Binding association rate against ACE2 protein and three different neutralizing antibodies for the 17 variants, 4155326 is the template for all variants. SPN-C52H8 is a commercial reagent purchased from Acro Biosystems that was used as a positive control.

[0293] The best variant for ACE2 kₒₙ improvement was 4157445, demonstrating a 3.8-fold improvement. This variant contains the mutation S50M relative to the template. For nAb binding, most variants were indistinguishable from the template or moderately improved. Variant 4157445 had a 2.7-fold improvement in kₒₙ for nAb3. Variant 4157945 containing mutation V622D demonstrated a moderately improved kₒₙ for all three nAbs. Taken together, these results indicate that in addition to the improved variants having superior protein expression and purification yield compared with the template antigen, they also maintained or demonstrated improved binding characteristics to ACE2 and each of the nAbs tested.

[0294] To confirm our findings, a repeat experiment of the binding characterization of the top 9 best variants was executed (Table 10 and FIG. 4). For this set of experiments, Applicant used a more sensitive Octet binding assay to enable higher resolution data collection. For FIG. 4A-4D, Antigen ID 4155326, representing the template (starting) antigen sequence, was used as a positive control and to establish a baseline for comparison of binding constants. The data represent the average of three technical replicates f one standard deviation of the mean. Antigen IDs and their corresponding binding constants from these graphs are shown in Table 10.

TABLE 10

| | ACE2 | ACE2 | nAb1 | nAb1 | nAb2 | nAb2 | nAb3 | nAb3 |
|---|---|---|---|---|---|---|---|---|
| | k_on | k_on | k_on | k_on | k_on | k_on | k_on | k_on |
| Variant | Average | Standard | Average | Standard | Average | Standard | Average | Standard |
| ID | (1/Ms) | Deviation | (1/Ms) | Deviation | (1/Ms) | Deviation | (1/Ms) | Deviation |
| SPN- | 2.05E+04 | 4.36E+03 | 1.84E+04 | 2.19E+03 | 5.43E+04 | 4.51E+03 | 1.13E+04 | 1.99E+03 |
| C52H8 | | | | | | | | |
| 4155326 | 5.68E+04 | 3.19E+03 | 4.69E+04 | 8.76E+03 | 1.26E+05 | 2.07E+04 | 1.96E+04 | 3.48E+03 |
| 4157445 | 1.12E+05 | 7.17E+03 | 8.74E+04 | 1.56E+04 | 1.76E+05 | 2.28E+04 | 4.36E+04 | 7.63E+03 |
| 4157462 | 6.50E+04 | 4.83E+03 | 5.07E+04 | 1.05E+04 | 1.25E+05 | 2.05E+04 | 2.37E+04 | 3.45E+03 |
| 4157523 | 1.22E+05 | 3.94E+03 | 8.69E+04 | 1.80E+04 | 1.71E+05 | 2.42E+04 | 4.95E+04 | 9.88E+03 |
| 4157532 | 8.02E+04 | 9.72E+03 | 3.72E+04 | 5.67E+03 | 1.21E+05 | 1.81E+04 | 1.46E+04 | 1.61E+03 |
| 4157668 | 7.72E+04 | 9.30E+03 | 8.45E+04 | 1.82B+04 | 1.70E+05 | 2.54E+04 | 3.63E+04 | 7.68E+03 |
| 4157678 | 8.90E+04 | 1.16E+04 | 7.85E+04 | 2.02E+04 | 1.68E+05 | 3.52E+04 | 3.81E+04 | 9.23E+03 |
| 4157840 | 4.54E+04 | 1.98E+03 | 4.26E+04 | 6.91E+03 | 1.08E+05 | 1.38E+04 | 1.66E+04 | 1.80E+03 |
| 4157936 | 3.36E+04 | 2.34E+03 | 3.99E+04 | 7.38E+03 | 8.87E+04 | 1.43E+04 | 1.58E+04 | 3.05E+03 |
| 4157945 | 9.54E+04 | 3.85E+03 | 7.50E+04 | 1.53E+04 | 2.07E+05 | 2.09E+04 | 3.92E+04 | 7.67E+03 |

* Binding association rate against ACE2 protein and three different neutralizing antibodies for the top nine variants from Table 9, 4155326 is the template for all variants. SPN-C52H8 is a commercial reagent purchased from Acro Biosystems that was used as a positive control.

[0295] The enhanced kₒₙ binding properties of U.S. Pat. Nos. 4,157,445 and 4,157,945 observed in the first characterization were replicated in this experiment. Additionally, variant 4157523, containing the mutation L981Y, demonstrated enhanced binding to ACE2 and each of the nAbs. This mutation is interesting as it is close in sequence space to the double proline mutations (K986P V987P) contained in the template sequence, potentially offering a positive epistatic or additive effect on the stabilization of this region of the protein. Variants 4157668 and 4157678 demonstrated enhanced kₒₙ for ACE2, nAb, and nAb3. Variant 4157678, containing mutation T768E, was also the highest yielding variant from protein expression and purification. This indicates that this mutation potentially has enhanced stabilization of the pre-fusion conformation, enabling both high-yield heterologous expression as well as moderately enhanced binding properties to cognate protein binding targets.

[0296] To ensure that the results of this repeat experiment agreed with the first experiment, a correlation analysis of the measured kₒₙ parameters for each of the 9 variants tested in the two experiments was performed (FIG. 5). It was found that the kₒₙ measurements for each of the four binding partners were in strong agreement between the two experiments. with Pearson's correlation coefficients equal to 0.653, 0.949, 0.769. and 0.929 for ACE2, nAb1, nAb2, and nAb3, respectively (FIG. 5).

### Materials and Methods

[0297] Mammalian Cell Growth. Transfection, and Harvest of supernatant

[0298] Expi293′M Expression Medium (Gibco) was used for all cultures, and 37° C., 8% CO₂, 120 rpm shaking was used for all incubations. On the day prior to transfection, Expi293F cell subcultures were prepared at 3×10⁶ live cells/mL. On the day of transfection, the pre-transfection cells were counted and diluted to 3×10⁶ live cells/mL with pre-warmed media, and the media-diluted cell mixture was aliquoted in 40 mL aliquots into 250 mL plain-bottom flasks and returned to the incubator. Maxi-scale transfection-grade DNA preparations for the 17 variants and the template sequence were ordered from and prepared by Genewiz. Transfection reaction and DNA were prepared in duplicate volumes in 15 mL Falcon tubes as follows. The appropriate volume of DNA to supply 80 μg of DNA was added to the tube and then the appropriate volume of Opti-MEM solution (Gibco) was added to bring the final volume to 4.8 mL and mixed by pipetting. ExpiFectamine 293 reagent (Gibco) was mixed by inversion 5 times and 256 μL of reagent was added to a second 15 mL Falcon tube then diluted with 4.8 mL Opti-MEM and incubated at room temperature for 5 minutes. 4.8 mL of the diluted ExpiFectamine solution was added to each diluted DNA preparation and swirled to mix. The mixture was incubated at room temperature for 15 minutes. 4.8 mL of the DNA transfection mixture was added to two replicate 40 mL cultures of the prepared Expi293F cells in 250 mL plain-bottom flasks. After 18-22 hours, 240 μL of Enhancer I and 2.42 mL of Enhancer II were added to each flask. Cultures were returned to the incubator and grown for three days. Cultures were transferred to 50 mL Falcon tubes and supernatants were harvested by centrifugation.

### Protein Purification and Quantification

[0299] Harvested supernatants were purified via affinity chromatography on an AKTA purification system as follows. Supernatants from the replicate 40 mL cultures for each variant were filtered prior to running on FPLC using a 0.2 μm 50 mL filter unit. Filtered supernatants were applied directly to 1 mL Ni-NTA columns (GE Healthcare HisTrap HP 1 mL), washed with 20 mM Tris pH 8, 300 mM NaCl, and eluted with 20 mM Tris pH 8, 300 mM NaCl, 500 mM imidazole using a linear gradient. Several elution fractions were collected, and SDS-PAGE gel analysis was performed to determine which elution fractions to pool. Pooled elution fractions were buffer exchanged using a PD 10 desalting column (GE Healthcare) into 20 mM Tris pH 8, 300 mM NaCl, 10% glycerol. Protein preparations were quantified in triplicate by measuring absorbance at 280 nm (A280) on a Nanodrop instrument. Aliquots of 100 uL each were prepared in 1.5 mL microcentrifuge tubes, flash frozen in liquid nitrogen, and stored at −80° C. Aliquots were thawed on ice for approximately 30 minutes prior to subsequent assays.

ACE2 and Neutralizing Antibody (nAb) Binding Characterization

[0300] ACE2 and nAb binding characterization of the 17 antigens and template via Octet measurement was performed as follows. Kinetic binding assays were performed on an Octet HTX instrument at 30° C. with shaking at 1000 rpm using the 96-channel read head. Before use, human IgG Fc-capture kinetic biosensors (AHC) were pre-hydrated in 1× assay buffer (Sartorius 18-1105) for 10 min. Human Fc-tagged ACE2 standard (Sino Biological 10108-H02H) and human anti-spike nAbs (nAb1=Active Motif 91349, nAb2=Active Motif 91361, nAb3=Absolute Antibody Ab01680-10.0) were prepared at 10 nM in 1× assay buffer. Each spike ECT variant was prepared at concentrations of 12.5, 25, 50, and 100 nM in 1× assay buffer in quadruplicate from purified samples. Each tilted bottom 384-well assay plate was prepared as follows, with 50 μL/well: 1× assay buffer in Q1, 1×assay buffer in Q2, ACE2 or nAb1-3 in Q3, and spike ECT samples in Q4. The assay steps were set as follows: Baseline 1 (120 sec) in Q1 (1× assay buffer). Loading (600 sec) in Q3 (ACE2 or nAbs), Baseline 2 (120 sec) in Q2 (1× assay buffer), Association (600 sec) in Q4 (spike ECT samples), and Dissociation (600 sec) in Q2 (1× assay buffer). AHC biosensors were regenerated with 5 cycles of 10 nM glycine (pH 1.5) and neutralization in 1× assay buffer between each assay plate, with up to 4 uses per biosensor tray.

[0301] The raw data was analyzed in the Octet Data Analysis Software version 12.0. Double reference subtraction was applied and sensorgrams were aligned to the average of the baseline steps with Savitzky-Golay filtering. Sensorgrams were then globally fit to a 1:1 Langmuir binding model. Fitted data was filtered to remove traces with Full R²<0.9 and replicate measurements from 25, 50, and 100 nM spike ECT samples were averaged.

[0302] Repeat ACE2 and nAb binding characterization of the top 10 antigens and template via Octet measurement was performed as follows. Kinetic binding assays were performed on an Octet HTX instrument at 30° C. with shaking at 1000 rpm using the 8-channel read head. Before use, human IgG Fc-capture kinetic biosensors (AHC) were pre-hydrated in 1× assay buffer (Sartorius 18-1105) for 10 min. Human Fc-tagged ACE2 standard (Sino Biological 10108-H02H) and human anti-spike nAbs (nAb1=Active Motif 91349, nAb2=Active Motif 91361, nAb3=Absolute Antibody Ab01680-10.0) were prepared at 10 nM in 1× assay buffer. Each spike ECT variant was prepared at concentrations of 50 and 100 nM in 1× assay buffer in triplicate from purified samples. Each tilted bottom 384-well assay plate was prepared as follows, with 50 μL/well: 1×assay buffer in Q1, 1× assay buffer in Q2, ACE2 or nAb1-3 in Q3, and spike ECT samples in Q4. The assay steps were set as follows: Baseline 1 (60 sec) in Q1 (1× assay buffer), Loading (600 sec) in Q3 (ACE2 or nAb1-3), Baseline 2 (60 sec) in Q2 (1× assay buffer), Association (900 sec) in Q4 (spike ECT samples), and Dissociation (1800 sec) in Q2 (1× assay buffer). AHC biosensors were regenerated with 5 cycles of 10 nM glycine (pH 1.5) and neutralization in 1× assay buffer between each assay plate, with up to 4 uses per biosensor tray.

[0303] The raw data was analyzed in the Octet Data Analysis Software version 12.0. Reference well subtraction was applied and sensorgrams were aligned to the average of the baseline steps. An inter-step correction with alignment to the dissociation step at 60 sec was applied with Savitzky-Golay filtering. Sensorgrams were then globally fit to a 1:1 Langmuir binding model, with the window of interest adjusted to exclude the first 60 sec of the dissociation step. For k_{d} values flagged as “<1.0E-07 s⁻¹” in the Data Analysis Software, the k_{d} value was adjusted to 1.0E-06 s⁻¹ for further analysis (K_{D} values were calculated based on adjusted k_{d} value). Replicate measurements from 50 and 100 nM spike ECT samples were averaged.

### EQUIVALENTS

[0304] Those skilled in the art will recognize, or be able to ascertain using no more than routine experimentation, many equivalents to the specific embodiments of the invention described herein. Such equivalents are intended to be encompassed by the following claims.

### INCORPORATION BY REFERENCE

[0305] All publications patent applications mentioned herein are hereby incorporated by reference in their entirety as if each individual publication or patent application was specifically and individually indicated to be incorporated by reference. In case of conflict, the present application, including any definitions herein, will control.

### REFERENCES

[0306] Amanat et al. (2020) medRxiv 10.1101/2020.03.17.20037713.
[0307] Ayouba et al. (2017) J Clin Microbiol 55:165.
[0308] Berry et al. (2010) mAbs 2:53.
[0309] Buderer (1996) Acad Emerg Med 3:895.
[0310] Compoetto et al. (2017) Proc Natl Acad Sci 114:998.
[0311] Guan et al., Clin Diagn Lab Immunol 11:1148 (2004a).
[0312] Guan et al. (2004b) Clin Diagn Lab Immunol 11:287.
[0313] Healgen: (https://bit.1y/399Bi7P), accessed Match 23, 2020.
[0314] Leung et al. (2004) J Infect Dis 190:379.
[0315] Li et al. (2020) J Med Virol 10.1002/jmv.25727.
[0316] Lipsitch & Axelrod (2020) “Coronavirus may infect up to 70% of world's population. virus expert warns.” CBS News.
[0317] Liu et al. (2020) medRxiv 10.1101/2020.03.16.20035014.
[0318] Lyashchenko et al. (2000) J Immunol Methods 242:91.
[0319] Native Antigen Company: (https://bit.1y/2xV1ndU), accessed Mar. 21, 2020.
[0320] Niedrig et al. (2005) J Clin Virol 34:22.
[0321] Nishiura et al. (2020) Int J Infect Dis 10.1016/j.ijid.2020.03.020.
[0322] Qiu et al. (2005) Microbes Infect 7:882.
[0323] Raybiotech: (https://bit.1y/2QCn71e), accessed Mar. 21, 2020.
[0324] Sheridan (2020) Nature 10.1038/d41587-020-00010-2.
[0325] Walls et al. (2020) Cell. 180:1.
[0326] Wang et al. (2016) Emerg Microbes Infect 5:1.
[0327] Wrapp et al. (2020) Science 367:1260.
[0328] Wrenbeck et al. (2017) ACS Synth Biol 8:474.
[0329] Xiang et al. (2020) medRxiv 1 0.1101/2020.02.27.20028787.

What is claimed is:

1. A SARS-CoV-2 nucleocapsid protein variant, wherein the amino acid sequence of the variant comprises amino acids 254-671 of any of SEQ ID NOs: 598 to 1194 or amino acids 379-796 of any of SEQ ID NOs: 3203 to 3799.

2. A SARS-CoV-2 spike protein variant, wherein the amino acid sequence of the variant comprises amino acids 33-1230 of any of SEQ ID NOs: 1795 to 2394 or amino acids 33-705 of any of SEQ ID NOs: 4299 to 4791.

3. A SARS-CoV-2 spike protein receptor binding domain (RBD) variant, wherein the amino acid sequence of the variant comprises amino acids 33-236 of any of SEQ ID NOs: 2494 to 2592.

4. A SARS-CoV-2 nucleocapsid protein variant, wherein the amino acid sequence of the variant comprises any of SEQ ID NOs: 598 to 1194 or SEQ ID NOs: 3203 to 3799.

5. A SARS-CoV-2 spike protein variant, wherein the amino acid sequence of the variant comprises any of SEQ ID NOs: 1795 to 2394 or SEQ ID NOs: 4299 to 4791.

6. A SARS-CoV-2 spike protein receptor binding domain (RBD) variant, wherein the amino acid sequence of the variant comprises any of SEQ ID NOs: 2494 to 2592.

7. A SARS-CoV-2 nucleocapsid protein variant, wherein the amino acid sequence of the variant is amino acids 254-671 of any of SEQ ID NOs: 598 to 1194.

8. A SARS-CoV-2 nucleocapsid protein variant, wherein the amino acid sequence of the variant is amino acids 379-796 of any of SEQ ID NOs: 3203 to 3799.

9. A SARS-CoV-2 spike protein variant, wherein the amino acid sequence of the variant is amino acids 33-1230 of any of SEQ ID NOs: 1795 to 2394.

10. A SARS-CoV-2 spike protein variant, wherein the amino acid sequence of the variant is amino acids 33-705 of any of SEQ ID NOs: 4299 to 4791.

11. A SARS-CoV-2 spike protein receptor binding domain (RBD) variant, wherein the amino acid sequence of the variant is amino acids 33-236 of any of SEQ ID NOs: 2494 to 2592.

12. A SARS-CoV-2 nucleocapsid protein variant, wherein the amino acid sequence of the variant is any of SEQ ID NOs: 598 to 1194.

13. A SARS-CoV-2 nucleocapsid protein variant, wherein the amino acid sequence of the variant is any of SEQ ID NOs: 3202-3799.

14. A SARS-CoV-2 spike protein variant, wherein the amino acid sequence of the variant is any of SEQ ID NOs: 1795 to 2394.

15. A SARS-CoV-2 spike protein variant, wherein the amino acid sequence of the variant is any of SEQ ID NOs: 4299 to 4791.

16. A SARS-CoV-2 spike protein receptor binding domain (RBD) variant, wherein the amino acid sequence of the variant is any of SEQ ID NOs: 2494 to 2592.

17. A SARS-CoV-2 nucleocapsid protein variant, wherein the amino acid sequence of the variant comprises a span of at least 15 contiguous amino acids of amino acids 254-671 of any of SEQ ID NOs: 598 to 1194 or amino acids 379-796 of any of SEQ ID NOs: 3203 to 3799, and wherein the span comprises at least one variation from the corresponding span of a wild-type SARS-CoV-2 nucleocapsid protein.

18. A SARS-CoV-2 spike protein variant, wherein the amino acid sequence of the variant comprises a span of at least 15 contiguous amino acids of amino acids 33-1230 of any of SEQ ID NOs: 1795 to 2394 or amino acids 33-705 of any of SEQ ID NOs: 4299 to 4791, wherein the span comprises at least one variation from the corresponding span of a wild-type SARS-CoV-2 spike protein.

19. A SARS-CoV-2 spike protein receptor binding domain (RBD) variant, wherein the amino acid sequence of the variant comprises amino acids 33-236 of any of SEQ ID NOs: 2494 to 2592, and wherein the span comprises at least one variation from the corresponding span of a wild-type SARS-CoV-2 spike protein RBD domain.

20. A SARS-CoV-2 nucleocapsid protein variant, wherein the amino acid sequence of the variant has a substitution, insertion or deletion at one or more of: amino acids at positions 50, 53, 54, 55, 56, 57, 59, 62, 65, 68, 72, 74, 76, 79, 81, 86, 87, 90, 91, 94, 100, 101, 105, 107, 109, 111, 113, 114,115, 118, 120, 123, 125, 126, 127, 128, 130, 131, 134, 135, 136, 139, 140, 141, 144, 148, 150, 152, 154, 155, 157, 158, 159, 160, 161, 162, 163, 166, 167, 169, 170, 173, 188, 201, 202, 206, 250, 252, 254, 255, 257, 260, 264, 267, 268, 273, 274, 276, 280, 281, 282, 289, 290, 291, 292, 293, 294, 296, 297, 298, 299, 300, 304, 308, 311, 312, 316, 319, 321, 322, 323, 324, 325, 327, 329, 336, 338, 341, 342, 343, 347, 348, 351, 355, or 360, and a deletion of the amino acid at position 1, relative to the wild-type SARS-CoV-2 nucleocapsid protein amino acid sequence (SEQ ID NO: 2594).

21. A SARS-CoV-2 nucleocapsid protein variant, wherein the amino acid sequence of the variant has a substitution at one or more of: amino acids at positions 50, 53, 54, 55, 56, 57, 59, 62, 65, 68, 72, 74, 76, 79, 81, 86, 87, 90, 91, 94, 100, 101, 105, 107, 109, 111, 113, 114, 115, 118, 120, 123, 125, 126, 127, 128, 130, 131, 134, 135, 136, 139, 140, 141, 144, 148, 150, 152, 154, 155, 157, 158, 159, 160, 161, 162, 163, 166, 167, 169, 170, 173, 188, 201, 202, 206, 250, 252, 254, 255, 257, 260, 264, 267, 268, 273, 274, 276, 280, 281, 282, 289, 290, 291, 292, 293, 294, 296, 297, 298, 299, 300, 304, 308, 311, 312, 316, 319, 321, 322, 323, 324, 325, 327, 329, 336, 338, 341, 342, 343, 347, 348, 351, 355, or 360, and a deletion of the amino acid at position 1, relative to the wild-type SARS-CoV-2 nucleocapsid protein amino acid sequence (SEQ ID NO: 2594).

22. A SARS-CoV-2 nucleocapsid protein variant, wherein the amino acid sequence of the variant has a substitution, insertion or deletion at two or more of: amino acids at positions 50, 53, 54, 55, 56, 57, 59, 62, 65, 68, 72, 74, 76, 79, 81, 86, 87, 90, 91, 94, 100, 101, 105, 107, 109, 111, 113, 114, 115, 118, 120, 123, 125, 126, 127, 128, 130, 131, 134, 135, 136, 139, 140, 141, 144, 148, 150, 152, 154, 155, 157, 158, 159, 160, 161, 162, 163, 166, 167, 169, 170, 173, 188, 201, 202, 206, 250, 252, 254, 255, 257, 260, 264, 267, 268, 273, 274, 276, 280, 281, 282, 289, 290, 291, 292, 293, 294, 296, 297, 298, 299, 300, 304, 308, 311, 312, 316, 319, 321, 322, 323, 324, 325, 327, 329, 336, 338, 341, 342, 343, 347, 348, 351, 355, or 360, and a deletion of the amino acid at position 1, relative to the wild-type SARS-CoV-2 nucleocapsid protein amino acid sequence (SEQ ID NO: 2594).

23. A SARS-CoV-2 nucleocapsid protein variant, wherein the amino acid sequence of the variant has a substitution at two or more of: amino acids at positions 50, 53, 54, 55, 56, 57, 59, 62, 65, 68, 72, 74, 76, 79, 81, 86, 87, 90, 91, 94, 100, 101, 105, 107, 109, 111, 113, 114, 115, 118, 120, 123, 125, 126, 127, 128, 130, 131, 134, 135, 136, 139, 140, 141,144, 148, 150, 152, 154, 155, 157, 158, 159, 160, 161, 162, 163, 166, 167, 169, 170, 173, 188, 201, 202, 206, 250, 252, 254, 255, 257, 260, 264, 267, 268, 273, 274, 276, 280, 281, 282, 289, 290, 291, 292, 293, 294, 296, 297, 298, 299, 300, 304, 308, 311, 312, 316, 319, 321, 322, 323, 324, 325, 327, 329, 336, 338, 341, 342, 343, 347, 348, 351, 355, or 360, and a deletion of the amino acid at position 1, relative to the wild-type SARS-CoV-2 nucleocapsid protein amino acid sequence (SEQ ID NO: 2594).

24. A SARS-CoV-2 nucleocapsid protein variant, wherein the amino acid sequence of the variant has a substitution, insertion or deletion at three or more of: amino acids at positions 50, 53, 54, 55, 56, 57, 59, 62, 65, 68, 72, 74, 76, 79, 81, 86, 87, 90, 91, 94, 100, 101, 105, 107, 109, 111, 113, 114, 115, 118, 120, 123, 125, 126, 127, 128, 130, 131, 134, 135, 136, 139, 140, 141, 144, 148, 150, 152, 154, 155, 157, 158, 159, 160, 161, 162, 163, 166, 167, 169, 170, 173, 188, 201, 202, 206, 250, 252, 254, 255, 257, 260, 264, 267, 268, 273, 274, 276, 280, 281, 282, 289, 290, 291, 292, 293, 294, 296, 297, 298, 299, 300, 304, 308, 311, 312, 316, 319, 321, 322, 323, 324, 325, 327, 329, 336, 338, 341, 342, 343, 347, 348, 351, 355, or 360, and a deletion of the amino acid at position 1, relative to the wild-type SARS-CoV-2 nucleocapsid protein amino acid sequence (SEQ ID NO: 2594).

25. A SARS-CoV-2 nucleocapsid protein variant, wherein the amino acid sequence of the variant has a substitution at three or more of: amino acids at positions 50, 53, 54, 55, 56, 57, 59, 62, 65, 68, 72, 74, 76, 79, 81, 86, 87, 90, 91, 94, 100, 101, 105, 107, 109, 111, 113, 114, 115, 118, 120, 123, 125, 126, 127, 128, 130, 131, 134, 135, 136, 139, 140, 141, 144, 148, 150, 152, 154, 155, 157, 158, 159, 160, 161, 162, 163, 166, 167, 169, 170, 173, 188, 201, 202, 206, 250, 252, 254, 255, 257, 260, 264, 267, 268, 273, 274, 276, 280, 281, 282, 289, 290, 291, 292, 293, 294, 296, 297, 298, 299, 300, 304, 308, 311, 312, 316, 319, 321, 322, 323, 324, 325, 327, 329, 336, 338, 341, 342, 343, 347, 348, 351, 355, or 360, and a deletion of the amino acid at position 1, relative to the wild-type SARS-CoV-2 nucleocapsid protein amino acid sequence (SEQ ID NO: 2594).

26. A SARS-CoV-2 spike protein variant, wherein the amino acid sequence of the variant has a substitution, insertion or deletion at one or more of: amino acids at positions 32, 33, 41, 42, 46, 47, 50, 68, 71, 77, 78, 83, 84, 87, 90, 94, 95, 100, 101, 108, 112, 113, 114, 129, 132, 134, 135, 137, 138, 140, 141, 142, 153, 155, 157, 159, 171, 172, 173, 174, 175, 176, 177, 179, 180, 181, 187, 188, 202, 206, 207, 208, 222, 224, 226, 227, 228, 237, 241, 243, 245, 249, 259, 261, 262, 266, 271, 273, 276, 279, 280, 284, 292, 293, 297, 299, 302, 324, 325, 335, 339, 345, 352, 354, 356, 378, 399, 405, 417, 444, 461, 472, 477, 514, 529, 530, 537, 540, 541, 546, 547, 554, 556, 569, 570, 572, 573, 575, 580, 582, 586, 588, 598, 606, 607, 619, 622, 623, 626, 627, 630, 646, 655, 668, 682, 683, 684, 685, 688, 690, 693, 704, 706, 711, 713, 719, 723, 726, 727, 732, 734, 739, 747, 748, 750, 754, 761, 764, 768, 772, 774, 778, 779, 780, 788, 817, 826, 831, 834, 838, 839, 841, 844, 845, 855, 858, 859, 872, 875, 876, 878, 879, 882, 884, 895, 912, 921, 922, 929, 932, 933, 936, 937, 939, 940, 942, 943, 946, 953, 955, 960, 961, 977, 981, 982, 986, 987, 990, 991, 993, 1016, 1023, 1027, 1034, 1038, 1040, 1041, 1045, 1055, 1060, 1070, 1072, 1080, 1084, 1088, 1101, 1103, 1104, 1113, 1114, 1125, 1130, or 1133, and a deletion the of amino acids at positions 1 to 13, and a deletion of amino acids at positions 1212-1273, relative to the wild-type SARS-CoV-2 spike protein amino acid sequence (SEQ ID NO: 2596).

27. A SARS-CoV-2 spike protein variant, wherein the amino acid sequence of the variant has a substitution at one or more of: amino acids at positions 32, 33, 41, 42, 46, 47, 50, 68, 71, 77, 78, 83, 84, 87, 90, 94, 95, 100, 101, 108, 112, 113, 114, 129, 132, 134, 135, 137, 138, 140, 141, 142, 153, 155, 157, 159, 171, 172, 173, 174, 175, 176, 177, 179, 180, 181, 187, 188, 202, 206, 207, 208, 222, 224, 226, 227, 228, 237, 241, 243, 245, 249, 259, 261, 262, 266, 271, 273, 276, 279, 280, 284, 292, 293, 297, 299, 302, 324, 325, 335, 339, 345, 352, 354, 356, 378, 399, 405, 417, 444,461, 472, 477, 514, 529, 530, 537, 540, 541, 546, 547, 554, 556, 569, 570, 572, 573, 575, 580, 582, 586, 588, 598, 606, 607, 619, 622, 623, 626, 627, 630, 646, 655, 668, 682, 683, 684, 685, 688, 690, 693, 704, 706, 711, 713, 719, 723, 726, 727, 732, 734, 739, 747, 748, 750, 754, 761, 764, 768, 772, 774, 778, 779, 780, 788, 817, 826, 831, 834, 838, 839, 841, 844, 845, 855, 858, 859, 872, 875, 876, 878, 879, 882, 884, 895, 912, 921, 922, 929, 932, 933, 936, 937, 939, 940, 942, 943, 946, 953, 955, 960, 961, 977, 981, 982, 986, 987, 990, 991, 993, 1016, 1023, 1027, 1034, 1038, 1040, 1041, 1045, 1055, 1060, 1070, 1072, 1080, 1084, 1088, 1101, 1103, 1104, 1113, 1114, 1125, 1130, or 1133, and a deletion of the amino acids at positions 1 to 13, and a deletion of the amino acids at positions 1212-1273, relative to the wild-type SARS-CoV-2 spike protein amino acid sequence (SEQ ID NO: 2596).

28. A SARS-CoV-2 spike protein variant, wherein the amino acid sequence of the variant has a substitution, insertion or deletion at two or more of: amino acids at positions 32, 33, 41, 42, 46, 47, 50, 68, 71, 77, 78, 83, 84, 87, 90, 94, 95, 100, 101, 108, 112, 113, 114, 129, 132, 134, 135, 137, 138, 140, 141, 142, 153, 155, 157, 159, 171, 172, 173, 174, 175, 176, 177, 179, 180, 181, 187, 188, 202, 206, 207, 208, 222, 224, 226, 227, 228, 237, 241, 243, 245, 249, 259, 261, 262, 266, 271, 273, 276, 279, 280, 284, 292, 293, 297, 299, 302, 324, 325, 335, 339, 345, 352, 354, 356, 378, 399, 405, 417, 444, 461, 472, 477, 514, 529, 530, 537, 540, 541, 546, 547, 554, 556, 569, 570, 572, 573, 575, 580, 582, 586, 588, 598, 606, 607, 619, 622, 623, 626, 627, 630, 646, 655, 668, 682, 683, 684, 685, 688, 690, 693, 704, 706, 711, 713, 719, 723, 726, 727, 732, 734, 739, 747, 748, 750, 754, 761, 764, 768, 772, 774, 778, 779, 780, 788, 817, 826, 831, 834, 838, 839, 841, 844, 845, 855, 858, 859, 872, 875, 876, 878, 879, 882, 884, 895, 912, 921, 922, 929, 932, 933, 936, 937, 939, 940, 942, 943, 946, 953, 955, 960,961, 977, 981, 982, 986, 987, 990, 991, 993, 1016, 1023, 1027, 1034, 1038, 1040, 1041, 1045, 1055, 1060, 1070, 1072, 1080, 1084, 1088, 1101, 1103, 1104, 1113, 1114, 1125, 1130, or 1133, and a deletion of the amino acids at positions 1 to 13, and a deletion of the amino acids at positions 1212-1273, relative to the wild-type SARS-CoV-2 spike protein amino acid sequence (SEQ ID NO: 2596).

29. A SARS-CoV-2 spike protein variant, wherein the amino acid sequence of the variant has a substitution at two or more of: amino acids at positions 32, 33, 41, 42, 46, 47, 50, 68, 71, 77, 78, 83, 84, 87, 90, 94, 95, 100, 101, 108, 112, 113, 114, 129, 132, 134, 135, 137, 138, 140, 141, 142, 153, 155, 157, 159, 171, 172, 173, 174, 175, 176, 177, 179, 180, 181, 187, 188, 202, 206, 207, 208, 222, 224, 226, 227, 228, 237, 241, 243, 245, 249, 259, 261, 262, 266, 271, 273, 276, 279, 280, 284, 292, 293, 297, 299, 302, 324, 325, 335, 339, 345, 352, 354, 356, 378, 399, 405, 417, 444, 461, 472, 477, 514, 529, 530, 537, 540, 541, 546, 547, 554, 556, 569, 570, 572, 573, 575, 580, 582, 586, 588, 598, 606, 607, 619, 622, 623, 626, 627, 630, 646, 655, 668, 682, 683, 684, 685, 688, 690, 693, 704, 706, 711, 713, 719, 723, 726, 727, 732, 734, 739, 747, 748, 750, 754, 761, 764, 768, 772, 774, 778, 779, 780, 788, 817, 826, 831, 834, 838, 839, 841, 844, 845, 855, 858, 859, 872, 875, 876, 878, 879, 882, 884, 895, 912, 921, 922, 929, 932, 933, 936, 937, 939, 940, 942, 943, 946, 953, 955, 960, 961, 977, 981, 982, 986, 987, 990, 991, 993, 1016, 1023, 1027, 1034, 1038, 1040, 1041, 1045, 1055, 1060, 1070, 1072, 1080, 1084, 1088, 1101, 1103, 1104, 1113, 1114, 1125, 1130, or 1133, and a deletion of the amino acids at positions 1 to 13, and a deletion of the amino acids at positions 1212-1273, relative to the wild-type SARS-CoV-2 spike protein amino acid sequence (SEQ ID NO: 2596).

30. A SARS-CoV-2 spike protein variant, wherein the amino acid sequence of the variant has a substitution, insertion or deletion at three or more of: amino acids at positions 32, 33, 41, 42, 46, 47, 50, 68, 71, 77, 78, 83, 84, 87, 90, 94, 95, 100, 101, 108, 112, 113, 114, 129, 132, 134, 135, 137, 138, 140, 141, 142, 153, 155, 157, 159, 171, 172, 173, 174, 175, 176, 177, 179, 180, 181, 187, 188, 202, 206, 207, 208, 222, 224, 226, 227, 228, 237, 241, 243, 245, 249, 259, 261, 262, 266, 271, 273, 276, 279, 280, 284, 292, 293, 297, 299, 302, 324, 325, 335, 339, 345, 352, 354, 356, 378, 399, 405, 417, 444, 461, 472, 477, 514, 529, 530, 537, 540, 541, 546, 547, 554, 556, 569, 570, 572, 573, 575, 580, 582, 586, 588, 598, 606, 607, 619, 622, 623, 626, 627, 630, 646, 655, 668, 682, 683, 684, 685, 688, 690, 693, 704, 706, 711, 713, 719, 723, 726, 727, 732, 734, 739, 747, 748, 750, 754, 761, 764, 768, 772, 774, 778, 779, 780, 788, 817, 826, 831, 834, 838, 839, 841, 844, 845, 855, 858, 859, 872, 875, 876, 878, 879, 882, 884, 895, 912, 921, 922, 929, 932, 933, 936, 937, 939, 940, 942, 943, 946, 953, 955, 960, 961, 977, 981, 982, 986, 987, 990, 991, 993, 1016, 1023, 1027, 1034, 1038, 1040, 1041, 1045, 1055, 1060, 1070, 1072, 1080, 1084, 1088, 1101, 1103, 1104, 1113, 1114, 1125, 1130, or 1133, and a deletion of the amino acids at positions 1 to 13, and a deletion of the amino acids at positions 1212-1273, relative to the wild-type SARS-CoV-2 spike protein amino acid sequence (SEQ ID NO: 2596).

31. A SARS-CoV-2 spike protein variant, wherein the amino acid sequence of the variant has a substitution at three or more of: amino acids at positions 32, 33, 41, 42, 46, 47, 50, 68, 71, 77, 78, 83, 84, 87, 90, 94, 95, 100, 101, 108, 112, 113, 114, 129, 132, 134, 135, 137, 138, 140, 141, 142, 153, 155, 157, 159, 171, 172, 173, 174, 175, 176, 177, 179, 180, 181, 187, 188, 202, 206, 207, 208, 222, 224, 226, 227, 228, 237, 241, 243, 245, 249, 259, 261, 262, 266, 271, 273, 276, 279, 280, 284, 292, 293, 297, 299, 302, 324, 325, 335, 339, 345, 352, 354, 356, 378, 399, 405, 417, 444,461, 472, 477, 514, 529, 530, 537, 540, 541, 546, 547, 554, 556, 569, 570, 572, 573, 575, 580, 582, 586, 588, 598, 606, 607, 619, 622, 623, 626, 627, 630, 646, 655, 668, 682, 683, 684, 685, 688, 690, 693, 704, 706, 711, 713, 719, 723, 726, 727, 732, 734, 739, 747, 748, 750, 754, 761, 764, 768, 772, 774, 778, 779, 780, 788, 817, 826, 831, 834, 838, 839, 841, 844, 845, 855, 858, 859, 872, 875, 876, 878, 879, 882, 884, 895, 912, 921, 922, 929, 932, 933, 936, 937, 939, 940, 942, 943, 946, 953, 955, 960, 961, 977, 981, 982, 986, 987, 990, 991, 993, 1016, 1023, 1027, 1034, 1038, 1040, 1041, 1045, 1055, 1060, 1070, 1072, 1080, 1084, 1088, 1101, 1103, 1104, 1113, 1114, 1125, 1130, or 1133, and a deletion of the amino acids at positions 1 to 13, and a deletion of the amino acids at positions 1212-1273, relative to the wild-type SARS-CoV-2 spike protein amino acid sequence (SEQ ID NO: 2596).

32. A SARS-CoV-2 spike protein variant, wherein the amino acid sequence of the variant has a substitution, insertion or deletion at one or more of: amino acids at positions 36, 46, 47, 49, 50, 63, 64, 68, 70, 71, 81, 84, 92, 94, 95, 97, 98, 101, 108, 112, 115, 123, 125, 129, 132, 136, 138, 140, 146, 153, 155, 159, 161, 167, 171, 172, 177, 178, 184, 186, 187, 188, 192, 202, 205, 206, 207, 209, 213, 221, 222, 225, 226, 228, 236, 237, 239, 240, 241, 245, 249, 252, 257, 258, 260, 262, 264, 284, 292, 298, 299, 302, 316, 321, 324, 325, 329, 335, 338, 339, 344, 345, 350, 354, 356, 367, 368, 375, 377, 378, 379, 393, 399, 417, 419, 420, 424, 432, 439, 443, 445, 459, 460, 461, 464, 467, 470, 472, 475, 477, 480, 482, 484, 487, 488, 489, 490, 496, 501, 503, 504, 505, 514, 517, 518, 519, 522, 526, 528, 530, 534, 537, 546, 551, 557, 566, 567, 568, 569, 571, 573, 574, 582, 585, 588, 592, 595, 596, 601, 603, 608, 621, 622, 623, 624, 625, 627, 630, 635, 636, 637, 642, 651, 653, 655, 666, 668, 673, 678, 682, 683, and/or 685, and a deletion of amino acids positions at 1 to 13, and a deletion of amino acids at positions 687-1273, relative to the wild-type spike protein amino acid sequence (SEQ ID NO: 2596).

33. A SARS-CoV-2 spike protein variant, wherein the amino acid sequence of the variant has a substitution at one or more of: amino acids at positions 36, 46, 47, 49, 50, 63, 64, 68, 70, 71, 81, 84, 92, 94, 95, 97, 98, 101, 108, 112, 115, 123, 125, 129, 132, 136, 138, 140, 146, 153, 155, 159, 161, 167, 171, 172, 177, 178, 184, 186, 187, 188, 192, 202, 205, 206, 207, 209, 213, 221, 222, 225, 226, 228, 236, 237, 239, 240, 241, 245, 249, 252, 257, 258, 260, 262, 264, 284, 292, 298, 299, 302, 316, 321, 324, 325, 329, 335, 338, 339, 344, 345, 350, 354, 356, 367, 368, 375, 377, 378, 379, 393, 399, 417, 419, 420, 424, 432, 439, 443, 445, 459, 460, 461, 464, 467, 470, 472, 475, 477, 480, 482, 484, 487, 488, 489, 490, 496, 501, 503, 504, 505, 514, 517, 518, 519, 522, 526, 528, 530, 534, 537, 546, 551, 557, 566, 567, 568, 569, 571, 573, 574, 582, 585, 588, 592, 595, 596, 601, 603, 608, 621, 622, 623, 624, 625, 627, 630, 635, 636, 637, 642, 651, 653, 655, 666, 668, 673, 678, 682, 683, and/or 685, and a deletion of amino acids positions at 1 to 13, and a deletion of amino acids at positions 687-1273, relative to the wild-type spike protein amino acid sequence (SEQ ID NO: 2596).

34. A SARS-CoV-2 spike protein variant, wherein the amino acid sequence of the variant has a substitution, insertion or deletion at two or more of: amino acids at positions 36, 46, 47, 49, 50, 63, 64, 68, 70, 71, 81, 84, 92, 94, 95, 97, 98, 101, 108, 112, 115, 123, 125, 129, 132, 136, 138, 140, 146, 153, 155, 159, 161, 167, 171, 172, 177, 178, 184, 186, 187, 188, 192, 202, 205, 206, 207, 209, 213, 221, 222, 225, 226, 228, 236, 237, 239, 240, 241, 245, 249, 252, 257, 258, 260, 262, 264,284, 292, 298, 299, 302, 316, 321, 324, 325, 329, 335, 338, 339, 344, 345, 350, 354, 356, 367, 368, 375, 377, 378, 379, 393, 399, 417, 419, 420, 424, 432, 439, 443, 445, 459, 460, 461, 464, 467, 470, 472, 475, 477, 480, 482, 484, 487, 488, 489, 490, 496, 501, 503, 504, 505, 514, 517, 518, 519, 522, 526, 528, 530, 534, 537, 546, 551, 557, 566, 567, 568, 569, 571, 573, 574, 582, 585, 588, 592, 595, 596, 601, 603, 608, 621, 622, 623, 624, 625, 627, 630, 635, 636, 637, 642, 651, 653, 655, 666, 668, 673, 678, 682, 683, and/or 685, and a deletion of amino acids positions at 1 to 13, and a deletion of amino acids at positions 687-1273, relative to the wild-type spike protein amino acid sequence (SEQ ID NO: 2596).

35. A SARS-CoV-2 spike protein variant, wherein the amino acid sequence of the variant has a substitution at two or more of: amino acids at positions 36, 46, 47, 49, 50, 63, 64, 68, 70, 71, 81, 84, 92, 94, 95, 97, 98, 101, 108, 112, 115, 123, 125, 129, 132, 136, 138, 140, 146, 153, 155, 159, 161, 167, 171, 172, 177, 178, 184, 186, 187, 188, 192, 202, 205, 206, 207, 209, 213, 221, 222, 225, 226, 228, 236, 237, 239, 240, 241, 245, 249, 252, 257, 258, 260, 262, 264, 284, 292, 298, 299, 302, 316, 321, 324, 325, 329, 335, 338, 339, 344, 345, 350, 354, 356, 367, 368, 375, 377, 378, 379, 393, 399, 417, 419,420, 424, 432, 439, 443, 445, 459, 460, 461, 464, 467, 470, 472, 475, 477, 480, 482, 484, 487, 488, 489, 490, 496, 501, 503, 504, 505, 514, 517, 518, 519, 522, 526, 528, 530, 534, 537, 546, 551, 557, 566, 567, 568, 569, 571, 573, 574, 582, 585, 588, 592, 595, 596, 601, 603, 608, 621, 622, 623, 624, 625, 627, 630, 635, 636, 637, 642, 651, 653, 655, 666, 668, 673, 678, 682, 683, and/or 685, and a deletion of amino acids positions at 1 to 13, and a deletion of amino acids at positions 687-1273, relative to the wild-type spike protein amino acid sequence (SEQ ID NO: 25%).

36. A SARS-CoV-2 spike protein variant, wherein the amino acid sequence of the variant has a substitution, insertion or deletion at three or more of: amino acids at positions 36, 46, 47, 49, 50, 63, 64, 68, 70, 71, 81, 84, 92, 94, 95, 97, 98, 101, 108, 112, 115, 123, 125, 129, 132, 136, 138, 140, 146, 153, 155, 159, 161, 167, 171, 172, 177, 178, 184, 186, 187, 188, 192, 202, 205, 206, 207, 209, 213, 221, 222, 225, 226, 228, 236, 237, 239, 240, 241, 245, 249, 252, 257, 258, 260, 262, 264, 284, 292, 298, 299, 302, 316, 321, 324, 325, 329, 335, 338, 339, 344, 345, 350, 354, 356, 367, 368, 375, 377, 378, 379, 393, 399, 417, 419, 420, 424, 432, 439, 443, 445, 459, 460, 461, 464, 467, 470, 472, 475, 477, 480, 482, 484, 487, 488, 489, 490, 496, 501, 503, 504, 505, 514, 517, 518, 519, 522, 526, 528, 530, 534, 537, 546, 551, 557, 566, 567, 568, 569, 571, 573, 574, 582, 585, 588, 592, 595, 596, 601, 603, 608, 621, 622, 623, 624, 625, 627, 630, 635, 636, 637, 642, 651, 653, 655, 666, 668, 673, 678, 682, 683, and/or 685, and a deletion of amino acids positions at 1 to 13, and a deletion of amino acids at positions 687-1273, relative to the wild-type spike protein amino acid sequence (SEQ ID NO: 25%).

37. A SARS-CoV-2 spike protein variant, wherein the amino acid sequence of the variant has a substitution at three or more of: amino acids at positions 36, 46, 47, 49, 50, 63, 64, 68, 70, 71, 81, 84, 92, 94, 95, 97, 98, 101, 108, 112, 115, 123, 125, 129, 132, 136, 138, 140, 146, 153, 155, 159, 161, 167, 171, 172, 177, 178, 184, 186, 187, 188, 192, 202, 205, 206, 207, 209, 213, 221, 222, 225, 226, 228, 236, 237, 239, 240, 241, 245, 249, 252, 257, 258, 260, 262, 264, 284, 292, 298, 299, 302, 316, 321, 324, 325, 329, 335, 338, 339, 344, 345, 350, 354, 356, 367, 368, 375, 377, 378, 379, 393, 399,417, 419, 420, 424, 432, 439, 443, 445, 459, 460, 461, 464, 467, 470, 472, 475, 477, 480, 482, 484, 487, 488, 489, 490, 496, 501, 503,504, 505, 514, 517, 518, 519, 522, 526, 528, 530, 534, 537, 546, 551, 557, 566, 567, 568, 569, 571, 573, 574, 582, 585, 588, 592, 595, 596, 601, 603, 608, 621, 622, 623, 624, 625, 627, 630, 635, 636, 637, 642, 651, 653, 655, 666, 668, 673, 678, 682, 683, and/or 685, and a deletion of amino acids positions at 1 to 13, and a deletion of amino acids at positions 687-1273, relative to the wild-type spike protein amino acid sequence (SEQ ID NO: 25%).

38. A SARS-CoV-2 spike protein variant, wherein the amino acid sequence of the variant has a substitution, insertion or deletion at one or more of: amino acids at positions 115, 200, 370, 372, 375, 376 and/or 415 and a deletion of amino acids positions at 1 to 13, and a deletion of amino acids at positions 687-1273, relative to the wild-type spike protein amino acid sequence (SEQ ID NO: 2596).

39. A SARS-CoV-2 spike protein variant, wherein the amino acid sequence of the variant has a substitution at one or more of amino acids at positions 115, 200, 370, 372, 375, 376 and/or 415, and a deletion of amino acids positions at 1 to 13, and a deletion of amino acids at positions 687-1273, relative to the wild-type spike protein amino acid sequence (SEQ ID NO: 2596).

40. A SARS-CoV-2 spike protein variant, wherein the amino acid sequence of the variant has a substitution, insertion or deletion at two or more of: amino acids at positions 115, 200, 370, 372, 375, 376 and/or 415, and a deletion of amino acids positions at 1 to 13, and a deletion of amino acids at positions 687-1273, relative to the wild-type spike protein amino acid sequence (SEQ ID NO: 2596).

41. A SARS-CoV-2 spike protein variant, wherein the amino acid sequence of the variant has a substitution at two or more of: amino acids at positions 115, 200, 370, 372, 375, 376 and/or 415, and a deletion of amino acids positions at 1 to 13, and a deletion of amino acids at positions 687-1273, relative to the wild-type spike protein amino acid sequence (SEQ ID NO: 2596).

42. A SARS-CoV-2 spike protein variant, wherein the amino acid sequence of the variant has a substitution, insertion or deletion at three or more of: amino acids at positions 115, 200, 370, 372, 375, 376 and/or 415, and a deletion of amino acids positions at 1 to 13, and a deletion of amino acids at positions 687-1273, relative to the wild-type spike protein amino acid sequence (SEQ ID NO: 2596).

43. A SARS-CoV-2 spike protein variant, wherein the amino acid sequence of the variant has a substitution at three or more of: amino acids at positions 115, 200, 370, 372, 375, 376 and/or 415, and a deletion of amino acids positions at 1 to 13, and a deletion of amino acids at positions 687-1273, relative to the wild-type spike protein amino acid sequence (SEQ ID NO: 2596).

44. A SARS-CoV-2 spike protein variant, wherein the amino acid sequence of the variant has a substitution, insertion or deletion at one or more of: amino acids at positions 41, 115, 226, 282, 319, 330, 331, 332, 338, 341, 348, 349, 351, 352, 353, 357, 358, 359, 360, 362, 363, 364, 365, 366, 367, 369, 370, 371, 372, 373, 375, 376, 385, 388, 389, 390, 393, 399, 401, 407, 408, 409, 410, 417, 418, 419, 422, 424, 438, 439, 440, 443, 445, 461, 462, 464, 465, 466,467, 469, 470, 471, 472, 477, 478, 479, 480, 481, 482, 488, 491, 496, 512, 514, 518, 519, 520, 522, 528, 546, 558, 569, 588, 591, 697, 701, 702, 704, 705, 711, 787, 869, 890, 895, 899, 904, 963, 964, 968, 969, 978, 979, 984, 985, 988, 1030, 1040, 1041, 1045, 1047, 1072, 1144, and/or 1145 and a deletion of amino acids positions at 1 to 13, and a deletion of amino acids at positions 1212 to 1273, relative to the wild-type spike protein amino acid sequence (SEQ ID NO: 2596).

45. A SARS-CoV-2 spike protein variant, wherein the amino acid sequence of the variant has a substitution at one or more of: amino acids at positions 41, 115, 226, 282, 319, 330, 331, 332, 338, 341, 348, 349, 351, 352, 353, 357, 358, 359, 360, 362, 363, 364, 365, 366, 367, 369, 370, 371, 372, 373, 375, 376, 385, 388, 389, 390, 393, 399, 401, 407, 408, 409, 410, 417, 418, 419, 422, 424, 438, 439, 440, 443, 445, 461, 462, 464, 465, 466, 467, 469, 470, 471, 472, 477, 478, 479, 480, 481, 482, 488, 491, 496, 512, 514, 518, 519, 520, 522, 528, 546, 558, 569, 588, 591, 697, 701, 702, 704, 705, 711, 787, 869, 890, 895, 899, 904, 963, 964, 968, 969, 978, 979, 984, 985, 988, 1030, 1040, 1041, 1045, 1047, 1072, 1144, and/or 1145 and a deletion of amino acids positions at 1 to 13, and a deletion of amino acids at positions 1212 to 1273, relative to the wild-type spike protein amino acid sequence (SEQ ID NO: 2596).

46. A SARS-CoV-2 spike protein variant, wherein the amino acid sequence of the variant has a substitution, insertion or deletion at two or more of: amino acids at positions 41, 115, 226, 282, 319, 330, 331, 332, 338, 341, 348, 349, 351, 352, 353, 357, 358, 359, 360, 362, 363, 364, 365, 366, 367, 369, 370, 371, 372, 373, 375, 376, 385, 388, 389, 390, 393, 399, 401, 407, 408, 409, 410, 417, 418, 419, 422, 424, 438, 439, 440, 443, 445, 461, 462, 464, 465, 466,467, 469, 470, 471, 472, 477, 478, 479, 480, 481, 482, 488, 491, 496, 512, 514, 518, 519, 520, 522, 528, 546, 558, 569, 588, 591, 697, 701, 702, 704, 705, 711, 787, 869, 890, 895, 899, 904, 963, 964, 968, 969, 978, 979, 984, 985, 988, 1030, 1040, 1041, 1045, 1047, 1072, 1144, and/or 1145 and a deletion of amino acids positions at 1 to 13, and a deletion of amino acids at positions 1212 to 1273, relative to the wild-type spike protein amino acid sequence (SEQ ID NO: 2596).

47. A SARS-CoV-2 spike protein variant, wherein the amino acid sequence of the variant has a substitution at two or more of: amino acids at positions 41, 115, 226, 282, 319, 330, 331, 332, 338, 341, 348, 349, 351, 352, 353, 357, 358, 359, 360, 362, 363, 364, 365, 366, 367, 369, 370, 371, 372, 373, 375, 376, 385, 388, 389, 390, 393, 399,401, 407, 408, 409, 410, 417, 418, 419, 422, 424, 438, 439, 440, 443, 445, 461, 462, 464, 465, 466, 467, 469, 470, 471, 472, 477, 478, 479, 480, 481, 482, 488, 491, 496, 512, 514, 518, 519, 520, 522, 528, 546, 558, 569, 588, 591, 697, 701, 702, 704, 705, 711, 787, 869, 890, 895, 899, 904, 963, 964, 968, 969, 978, 979, 984, 985, 988, 1030, 1040, 1041, 1045, 1047, 1072, 1144, and/or 1145 and a deletion of amino acids positions at 1 to 13, and a deletion of amino acids at positions 1212 to 1273, relative to the wild-type spike protein amino acid sequence (SEQ ID NO: 2596).

48. A SARS-CoV-2 spike protein variant, wherein the amino acid sequence of the variant has a substitution, insertion or deletion at three or more of: amino acids at positions 41, 115, 226, 282, 319, 330, 331, 332, 338, 341, 348, 349, 351, 352, 353, 357, 358, 359, 360, 362, 363, 364, 365, 366, 367, 369, 370, 371, 372, 373, 375, 376, 385, 388, 389, 390, 393, 399, 401, 407, 408, 409, 410, 417, 418, 419, 422, 424, 438, 439, 440, 443, 445, 461, 462, 464, 465, 466, 467, 469, 470, 471, 472, 477, 478, 479, 480, 481, 482, 488, 491, 496, 512, 514, 518, 519, 520, 522, 528, 546, 558, 569, 588, 591, 697, 701, 702, 704,705, 711, 787, 869, 890, 895, 899, 904, 963, 964, 968, 969, 978, 979, 984, 985, 988, 1030, 1040, 1041, 1045, 1047, 1072, 1144, and/or 1145 and a deletion of amino acids positions at 1 to 13, and a deletion of amino acids at positions 1212 to 1273, relative to the wild-type spike protein amino acid sequence (SEQ ID NO: 2596).

49. A SARS-CoV-2 spike protein variant, wherein the amino acid sequence of the variant has a substitution at three or more of: amino acids at positions 41, 115, 226, 282, 319, 330, 331, 332, 338, 341, 348, 349, 351, 352, 353, 357, 358, 359, 360, 362, 363, 364, 365, 366, 367, 369, 370, 371, 372, 373, 375, 376, 385, 388, 389, 390, 393, 399, 401, 407, 408, 409, 410, 417, 418, 419, 422, 424, 438, 439, 440, 443, 445, 461, 462, 464, 465, 466, 467, 469, 470, 471, 472, 477, 478, 479, 480, 481, 482, 488,491, 496, 512, 514, 518, 519, 520, 522, 528, 546, 558, 569, 588, 591, 697, 701, 702, 704, 705, 711, 787, 869, 890, 895, 899, 904, 963, 964, 968, 969, 978, 979, 984, 985, 988, 1030, 1040, 1041, 1045, 1047, 1072, 1144, and/or 1145 and a deletion of amino acids positions at 1 to 13, and a deletion of amino acids at positions 1212 to 1273, relative to the wild-type spike protein amino acid sequence (SEQ ID NO: 2596).

50. A SARS-CoV-2 spike protein receptor binding domain (RBD) variant, wherein the amino acid sequence of the variant has a substitution, insertion or deletion at one or more of: amino acids at positions 335, 339, 340, 356, 357, 362, 366, 368, 372, 393, 394, 399, 402, 403, 404,405, 406, 410, 414, 417, 438, 439, 450, 477, 478, 483, 484, 486, 489, 490, 501, 502, or 504, and a deletion of the amino acids at positions 1 to 327 and a deletion of the amino acids at positions 532 to 1273, relative to the wild-type SARS-CoV-2 spike protein amino acid sequence (SEQ ID NO: 2596).

51. A SARS-CoV-2 spike protein receptor binding domain (RBD) variant, wherein the amino acid sequence of the variant has a substitution at one or more of: amino acids at positions 335, 339, 340, 356, 357, 362, 366, 368, 372, 393, 394, 399, 402, 403, 404, 405, 406, 410, 414, 417, 438, 439, 450, 477, 478, 483, 484, 486, 489, 490, 501, 502, or 504, and a deletion of the amino acids at positions 1 to 327 and a deletion of the amino acids at positions 532 to 1273, relative to the wild-type SARS-CoV-2 spike protein amino acid sequence (SEQ ID NO: 2596).

52. A SARS-CoV-2 spike protein receptor binding domain (RBD) variant, wherein the amino acid sequence of the variant has a substitution, insertion or deletion at two or more of: amino acids at positions 335, 339, 340, 356, 357, 362, 366, 368, 372, 393, 394, 399, 402, 403, 404, 405, 406, 410, 414, 417, 438, 439, 450, 477, 478, 483, 484, 486, 489, 490, 501, 502, or 504, and a deletion of the amino acid at positions 1 to 327 and a deletion of the amino acids at positions 532 to 1273, relative to the wild-type SARS-CoV-2 spike protein amino acid sequence (SEQ ID NO: 2596).

53. A SARS-CoV-2 spike protein receptor binding domain (RBD) variant, wherein the amino acid sequence of the variant has a substitution at two or more of: amino acids at positions 335, 339, 340, 356, 357, 362, 366, 368, 372, 393, 394, 399, 402, 403, 404, 405, 406, 410, 414, 417, 438, 439, 450, 477, 478, 483, 484, 486, 489, 490, 501, 502, or 504, and a deletion of the amino acids at positions 1 to 327 and a deletion of the amino acids at positions 532 to 1273, relative to the wild-type SARS-CoV-2 spike protein amino acid sequence (SEQ ID NO: 2596).

54. A SARS-CoV-2 spike protein receptor binding domain (RBD) variant, wherein the amino acid sequence of the variant has a substitution, insertion or deletion at three or more of: amino acids at positions 335, 339, 340, 356, 357, 362, 366, 368, 372, 393, 394, 399, 402, 403, 404, 405, 406, 410, 414, 417, 438, 439, 450, 477, 478, 483, 484, 486, 489, 490, 501, 502, or 504, and a deletion of the amino acids at positions 1 to 327 and a deletion of the amino acids at positions 532 to 1273, relative to the wild-type SARS-CoV-2 spike protein amino acid sequence (SEQ ID NO: 2596).

55. A SARS-CoV-2 spike protein receptor binding domain (RBD) variant, wherein the amino acid sequence of the variant has a substitution at three or more of: amino acids at positions 335, 339, 340, 356, 357, 362, 366, 368, 372, 393, 394, 399, 402, 403, 404, 405, 406, 410, 414, 417, 438, 439, 450, 477, 478, 483, 484, 486, 489, 490, 501, 502, or 504, and a deletion of the amino acids at positions 1 to 327 and a deletion of the amino acids at positions 532 to 1273, relative to the wild-type SARS-CoV-2 spike protein amino acid sequence (SEQ ID NO: 2596).

56. A SARS-CoV-2 spike protein receptor binding domain (RBD) variant, wherein the amino acid sequence of the variant has a substitution, insertion or deletion at one or more of: amino acids at positions 330, 331, 332, 338, 341, 348, 349, 351, 352, 353, 358, 362, 363, 364, 365, 366, 367, 370, 371, 373, 376, 384, 391, 392, 393, 394, 395, 399, 401, 406, 407, 408, 409, 418, 419, 422, 424, 434, 439, 440, 443, 445, 453, 456, 461, 462, 464, 465, 466, 467, 469,470, 471, 472, 479, 480, 481, 482, 488, 491,496, 504, 508, 512, 514, 518, 519 and/or 520 and a deletion of amino acids at positions 1 to 327 and a deletion of amino acids at positions 532-1273, relative to the wild-type spike protein amino acid sequence (SEQ ID NO: 2596).

57. A SARS-CoV-2 spike protein receptor binding domain (RBD) variant, wherein the amino acid sequence of the variant has a substitution at one or more of: amino acids at positions 330, 331, 332, 338, 341, 348, 349, 351, 352, 353, 358, 362, 363, 364, 365, 366, 367, 370, 371, 373, 376, 384, 391, 392, 393, 394, 395, 399, 401, 406, 407, 408, 409, 418, 419, 422, 424, 434, 439, 440, 443, 445, 453, 456, 461, 462, 464, 465, 466, 467, 469, 470, 471, 472, 479, 480, 481, 482, 488, 491, 496, 504, 508, 512, 514, 518, 519 and/or 520 and a deletion of amino acids at positions 1 to 327 and a deletion of amino acids at positions 532-1273, relative to the wild-type spike protein amino acid sequence (SEQ ID NO: 2596).

58. A SARS-CoV-2 spike protein receptor binding domain (RBD) variant, wherein the amino acid sequence of the variant has a substitution, insertion or deletion at two or more of: amino acids at positions 330, 331, 332, 338, 341, 348, 349, 351, 352, 353, 358, 362, 363, 364, 365, 366, 367, 370, 371, 373, 376, 384, 391, 392, 393, 394, 395, 399, 401, 406, 407, 408, 409, 418, 419, 422, 424, 434, 439, 440, 443, 445, 453, 456, 461, 462, 464, 465, 466, 467, 469, 470, 471, 472, 479, 480, 481, 482, 488, 491, 496, 504, 508, 512, 514, 518, 519 and/or 520 and a deletion of amino acids at positions 1 to 327 and a deletion of amino acids at positions 532-1273, relative to the wild-type spike protein amino acid sequence (SEQ ID NO: 2596).

59. A SARS-CoV-2 spike protein receptor binding domain (RBD) variant, wherein the amino acid sequence of the variant has a substitution at two or more of: amino acids at positions 330, 331, 332, 338, 341, 348, 349, 351, 352, 353, 358, 362, 363, 364, 365, 366, 367, 370, 371, 373, 376, 384, 391, 392, 393, 394, 395, 399, 401, 406,407, 408, 409, 418, 419, 422, 424, 434, 439, 440, 443, 445, 453, 456, 461, 462, 464, 465, 466, 467, 469, 470, 471, 472, 479, 480, 481, 482, 488, 491, 496, 504, 508, 512, 514, 518, 519 and/or 520 and a deletion of amino acids at positions 1 to 327 and a deletion of amino acids at positions 532-1273, relative to the wild-type spike protein amino acid sequence (SEQ ID NO: 2596).

60. A SARS-CoV-2 spike protein receptor binding domain (RBD) variant, wherein the amino acid sequence of the variant has a substitution, insertion or deletion at three or more of: amino acids at positions 330, 331, 332, 338, 341, 348, 349, 351, 352, 353, 358, 362, 363, 364, 365, 366, 367, 370, 371, 373, 376, 384, 391, 392, 393, 394, 395, 399, 401, 406, 407, 408, 409, 418, 419, 422, 424, 434, 439, 440, 443, 445, 453, 456, 461, 462, 464, 465, 466, 467, 469, 470, 471, 472, 479, 480, 481, 482, 488, 491, 496, 504, 508, 512, 514, 518, 519 and/or 520 and a deletion of amino acids at positions 1 to 327 and a deletion of amino acids at positions 532-1273, relative to the wild-type spike protein amino acid sequence (SEQ ID NO: 2596).

61. A SARS-CoV-2 spike protein receptor binding domain (RBD) variant, wherein the amino acid sequence of the variant has a substitution at three or more of amino acids at positions 330, 331, 332, 338, 341, 348, 349, 351, 352, 353, 358, 362, 363, 364, 365, 366, 367, 370, 371, 373, 376, 384, 391, 392, 393, 394, 395, 399, 401, 406, 407, 408, 409, 418, 419, 422, 424, 434, 439, 440, 443, 445, 453, 456, 461, 462, 464, 465, 466, 467, 469, 470, 471, 472, 479, 480, 481, 482, 488, 491, 496, 504, 508, 512, 514, 518, 519 and/or 520 and a deletion of amino acids at positions 1 to 327 and a deletion of amino acids at positions 532-1273, relative to the wild-type spike protein amino acid sequence (SEQ ID NO: 2596).

62. A SARS-CoV-2 nucleocapsid protein variant comprising amino acids 254-671 of an amino acid sequence set forth in SEQ ID NOs: 598 to 1194 or 3203 to 3799.

63. A SARS-CoV-2 spike protein variant comprising amino acids 33-1230 of an amino acid sequence set forth in SEQ ID NOs: 1795 to 2394 or 4299 to 4791.

64. A SARS-CoV-2 spike protein receptor binding domain (RBD) variant comprising amino acids 33-236 of an amino acid sequence set forth in 2494 to 2592.

65. A composition comprising the variant of any of the preceding claims.

66. The composition of claim 65, wherein the variant is immobilized on a solid support.

67. The composition of claim 65, wherein the composition is a vaccine composition.

68. The composition of claim 67, further comprising a pharmaceutically acceptable carrier.

69. The composition of claim 67 or 68, further comprising an adjuvant.

70. A nucleic acid encoding the variant of any one of claims 1 to 64.

71. The nucleic acid of claim 70, wherein the nucleic acid has a sequence comprising any of SEQ ID NOs: 1 to 597 or SEQ ID NOs. 2606 to 3202, or the complementary sequence thereof.

72. The nucleic acid of claim 70, wherein the nucleic acid has a sequence comprising any of SEQ ID NOs: 1195 to 1794 or SEQ ID NOs. 3806 to 4298, or the complementary sequence thereof.

73. The nucleic acid of claim 70, wherein the nucleic acid has a sequence comprising any of SEQ ID NOs: 2395 to 2493, or the complementary sequence thereof.

74. The nucleic acid of any one of claims 70 to 73, wherein the nucleic acid comprises DNA.

75. The nucleic acid of any one of claims 70 to 73, wherein the nucleic acid comprises RNA.

76. The nucleic acid of claim 75, wherein the nucleic acid is an mRNA molecule.

77. A composition comprising the nucleic acid of any one of claims 70 to 73.

78. The composition of claim 77, wherein the composition is a vaccine composition.

79. The composition of claim 78, further comprising a pharmaceutically acceptable carrier.

80. The composition of claim 78 or 79, further comprising an adjuvant.

81. A vector comprising the nucleic acid of any one of claims 70 to 73.

82. The vector of claim 81, wherein the vector is an expression vector.

83. A composition comprising the vector of claim 81 or claim 82.

84. The composition of claim 83, wherein the composition is a vaccine composition.

85. The composition of claim 83, further comprising a pharmaceutically acceptable carrier.

86. The composition of claim 83 or 84, further comprising an adjuvant.

87. A cell comprising the nucleic acid of any one of claims 70 to 76.

88. The cell of claim 87, wherein the cell expresses the variant encoded by the nucleic acid.

89. The cell of claim 87 or 88, wherein the cell is a prokaryotic cell.

90. The cell of claim 87, wherein the cell is a bacterial cell.

91. The cell of claim 90, wherein the cell is an E. coli cell.

92. The cell of claim 87 or 88, wherein the cell is a eukaryotic cell.

93. The cell of claim 92, wherein the cell is a yeast cell.

94. The cell of claim 93, wherein the cell is a Saccharomyces cerevisiae cell.

95. The cell of claim 87, wherein the cell is a mammalian cell.

96. The cell of claim 95, wherein the cell is a human cell.

97. A diagnostic test kit comprising a variant of any one of claims 1 to 64, wherein the variant is a SARS-CoV-2 nucleocapsid protein variant, and wherein the kit further comprises a reagent capable of detecting an immunological complex which comprises an antibody bound to the variant.

98. A diagnostic test kit comprising a variant of any one of claims 1 to 64, wherein the variant is a SARS-CoV-2 spike protein variant, and wherein the kit further comprises a reagent capable of detecting an immunological complex which comprises an antibody bound to the variant.

99. A diagnostic test kit comprising a variant of any one of claims 1 to 64, wherein the variant is a SARS-CoV-2 spike protein receptor binding domain (RBD) variant, and wherein the kit further comprises a reagent capable of detecting an immunological complex which comprises an antibody bound to the variant.

100. A diagnostic test kit comprising at least two of the variants of any one of claim 1 to 64, wherein the two variants are selected from a SARS-CoV-2 nucleocapsid protein variant; a SARS-CoV-2 spike protein variant; and a SARS-CoV-2 spike protein receptor binding domain (RBD) variant.

101. The diagnostic test kit of claim 100 wherein the kit further comprises a reagent capable of detecting an immunological complex which comprises an antibody bound to the variant.

102. The diagnostic test kit of any one of claims 97 to 101, wherein the kit comprises one or more control standards and/or a specimen diluent and/or washing buffer.

103. The diagnostic test kit of any one of claims 97 to 102, wherein the variant is immobilized on a solid support.

104. The diagnostic test kit of any one of claims 97 to 103, wherein the variant is immobilized on a solid support, wherein the solid support is a microplate well.

105. The diagnostic test kit of any one of claims 97 to 104, wherein the immunological complex is detected by ELISA.

106. The diagnostic test kit of any one of claims 97 to 104, wherein the immunological complex is detected by lateral flow.

107. A method of determining whether a subject is infected with SARS-CoV-2, the method comprising:
a) contacting a sample from the subject with any one of the protein variants of any one of claims 1 to 64, and
b) detecting binding of the protein variant with a SARS-CoV-2 antibody present in the sample.

108. The method of claim 107, wherein the biological sample is a serum sample.

109. The method of claim 107 or 108, wherein the protein variant is immobilized on a solid support.

110. The method of claim 109, wherein the solid support is a microplate well and/or a flow cell.

111. The method of any of claims 107 to 110, wherein the immunological complex is detected by ELISA.

112. The method of any of claims 107 to 110, wherein the immunological complex is detected by lateral flow.

113. A method of treating and/or preventing a SARS-CoV-2 infection in a subject comprising administering to the subject a composition according to any one of claims 83 to 86.

114. The method of claim 113, wherein the composition is administered intravenously.

115. The method of claim 113 or 114, comprising administering one dose of the composition.

116. The method of claim 113 or 114, comprising administering multiple doses of the composition.

The application's sequence listing, which the Patent Office published only in electronic form, follows.

SEQUENCE LISTING (6256 sequences)

SEQ ID NO: 1 - DNA, 2016 bp, Artificial Sequence
  Description of Artificial Sequence: Synthetic polynucleotide
atgcaccatcatcaccatcatggtggttctggttcgccgatacttggttattggaagattaaaggactggttcagcccacacgcctcctgctagaatacttagaggaaaaatatgaagagcacctgtacgaacgtgatgagggggacaaatggcgaaacaagaaatttgaattgggcttagaatttccaaatttgccgtattatatcgatggcgacgtaaaactgacccaatcaatggccattattcgctacatcgcagataaacataacatgctgggtggctgccctaaagaacgggctgagatctccatgctggaaggtgcggtgctcgacattcgctacggcgtcagtagaattgcgtatagcaaggatttcgaaactttaaaagtggatttcctgagcaaacttccggagatgctgaaaatgtttgaggataggctttgtcataagacgtatctcaatggtgatcatgttacccacccggactttatgctgtacgacgcccttgatgtcgttctgtatatggatcccatgtgcctggacgccttcccgaaattagtgtgttttaaaaaacgtatcgaagcgattccacagatcgataaatacttgaagtcttctaaatatattgcttggcctctgcaaggctggcaggcaacgttcggtgggggagatcatccgccaaaatcagatctggtgccgcgtgggagccctggcatacaccgcgacggtggttctggtgagaacctgtactttcaaagctcagataatgggcctcaaaaccagcgcaacgctccacgtataaccttcggtggcccgtctgactccacaggcagcaaccagaatggtgagcgtagtggagccaggtctaagcagcgccgtccccagggtctgccgaacaacacggcgagctggtttactccgcttgttcaatttggtaaagaagacttaaaattcccgccgggccagggcgtcccgatcaacactaactcttccccggatgatcagattggttattaccgcagagcaactcgtcggattcgcggcggcgacggtaaaatgaaagatttgccaccgaagtggtacttttactatctcggcaccggtccgcacgctgatctgccctacgggcaaaagaaggacggggtagtgtgggtggctcgacctggtgccctgaatactccaaaagatcatatcggcacccgtaaccctgctaataacgctgcgatcccactgcaactgcctccgggtacaaaactgccaaaaggcttctatgcagaagggtcgcgtggtggcagccaggcgagtagccgtagcagctcccgctctcgcaactcgtcccgtaactccactccgggctcttctcgcggcacgtccccggctcgtatggcaggtaacggtggtgacgctgctctggcgctgctactgctggacaggctgaaccagctggagtcgaagatgagtggtaaaggccaacagcagcagggccagaccgttaccaaaaagagcgcagctgaagcatctaaaaaaccgcgacagaaacgtaccgcgactaaagcgtacaatgtaacacaggccttcggtcgtcgaggtccggagcaaactcaaggaaactttggcgatcaggaattaatccgccaggggaccgactacaaacactggccgcaaattgcccagttcgccccatccgctagtgcattcttcggtatgagccgcatcggcatggaagtaacgccaagtggtacgtggctgacctacaccggtgctatcaagcttgatgacaaggacccgaactttaaagaccaggttattctgcttaacaaacatattgatgcctataaaactttcccgccgaccgaacccaaaaaggacaaaaagaaaaaagctgatgaaacccaggctctaccgcagcgtcagaaaaaacagcaaactgtgactctgctgccagctgcggacctggatgatttttccaagcagctgcaacagtctatgagctctgcggactctacgcaggcttaa

SEQ ID NO: 2 - DNA, 2016 bp, Artificial Sequence
  Description of Artificial Sequence: Synthetic polynucleotide
atgcaccatcatcaccatcatggtggttctggttcgccgatacttggttattggaagattaaaggactggttcagcccacacgcctcctgctagaatacttagaggaaaaatatgaagagcacctgtacgaacgtgatgagggggacaaatggcgaaacaagaaatttgaattgggcttagaatttccaaatttgccgtattatatcgatggcgacgtaaaactgacccaatcaatggccattattcgctacatcgcagataaacataacatgctgggtggctgccctaaagaacgggctgagatctccatgctggaaggtgcggtgctcgacattcgctacggcgtcagtagaattgcgtatagcaaggatttcgaaactttaaaagtggatttcctgagcaaacttccggagatgctgaaaatgtttgaggataggctttgtcataagacgtatctcaatggtgatcatgttacccacccggactttatgctgtacgacgcccttgatgtcgttctgtatatggatcccatgtgcctggacgccttcccgaaattagtgtgttttaaaaaacgtatcgaagcgattccacagatcgataaatacttgaagtcttctaaatatattgcttggcctctgcaaggctggcaggcaacgttcggtgggggagatcatccgccaaaatcagatctggtgccgcgtgggagccctggcatacaccgcgacggtggttctggtgagaacctgtactttcaaagctcagataatgggcctcaaaaccagcgcaacgctccacgtataaccttcggtggcccgtctgactccacaggcagcaaccagaatggtgagcgtagtggagccaggtctaagcagcgccgtccccagggtctgccgaacaacacggcgagctggtttactgcgcttacccaacacggtaaagaagacttaaaattcccgcgtggccagggcgtcccgatcaacactaactcttccccggatgatcagattggttattaccgcagagcaactcgtcggattcgcggcggcgacggtaaaatgaaagatttgtctccgcgttggtacttttactatctcggcaccggtccggaagctggactgccctacggggcaaacaaggacgggatcatttgggtggctaccgaaggtgccctgaatactccaaaagatcatatcggcacccgtaaccctgctaataacgctgcgatcgttctgcaactgcctcagggtacaactctgccaaaaggcttctatgcagaagggtcgcgtggtggcagccaggcgagtagccgtagcagctcccgctctcgcaactcgtcccgtaactccactccgggctcttctcgcggcacgtccccggctcgtatggcaggtaacggtggtgacgctgctctggcgctgctactgctggacaggctgaaccagctggagtcgaagatgagtggtaaaggccaacagcagcagggccagaccgttaccaaaaagagcgcagctgaagcatctaaaaaaccgcgacagaaacgtaccgcgactaaagattacaatgtaacacaggccttcggtcgtcgaggtccggagcaaactcaaggaaactttggcgatcaggatttaaataagttggggaccgactacaaacactggccgcaaattgcccagttcgccccatccgctagtgcattcttcggtatgagccgcatctcgacggaagaaacgccaagtggtacgtggctgacctacaccggtgctatcaagcttgataaaaaggacccgaactttaaagaccaggttattctgcttaacaaacatattgatgcctataaaactttcccgccgaccgaacccaaaaaggacaaaaagaaaaaagctgatgaaacccaggctctaccgcagcgtcagaaaaaacagcaaactgtgactctgctgccagctgcggacctggatgatttttccaagcagctgcaacagtctatgagctctgcggactctacgcaggcttaa

SEQ ID NO: 3 - DNA, 2016 bp, Artificial Sequence
  Description of Artificial Sequence: Synthetic polynucleotide
atgcaccatcatcaccatcatggtggttctggttcgccgatacttggttattggaagattaaaggactggttcagcccacacgcctcctgctagaatacttagaggaaaaatatgaagagcacctgtacgaacgtgatgagggggacaaatggcgaaacaagaaatttgaattgggcttagaatttccaaatttgccgtattatatcgatggcgacgtaaaactgacccaatcaatggccattattcgctacatcgcagataaacataacatgctgggtggctgccctaaagaacgggctgagatctccatgctggaaggtgcggtgctcgacattcgctacggcgtcagtagaattgcgtatagcaaggatttcgaaactttaaaagtggatttcctgagcaaacttccggagatgctgaaaatgtttgaggataggctttgtcataagacgtatctcaatggtgatcatgttacccacccggactttatgctgtacgacgcccttgatgtcgttctgtatatggatcccatgtgcctggacgccttcccgaaattagtgtgttttaaaaaacgtatcgaagcgattccacagatcgataaatacttgaagtcttctaaatatattgcttggcctctgcaaggctggcaggcaacgttcggtgggggagatcatccgccaaaatcagatctggtgccgcgtgggagccctggcatacaccgcgacggtggttctggtgagaacctgtactttcaaagctcagataatgggcctcaaaaccagcgcaacgctccacgtataaccttcggtggcccgtctgactccacaggcagcaaccagaatggtgagcgtagtggagccaggtctaagcagcgccgtccccagggtctgccgaacaacacggcgagctggtttactgcgcttacccaacacggtaaagaagacttaaaattcccgcgtggccagggcgtcccgaaaaacactaactcttccccggatgatcagattggttattaccgcagagcaactcgtcggattcgcggcggcgacggtaaaatgaaagatttgtctccgcgttggtacttttactatctcggcaccggtccggaagctggactgccctacggggcaaacaaggacgggatcatttgggtggctaccgaaggtgccctgaatactccaaaagatcatatcggcacccgtaaccctgctaataacgctgcgatcgttctgcaactgcctcagggtacaactctgccaaaaggcttctatgcagaagggtcgcgtggtggcagccaggcgagtagccgtagcagctcccgctctcgcaactcgtcccgtaactccactccgggctcttctcgcggcacgtccccggctcgtatggcaggtaacggtggtgacgctgctctggcgctgctactgctggacaggctgaaccagctggagtcgaagatgagtggtaaaggccaacagcagcagggccagaccgttaccaaaaagagcgcagctgaagcatctaaaaaaccgcgacagaaacgtaccgcgactaaagcgtacaatgtaacacaggccttcggtcgtcgaggtccggagcaaactcaaggaaactttggcgatcaggaattaatccgccaggggaccgactacaaacactggccgcaaattgcccagttcgccccatccgctagtgcattcttcggtatgagccgcatcggcatggaagtaacgccaagtggtacgtggctgacctacaccggtgctatcaagcttgatgacaaggacccgaactttaaagaccaggttattctgcttaacaaacatattgatgcctataaaactttcccgccgaccgaacccaaaaaggacaaaaagaaaaaagctgatgaaacccaggctctaccgcagcgtcagaaaaaacagcaaactgtgactctgctgccagctgcggacctggatgatttttccaagcagctgcaacagtctatgagctctgcggactctacgcaggcttaa

SEQ ID NO: 4 - DNA, 2016 bp, Artificial Sequence
  Description of Artificial Sequence: Synthetic polynucleotide
atgcaccatcatcaccatcatggtggttctggttcgccgatacttggttattggaagattaaaggactggttcagcccacacgcctcctgctagaatacttagaggaaaaatatgaagagcacctgtacgaacgtgatgagggggacaaatggcgaaacaagaaatttgaattgggcttagaatttccaaatttgccgtattatatcgatggcgacgtaaaactgacccaatcaatggccattattcgctacatcgcagataaacataacatgctgggtggctgccctaaagaacgggctgagatctccatgctggaaggtgcggtgctcgacattcgctacggcgtcagtagaattgcgtatagcaaggatttcgaaactttaaaagtggatttcctgagcaaacttccggagatgctgaaaatgtttgaggataggctttgtcataagacgtatctcaatggtgatcatgttacccacccggactttatgctgtacgacgcccttgatgtcgttctgtatatggatcccatgtgcctggacgccttcccgaaattagtgtgttttaaaaaacgtatcgaagcgattccacagatcgataaatacttgaagtcttctaaatatattgcttggcctctgcaaggctggcaggcaacgttcggtgggggagatcatccgccaaaatcagatctggtgccgcgtgggagccctggcatacaccgcgacggtggttctggtgagaacctgtactttcaaagctcagataatgggcctcaaaaccagcgcaacgctccacgtataaccttcggtggcccgtctgactccacaggcagcaaccagaatggtgagcgtagtggagccaggtctaagcagcgccgtccccagggtctgccgaacaacacggcgagctggtttactgcgcttacccaacacggtaaagaagacttaaaattcccgcgtggccagggcgtcccgatcaacactaactcttccccggatgatcagattggttattaccgcagagcaactcgtcggattcgcggcggcgacggtaaaatgaaagatttgtctccgcgttggtacttttactatctcggcaccggtccggaagctggactgccctacggggcaaacaaggacgggatcatttgggtggctaccgaaggtgccctgaatactccaaaagatcatatcggcacccgtaaccctgctaataacgctgcgatcgttctgcaactgcctcagggtacaactctgccaaaaggcttctatgcagaagggtcgcgtggtggcagccaggcgagtagccgtagcagctcccgctctcgcaactcgtcccgtaactccactccgggctcttctcgcggcacgtccccggctcgtatggcaggtaacggtggtgacgctgctctggcgctgctactgctggacaggctgaaccagctggagtcgaagatgagtggtaaaggccaacagcagcagggccagaccgttaccaaaaagagcgcagctgaagcatctaaaaaaccgcgacagaaacgtaccgcgactaaagcgtacaatgtaacacaggccttcggtcgtcgaggtccggagcaaactcaaggaaactttggcgatcaggaattaatccgccaggggaccgactacaaacactggccgcaaattgcccagttcgccccatccgctagtgcattcttcggtatgagccgcatcggcatggaacatacgccaagtggtacgtggctgacctacaccggtgctatcaagcttgatgacaaggacccgaactttaaagaccaggttattctgcttaacaaacatattgatgcctataaaactttcccgccgaccgaacccaaaaaggacaaaaagaaaaaagctgatgaaacccaggctctaccgcagcgtcagaaaaaacagcaaactgtgactctgctgccagctgcggacctggatgatttttccaagcagctgcaacagtctatgagctctgcggactctacgcaggcttaa

SEQ ID NO: 5 - DNA, 2016 bp, Artificial Sequence
  Description of Artificial Sequence: Synthetic polynucleotide
atgcaccatcatcaccatcatggtggttctggttcgccgatacttggttattggaagattaaaggactggttcagcccacacgcctcctgctagaatacttagaggaaaaatatgaagagcacctgtacgaacgtgatgagggggacaaatggcgaaacaagaaatttgaattgggcttagaatttccaaatttgccgtattatatcgatggcgacgtaaaactgacccaatcaatggccattattcgctacatcgcagataaacataacatgctgggtggctgccctaaagaacgggctgagatctccatgctggaaggtgcggtgctcgacattcgctacggcgtcagtagaattgcgtatagcaaggatttcgaaactttaaaagtggatttcctgagcaaacttccggagatgctgaaaatgtttgaggataggctttgtcataagacgtatctcaatggtgatcatgttacccacccggactttatgctgtacgacgcccttgatgtcgttctgtatatggatcccatgtgcctggacgccttcccgaaattagtgtgttttaaaaaacgtatcgaagcgattccacagatcgataaatacttgaagtcttctaaatatattgcttggcctctgcaaggctggcaggcaacgttcggtgggggagatcatccgccaaaatcagatctggtgccgcgtgggagccctggcatacaccgcgacggtggttctggtgagaacctgtactttcaaagctcagataatgggcctcaaaaccagcgcaacgctccacgtataaccttcggtggcccgtctgactccacaggcagcaaccagaatggtgagcgtagtggagccaggtctaagcagcgccgtccccagggtctgccgaacaacacggcgagctggtttactgcgcttacccaacacggtaaagaagacttaaaattcccgcgtggccagggcgtcccgatcaacactaactcttccccggatgatcagattggttattaccgcagagcaactcgtcggattcgcggcggcgacggtaaaatgaaagatttgtctccgcgttggtacttttactatctcggcaccggtccggaagctggactgccctacggggcaaacaaggacgggatcatttgggtggctaccgaaggtgccctgaatactccaaaagatcatatcggcacccgtaaccctgctaataacgctgcgatcgagctgcaactgcctcagggtacaactctgccaaaaggcttctatgcagaagggtcgcgtggtggcagccaggcgagtagccgtagcagctcccgctctcgcaactcgtcccgtaactccactccgggctcttctcgcggcacgtccccggctcgtatggcaggtaacggtggtgacgctgctctggcgctgctactgctggacaggctgaaccagctggagtcgaagatgagtggtaaaggccaacagcagcagggccagaccgttaccaaaaagagcgcagctgaagcatctaaaaaaccgcgacagaaacgtaccgcgactaaagcgtacaatgtaacacaggccttcggtcgtcgaggtccggagcaaactcaaggaaactttggcgatcaggaattaatccgccaggggaccgactacaaacactggccgcaaattgcccagttcgccccatccgctagtgcattcttcggtatgagccgcatcggcatggaagtaacgccaagtggtacgtggctgacctacaccggtgctatcaagcttgatgacaaggacccgaactttaaagaccaggttattctgcttaacaaacatattgatgcctataaaactttcccgccgaccgaacccaaaaaggacaaaaagaaaaaagctgatgaaacccaggctctaccgcagcgtcagaaaaaacagcaaactgtgactctgctgccagctgcggacctggatgatttttccaagcagctgcaacagtctatgagctctgcggactctacgcaggcttaa

SEQ ID NO: 6 - DNA, 2016 bp, Artificial Sequence
  Description of Artificial Sequence: Synthetic polynucleotide
atgcaccatcatcaccatcatggtggttctggttcgccgatacttggttattggaagattaaaggactggttcagcccacacgcctcctgctagaatacttagaggaaaaatatgaagagcacctgtacgaacgtgatgagggggacaaatggcgaaacaagaaatttgaattgggcttagaatttccaaatttgccgtattatatcgatggcgacgtaaaactgacccaatcaatggccattattcgctacatcgcagataaacataacatgctgggtggctgccctaaagaacgggctgagatctccatgctggaaggtgcggtgctcgacattcgctacggcgtcagtagaattgcgtatagcaaggatttcgaaactttaaaagtggatttcctgagcaaacttccggagatgctgaaaatgtttgaggataggctttgtcataagacgtatctcaatggtgatcatgttacccacccggactttatgctgtacgacgcccttgatgtcgttctgtatatggatcccatgtgcctggacgccttcccgaaattagtgtgttttaaaaaacgtatcgaagcgattccacagatcgataaatacttgaagtcttctaaatatattgcttggcctctgcaaggctggcaggcaacgttcggtgggggagatcatccgccaaaatcagatctggtgccgcgtgggagccctggcatacaccgcgacggtggttctggtgagaacctgtactttcaaagctcagataatgggcctcaaaaccagcgcaacgctccacgtataaccttcggtggcccgtctgactccacaggcagcaaccagaatggtgagcgtagtggagccaggtctaagcagcgccgtccccagggtctgccgaacaacacggcgagctggtttactggccttacccaaaatggtaaagaagacttaaaattcccgccgggccagggcgtcccgatcaacactaactcttccccggatgatcagattggttattaccgcagagcaactcgtcggattcgcggcggcgacggtaaaatgaaagatttgccaccgaagtggtacttttactatctcggcaccggtccgcacgctgatctgccctacgggcaaaagaaggacggggtgttttgggtggctcgacctggtgccctgaatactccaaaagatcatatcggcacccgtaaccctgctaataacgctgcgatcccactgcaactgcctccgggtacaaaactgccaaaaggcttctatgcagaagggtcgcgtggtggcagccaggcgagtagccgtagcagctcccgctctcgcaactcgtcccgtaactccactccgggctcttctcgcggcacgtccccggctcgtatggcaggtaacggtggtgacgctgctctggcgctgctactgctggacaggctgaaccagctggagtcgaagatgagtggtaaaggccaacagcagcagggccagaccgttaccaaaaagagcgcagctgaagcatctaaaaaaccgcgacagaaacgtaccgcgactaaagcgtacaatgtaacacaggccttcggtcgtcgaggtccggagcaaactcaaggaaactttggcgatcaggaattaatccgccaggggaccgactacaaacactggccgcaaattgcccagttcgccccatccgctagtgcattcttcggtatgagccgcatcggcatggaagtaacgccaagtggtacgtggctgacctacaccggtgctatcaagcttgatgacaaggacccgaactttaaagaccaggttattctgcttaacaaacatattgatgcctataaaactttcccgccgaccgaacccaaaaaggacaaaaagaaaaaagctgatgaaacccaggctctaccgcagcgtcagaaaaaacagcaaactgtgactctgctgccagctgcggacctggatgatttttccaagcagctgcaacagtctatgagctctgcggactctacgcaggcttaa

SEQ ID NO: 7 - DNA, 2016 bp, Artificial Sequence
  Description of Artificial Sequence: Synthetic polynucleotide
atgcaccatcatcaccatcatggtggttctggttcgccgatacttggttattggaagattaaaggactggttcagcccacacgcctcctgctagaatacttagaggaaaaatatgaagagcacctgtacgaacgtgatgagggggacaaatggcgaaacaagaaatttgaattgggcttagaatttccaaatttgccgtattatatcgatggcgacgtaaaactgacccaatcaatggccattattcgctacatcgcagataaacataacatgctgggtggctgccctaaagaacgggctgagatctccatgctggaaggtgcggtgctcgacattcgctacggcgtcagtagaattgcgtatagcaaggatttcgaaactttaaaagtggatttcctgagcaaacttccggagatgctgaaaatgtttgaggataggctttgtcataagacgtatctcaatggtgatcatgttacccacccggactttatgctgtacgacgcccttgatgtcgttctgtatatggatcccatgtgcctggacgccttcccgaaattagtgtgttttaaaaaacgtatcgaagcgattccacagatcgataaatacttgaagtcttctaaatatattgcttggcctctgcaaggctggcaggcaacgttcggtgggggagatcatccgccaaaatcagatctggtgccgcgtgggagccctggcatacaccgcgacggtggttctggtgagaacctgtactttcaaagctcagataatgggcctcaaaaccagcgcaacgctccacgtataaccttcggtggcccgtctgactccacaggcagcaaccagaatggtgagcgtagtggagccaggtctaagcagcgccgtccccagggtctgccgaacaacacggcgagctggtttactgggcttacccaacacggtaaagaagacttaaaattcccgcccggccagggcgtcccgatcaacactaactcttccccggatgatcagattggttattaccgcagagcaactcgtcggattcgcggcggcgacggtaaaatgaaagatttgccaccgcgttggtacttttactatctcggcaccggtccggaagctgatctgccctacggggcagtaaagccagggatcttttgggtggctgaagaaggtgccctgaatactccaaaagatcatatcggcacccgtaaccctgctaataacgctgcgatcccgctgcaactgcctccgggtacaactctgccaaaaggcttctatgcagaagggtcgcgtggtggcagccaggcgagtagccgtagcagctcccgctctcgcaactcgtcccgtaactccactccgggctcttctcgcggcacgtccccggctcgtatggcaggtaacggtggtgacgctgctctggcgctgctactgctggacaggctgaaccagctggagtcgaagatgagtggtaaaggccaacagcagcagggccagaccgttaccaaaaagagcgcagctgaagcatctaaaaaaccgcgacagaaacgtaccgcgactaaagcgtacaatgtaacacaggccttcggtcgtcgaggtccggagcaaactcaaggaaactttggcgatcaggaattaatccgccaggggaccgactacaaacactggccgcaaattgcccagttcgccccatccgctagtgcattcttcggtatgagccgcatcggcatggaagtaacgccaagtggtacgtggctgacctacaccggtgctatcaagcttgatgacaaggacccgaactttaaagaccaggttattctgcttaacaaacatattgatgcctataaaactttcccgccgaccgaacccaaaaaggacaaaaagaaaaaagctgatgaaacccaggctctaccgcagcgtcagaaaaaacagcaaactgtgactctgctgccagctgcggacctggatgatttttccaagcagctgcaacagtctatgagctctgcggactctacgcaggcttaa

SEQ ID NO: 8 - DNA, 2016 bp, Artificial Sequence
  Description of Artificial Sequence: Synthetic polynucleotide
atgcaccatcatcaccatcatggtggttctggttcgccgatacttggttattggaagattaaaggactggttcagcccacacgcctcctgctagaatacttagaggaaaaatatgaagagcacctgtacgaacgtgatgagggggacaaatggcgaaacaagaaatttgaattgggcttagaatttccaaatttgccgtattatatcgatggcgacgtaaaactgacccaatcaatggccattattcgctacatcgcagataaacataacatgctgggtggctgccctaaagaacgggctgagatctccatgctggaaggtgcggtgctcgacattcgctacggcgtcagtagaattgcgtatagcaaggatttcgaaactttaaaagtggatttcctgagcaaacttccggagatgctgaaaatgtttgaggataggctttgtcataagacgtatctcaatggtgatcatgttacccacccggactttatgctgtacgacgcccttgatgtcgttctgtatatggatcccatgtgcctggacgccttcccgaaattagtgtgttttaaaaaacgtatcgaagcgattccacagatcgataaatacttgaagtcttctaaatatattgcttggcctctgcaaggctggcaggcaacgttcggtgggggagatcatccgccaaaatcagatctggtgccgcgtgggagccctggcatacaccgcgacggtggttctggtgagaacctgtactttcaaagctcagataatgggcctcaaaaccagcgcaacgctccacgtataaccttcggtggcccgtctgactccacaggcagcaaccagaatggtgagcgtagtggagccaggtctaagcagcgccgtccccagggtctgccgaacaacacggcgagctggtttactgcgcttacccaacacggtaaagaagacttaaaattcccgcgtggccagggcgtcccgatcaacactaactcttccccggatgatcagattggttattaccgcagagcaactcgtcggattcgcggcggcgacggtaaaatgaaagatttgtctccgcgttggtacttttactatctcggcaccggtccggaagctggactgccctacggggcaaacaaggacgggatcatttgggtggctaccgaaggtgccctgaatactccaaaagatcatatcggcacccgtaaccctgctaataacgctgcgatcgttctgcaactgcctcagggtacaactctgccaaaaggcttctatgcagaagggtcgcgtggtggcagccaggcgagtagccgtagcagctcccgctctcgcaactcgtcccgtaactccactccgggctcttctcgcggcacgtccccggctcgtatggcaggtaacggtggtgacgctgctctggcgctgctactgctggacaggctgaaccagctggagtcgaagatgagtggtaaaggccaacagcagcagggccagaccgttaccaaaaagagcgcagctgaagcatctaaaaaaccgcgacagaaacgtaccgcgactaaagcgtacaatgtaacacaggccttcggtcgtcgaggtccggagcaaactcaaggaaactttggcgatcaggaattaatcaaacaggggaccgactacaaacactggccgcaaattgcccagttcgccccatccgctagtgcattcttcggtatgagccgcatcggcatggaagtaacgccaagtggtacgtggctgacctacaccggtgctatcaagcttgatgacaaggacccgaactttaaagaccaggttattctgcttaacaaacatattgatgcctataaaactttcccgccgaccgaacccaaaaaggacaaaaagaaaaaagctgatgaaacccaggctctaccgcagcgtcagaaaaaacagcaaactgtgactctgctgccagctgcggacctggatgatttttccaagcagctgcaacagtctatgagctctgcggactctacgcaggcttaa

SEQ ID NO: 9 - DNA, 2016 bp, Artificial Sequence
  Description of Artificial Sequence: Synthetic polynucleotide
atgcaccatcatcaccatcatggtggttctggttcgccgatacttggttattggaagattaaaggactggttcagcccacacgcctcctgctagaatacttagaggaaaaatatgaagagcacctgtacgaacgtgatgagggggacaaatggcgaaacaagaaatttgaattgggcttagaatttccaaatttgccgtattatatcgatggcgacgtaaaactgacccaatcaatggccattattcgctacatcgcagataaacataacatgctgggtggctgccctaaagaacgggctgagatctccatgctggaaggtgcggtgctcgacattcgctacggcgtcagtagaattgcgtatagcaaggatttcgaaactttaaaagtggatttcctgagcaaacttccggagatgctgaaaatgtttgaggataggctttgtcataagacgtatctcaatggtgatcatgttacccacccggactttatgctgtacgacgcccttgatgtcgttctgtatatggatcccatgtgcctggacgccttcccgaaattagtgtgttttaaaaaacgtatcgaagcgattccacagatcgataaatacttgaagtcttctaaatatattgcttggcctctgcaaggctggcaggcaacgttcggtgggggagatcatccgccaaaatcagatctggtgccgcgtgggagccctggcatacaccgcgacggtggttctggtgagaacctgtactttcaaagctcagataatgggcctcaaaaccagcgcaacgctccacgtataaccttcggtggcccgtctgactccacaggcagcaaccagaatggtgagcgtagtggagccaggtctaagcagcgccgtccccagggtctgccgaacaacacggcgagctggtttactgcgcttacccaacacggtaaagaagacttaaaattcccgcgtggccagggcgtcccgatcaacactaactcttccccggatgatcagattggttattaccgcagagcaactcgtcggattcgcggcggcgacggtaaaatgaaagatttgtctccgcgttggtacttttactatctcggcaccggtccggaagctggactgccctacggggcaaacaaggacgggatcatttgggtggctaccgaaggtgccctgaatactccaaaagatcatatcggcacccgtaaccctgctaataacgctgcgatcgttctgcaactgcctcagggtacaactctgccaaaaggcttctatgcagaagggtcgcgtggtggcagccaggcgagtagccgtagcagctcccgctctcgcaactcgtcccgtaactccactccgggctcttctcgcggcacgtccccggctcgtatggcaggtaacggtggtgacgctgctctggcgctgctactgctggacaggctgaaccagctggagtcgaagatgagtggtaaaggccaacagcagcagggccagaccgttaccaaaaagagcgcagctgaagcatctaaaaaaccgcgacagaaacgtaccgcgactaaagattacaatgtaacacaggccttcggtcgtcgaggtccggagcaaactcaaggaaactttggcgatcaggaattaatccgccaggggaccgactacaaacactggccgcaaattgcccagttcgccccatccgctagtgcattcttcggtatgagccgcatcggcatggaagtaacgccaagtggtacgtggctgacctacaccggtgctatcaagcttgatgacaaggacccgaactttaaagaccaggttattctgcttaacaaacatattgatgcctataaaactttcccgccgaccgaacccaaaaaggacaaaaagaaaaaagctgatgaaacccaggctctaccgcagcgtcagaaaaaacagcaaactgtgactctgctgccagctgcggacctggatgatttttccaagcagctgcaacagtctatgagctctgcggactctacgcaggcttaa

SEQ ID NO: 10 - DNA, 2016 bp, Artificial Sequence
  Description of Artificial Sequence: Synthetic polynucleotide
atgcaccatcatcaccatcatggtggttctggttcgccgatacttggttattggaagattaaaggactggttcagcccacacgcctcctgctagaatacttagaggaaaaatatgaagagcacctgtacgaacgtgatgagggggacaaatggcgaaacaagaaatttgaattgggcttagaatttccaaatttgccgtattatatcgatggcgacgtaaaactgacccaatcaatggccattattcgctacatcgcagataaacataacatgctgggtggctgccctaaagaacgggctgagatctccatgctggaaggtgcggtgctcgacattcgctacggcgtcagtagaattgcgtatagcaaggatttcgaaactttaaaagtggatttcctgagcaaacttccggagatgctgaaaatgtttgaggataggctttgtcataagacgtatctcaatggtgatcatgttacccacccggactttatgctgtacgacgcccttgatgtcgttctgtatatggatcccatgtgcctggacgccttcccgaaattagtgtgttttaaaaaacgtatcgaagcgattccacagatcgataaatacttgaagtcttctaaatatattgcttggcctctgcaaggctggcaggcaacgttcggtgggggagatcatccgccaaaatcagatctggtgccgcgtgggagccctggcatacaccgcgacggtggttctggtgagaacctgtactttcaaagctcagataatgggcctcaaaaccagcgcaacgctccacgtataaccttcggtggcccgtctgactccacaggcagcaaccagaatggtgagcgtagtggagccaggtctaagcagcgccgtccccagggtctgccgaacaacacggcgagctggtttactgcgcttacccaacacggtaaagaagacttaaaattcccgcgtggccagggcgtcccgatcaacactaactcttccccggatgatcagattggttattaccgcagagcaactcgtcggattcgcggcggcgacggtaaaatgaaagatttgtctccgcgttggtacttttactatctcggcaccggtccggaagctggactgccctacggggcaaacaaggacgggatcatttgggtggctaccgaaggtgccctgaatactccaaaagatcatatcggcacccgtaaccctgctaataacgctgcgatcgttctgcaactgcctcagggtacaactctgccaaaaggcttctatgcagaagggtcgcgtggtggcagccaggcgagtagccgtagcagctcccgctctcgcaactcgtcccgtaactccactccgggctcttctcgcggcacgtccccggctcgtatggcaggtaacggtggtgacgctgctctggcgctgctactgctggacaggctgaaccagctggagtcgaagatgagtggtaaaggccaacagcagcagggccagaccgttaccaaaaagagcgcagctgaagcatctaaaaaaccgcgacagaaacgtaccgcgactaaagcgtacaatgtaacacaggccttcggtcgtcgaggtccggagcaaactcaaggaaactttggcgatcaggaattaatccgccaggggaccgactacaaacactggccgcaaattgcccagttcgccccatccgctagtgcattcttcggtatgagccgcatcggcatggaaaaaacgccaagtggtacgtggctgacctacaccggtgctatcaagcttgatgacaaggacccgaactttaaagaccaggttattctgcttaacaaacatattgatgcctataaaactttcccgccgaccgaacccaaaaaggacaaaaagaaaaaagctgatgaaacccaggctctaccgcagcgtcagaaaaaacagcaaactgtgactctgctgccagctgcggacctggatgatttttccaagcagctgcaacagtctatgagctctgcggactctacgcaggcttaa

SEQ ID NO: 11 - DNA, 2016 bp, Artificial Sequence
  Description of Artificial Sequence: Synthetic polynucleotide
atgcaccatcatcaccatcatggtggttctggttcgccgatacttggttattggaagattaaaggactggttcagcccacacgcctcctgctagaatacttagaggaaaaatatgaagagcacctgtacgaacgtgatgagggggacaaatggcgaaacaagaaatttgaattgggcttagaatttccaaatttgccgtattatatcgatggcgacgtaaaactgacccaatcaatggccattattcgctacatcgcagataaacataacatgctgggtggctgccctaaagaacgggctgagatctccatgctggaaggtgcggtgctcgacattcgctacggcgtcagtagaattgcgtatagcaaggatttcgaaactttaaaagtggatttcctgagcaaacttccggagatgctgaaaatgtttgaggataggctttgtcataagacgtatctcaatggtgatcatgttacccacccggactttatgctgtacgacgcccttgatgtcgttctgtatatggatcccatgtgcctggacgccttcccgaaattagtgtgttttaaaaaacgtatcgaagcgattccacagatcgataaatacttgaagtcttctaaatatattgcttggcctctgcaaggctggcaggcaacgttcggtgggggagatcatccgccaaaatcagatctggtgccgcgtgggagccctggcatacaccgcgacggtggttctggtgagaacctgtactttcaaagctcagataatgggcctcaaaaccagcgcaacgctccacgtataaccttcggtggcccgtctgactccacaggcagcaaccagaatggtgagcgtagtggagccaggtctaagcagcgccgtccccagggtctgccgaacaacacggcgagctggtttactccgcttacccaaaatggtaaagaagacttaaaattcccgcccggccagggcgtcccgatcaacactaactcttccccggatgatcagattggttattaccgcagagcaactcgtcggattcgcggcggcgacggtaaaatgaaagatttgcctccgaagtggtacttttactatctcggcaccggtccgcacgctgatctgccctacgggcaaaaacatccaggggtattttgggtggctcgaccaggtgccctgaatactccaaaagatcatatcggcacccgtaaccctgctaataacgctgcgatccctctgcaactgcctccgggtacaaaactgccaaaaggcttctatgcagaagggtcgcgtggtggcagccaggcgagtagccgtagcagctcccgctctcgcaactcgtcccgtaactccactccgggctcttctcgcggcacgtccccggctcgtatggcaggtaacggtggtgacgctgctctggcgctgctactgctggacaggctgaaccagctggagtcgaagatgagtggtaaaggccaacagcagcagggccagaccgttaccaaaaagagcgcagctgaagcatctaaaaaaccgcgacagaaacgtaccgcgactaaagcgtacaatgtaacacaggccttcggtcgtcgaggtccggagcaaactcaaggaaactttggcgatcaggaattaatccgccaggggaccgactacaaacactggccgcaaattgcccagttcgccccatccgctagtgcattcttcggtatgagccgcatcggcatggaagtaacgccaagtggtacgtggctgacctacaccggtgctatcaagcttgatgacaaggacccgaactttaaagaccaggttattctgcttaacaaacatattgatgcctataaaactttcccgccgaccgaacccaaaaaggacaaaaagaaaaaagctgatgaaacccaggctctaccgcagcgtcagaaaaaacagcaaactgtgactctgctgccagctgcggacctggatgatttttccaagcagctgcaacagtctatgagctctgcggactctacgcaggcttaa

SEQ ID NO: 12 - DNA, 2016 bp, Artificial Sequence
  Description of Artificial Sequence: Synthetic polynucleotide
atgcaccatcatcaccatcatggtggttctggttcgccgatacttggttattggaagattaaaggactggttcagcccacacgcctcctgctagaatacttagaggaaaaatatgaagagcacctgtacgaacgtgatgagggggacaaatggcgaaacaagaaatttgaattgggcttagaatttccaaatttgccgtattatatcgatggcgacgtaaaactgacccaatcaatggccattattcgctacatcgcagataaacataacatgctgggtggctgccctaaagaacgggctgagatctccatgctggaaggtgcggtgctcgacattcgctacggcgtcagtagaattgcgtatagcaaggatttcgaaactttaaaagtggatttcctgagcaaacttccggagatgctgaaaatgtttgaggataggctttgtcataagacgtatctcaatggtgatcatgttacccacccggactttatgctgtacgacgcccttgatgtcgttctgtatatggatcccatgtgcctggacgccttcccgaaattagtgtgttttaaaaaacgtatcgaagcgattccacagatcgataaatacttgaagtcttctaaatatattgcttggcctctgcaaggctggcaggcaacgttcggtgggggagatcatccgccaaaatcagatctggtgccgcgtgggagccctggcatacaccgcgacggtggttctggtgagaacctgtactttcaaagctcagataatgggcctcaaaaccagcgcaacgctccacgtataaccttcggtggcccgtctgactccacaggcagcaaccagaatggtgagcgtagtggagccaggtctaagcagcgccgtccccagggtctgccgaacaacacggcgagctggtttactgcgcttacccaacacggtaaagaagacttaaaattcccgcgtggccagggcgtcccgatcaacactaactcttccccggatgatcagattggttattaccgcagagcaactcgtcggattcgcggcggcgacggtaaaatgaaagatttgtctccgcgttggtacttttactatctcggcaccggtccggaagctggactgccctacggggcaaacaaggacgggatcatttgggtggctaccgaaggtgccctgaatactccaaaagatcatatcggcacccgtaaccctgctaataacaccgcgatcgttctgcaactgcctcagggtacaactctgccaaaaggcttctatgcagaagggtcgcgtggtggcagccaggcgagtagccgtagcagctcccgctctcgcaactcgtcccgtaactccactccgggctcttctcgcggcacgtccccggctcgtatggcaggtaacggtggtgacgctgctctggcgctgctactgctggacaggctgaaccagctggagtcgaagatgagtggtaaaggccaacagcagcagggccagaccgttaccaaaaagagcgcagctgaagcatctaaaaaaccgcgacagaaacgtaccgcgactaaagcgtacaatgtaacacaggccttcggtcgtcgaggtccggagcaaactcaaggaaactttggcgatcaggaattaatccgccaggggaccgactacaaacactggccgcaaattgcccagttcgccccatccgctagtgcattcttcggtatgagccgcatcggcatggaagtaacgccaagtggtacgtggctgacctacaccggtgctatcaagcttgatgacaaggacccgaactttaaagaccaggttattctgcttaacaaacatattgatgcctataaaactttcccgccgaccgaacccaaaaaggacaaaaagaaaaaagctgatgaaacccaggctctaccgcagcgtcagaaaaaacagcaaactgtgactctgctgccagctgcggacctggatgatttttccaagcagctgcaacagtctatgagctctgcggactctacgcaggcttaa

SEQ ID NO: 13 - DNA, 2016 bp, Artificial Sequence
  Description of Artificial Sequence: Synthetic polynucleotide
atgcaccatcatcaccatcatggtggttctggttcgccgatacttggttattggaagattaaaggactggttcagcccacacgcctcctgctagaatacttagaggaaaaatatgaagagcacctgtacgaacgtgatgagggggacaaatggcgaaacaagaaatttgaattgggcttagaatttccaaatttgccgtattatatcgatggcgacgtaaaactgacccaatcaatggccattattcgctacatcgcagataaacataacatgctgggtggctgccctaaagaacgggctgagatctccatgctggaaggtgcggtgctcgacattcgctacggcgtcagtagaattgcgtatagcaaggatttcgaaactttaaaagtggatttcctgagcaaacttccggagatgctgaaaatgtttgaggataggctttgtcataagacgtatctcaatggtgatcatgttacccacccggactttatgctgtacgacgcccttgatgtcgttctgtatatggatcccatgtgcctggacgccttcccgaaattagtgtgttttaaaaaacgtatcgaagcgattccacagatcgataaatacttgaagtcttctaaatatattgcttggcctctgcaaggctggcaggcaacgttcggtgggggagatcatccgccaaaatcagatctggtgccgcgtgggagccctggcatacaccgcgacggtggttctggtgagaacctgtactttcaaagctcagataatgggcctcaaaaccagcgcaacgctccacgtataaccttcggtggcccgtctgactccacaggcagcaaccagaatggtgagcgtagtggagccaggtctaagcagcgccgtccccagggtctgccgaacaacacggcgagctggtttactgcgcttacccaacacggtaaagaagacttaaaattcccgcgtggccagggcgtcccgatcaacactaactcttccccggatgatcagattggttattaccgcagagcaactcgtcggattcgcggcggcgacggtaaaatgaaagatttgtctccgcgttggtacttttactatctcggcaccggtccggaagctggactgccctacggggcaaacaaggacgggatcatttgggtggctaccgaaggtgccctgaatactccaaaagatcatatcggcacccgtaaccctgctaataacgctgcgatcgttctgcaactgcctcagggtacaactctgccaaaaggcttctatgcagaagggtcgcgtggtggcagccaggcgagtagccgtagcagctcccgctctcgcaactcgtcccgtaactccactccgggctcttctcgcggcacgtccccggctcgtatggcaggtaacggtggtgacgctgctctggcgctgctactgctggacaggctgaaccagctggagtcgaagatgagtggtaaaggccaacagcagcagggccagaccgttaccaaaaagagcgcagctgaagcatctaaaaaaccgcgacagaaacgtaccgcgactaaagcgtacaatgtaacacaggccttcggtcgtcgaggtccggagcaaactcaaggaaactttggcgatcaggaattaatccgccaggggaccgactacaaacactggccgcaaattgcccagttcgccccatccgctagtgcattcttcggtatgagccgcatcggcatggaacgcacgccaagtggtacgtggctgacctacaccggtgctatcaagcttgatgacaaggacccgaactttaaagaccaggttattctgcttaacaaacatattgatgcctataaaactttcccgccgaccgaacccaaaaaggacaaaaagaaaaaagctgatgaaacccaggctctaccgcagcgtcagaaaaaacagcaaactgtgactctgctgccagctgcggacctggatgatttttccaagcagctgcaacagtctatgagctctgcggactctacgcaggcttaa

SEQ ID NO: 14 - DNA, 2016 bp, Artificial Sequence
  Description of Artificial Sequence: Synthetic polynucleotide
atgcaccatcatcaccatcatggtggttctggttcgccgatacttggttattggaagattaaaggactggttcagcccacacgcctcctgctagaatacttagaggaaaaatatgaagagcacctgtacgaacgtgatgagggggacaaatggcgaaacaagaaatttgaattgggcttagaatttccaaatttgccgtattatatcgatggcgacgtaaaactgacccaatcaatggccattattcgctacatcgcagataaacataacatgctgggtggctgccctaaagaacgggctgagatctccatgctggaaggtgcggtgctcgacattcgctacggcgtcagtagaattgcgtatagcaaggatttcgaaactttaaaagtggatttcctgagcaaacttccggagatgctgaaaatgtttgaggataggctttgtcataagacgtatctcaatggtgatcatgttacccacccggactttatgctgtacgacgcccttgatgtcgttctgtatatggatcccatgtgcctggacgccttcccgaaattagtgtgttttaaaaaacgtatcgaagcgattccacagatcgataaatacttgaagtcttctaaatatattgcttggcctctgcaaggctggcaggcaacgttcggtgggggagatcatccgccaaaatcagatctggtgccgcgtgggagccctggcatacaccgcgacggtggttctggtgagaacctgtactttcaaagctcagataatgggcctcaaaaccagcgcaacgctccacgtataaccttcggtggcccgtctgactccacaggcagcaaccagaatggtgagcgtagtggagccaggtctaagcagcgccgtccccagggtctgccgaacaacacggcgagctggtttactgcgcttacccaacacggtaaagaagacttaaaattcccgcgtggccagggcgtcccgatcaacactaactcttccccggatgatcagattggttattaccgcagagcaactcgtcggattcgcggcggcgacggtaaaatgaaagatttgtctccgcgttggtacttttactatctcggcaccggtccggaagctggactgccctacggggcaaacaaggacgggatcatttgggtggctaccgaaggtgccctgaatactccaaaagatcatatcggcacccgtaaccctgctaataacgctgcgatcgttctgcaactgcctcagggtacaactctgccaaaaggcttctatgcagaagggtcgcgtggtggcagccaggcgagtagccgtagcagctcccgctctcgcaactcgtcccgtaactccactccgggctcttctcgcggcacgtccccggctcgtatggcaggtaacggtggtgacgctgctctggcgctgctactgctggacaggctgaaccagctggagtcgaagatgagtggtaaaggccaacagcagcagggccagaccgttaccaaaaagagcgcagctgaagcatctaaaaaaccgcgacagaaacgtaccgcgactaaagcgtacaatgtaacacaggccttcggtcgtcgaggtccggagcaaactcaaggaaactttggcgatcaggaattaatccgccaggggaccgactacaaacactggccgcaaattgcccagttcgccccatccgctagtgcattcttcggtatgagccgcatcggcatggaagaaacgccaagtggtacgtggctgacctacaccggtgctatcaagcttgatgacaaggacccgaactttaaagaccaggttattctgcttaacaaacatattgatgcctataaaactttcccgccgaccgaacccaaaaaggacaaaaagaaaaaagctgatgaaacccaggctctaccgcagcgtcagaaaaaacagcaaactgtgactctgctgccagctgcggacctggatgatttttccaagcagctgcaacagtctatgagctctgcggactctacgcaggcttaa

SEQ ID NO: 15 - DNA, 2016 bp, Artificial Sequence
  Description of Artificial Sequence: Synthetic polynucleotide
atgcaccatcatcaccatcatggtggttctggttcgccgatacttggttattggaagattaaaggactggttcagcccacacgcctcctgctagaatacttagaggaaaaatatgaagagcacctgtacgaacgtgatgagggggacaaatggcgaaacaagaaatttgaattgggcttagaatttccaaatttgccgtattatatcgatggcgacgtaaaactgacccaatcaatggccattattcgctacatcgcagataaacataacatgctgggtggctgccctaaagaacgggctgagatctccatgctggaaggtgcggtgctcgacattcgctacggcgtcagtagaattgcgtatagcaaggatttcgaaactttaaaagtggatttcctgagcaaacttccggagatgctgaaaatgtttgaggataggctttgtcataagacgtatctcaatggtgatcatgttacccacccggactttatgctgtacgacgcccttgatgtcgttctgtatatggatcccatgtgcctggacgccttcccgaaattagtgtgttttaaaaaacgtatcgaagcgattccacagatcgataaatacttgaagtcttctaaatatattgcttggcctctgcaaggctggcaggcaacgttcggtgggggagatcatccgccaaaatcagatctggtgccgcgtgggagccctggcatacaccgcgacggtggttctggtgagaacctgtactttcaaagctcagataatgggcctcaaaaccagcgcaacgctccacgtataaccttcggtggcccgtctgactccacaggcagcaaccagaatggtgagcgtagtggagccaggtctaagcagcgccgtccccagggtctgccgaacaacacggcgagctggtttactgcgcttacccaacacggtaaagaagacttaaaattcccgcgtggccagggcgtcccgatcaacactaactcttccccggatgatcagattggttattaccgcagagcaactcgtcggattcgcggcggcgacggtaaaatgaaagatttgtctccgcgttggtacttttactatctcggcaccggtccggaagctggactgccctacggggcaaacaaggacgggatcatttgggtggctaccgaaggtgccctgaatactccaaaagatcatatcggcacccgtaaccctgctaataacgctgcgatcgttctgcaactgcctcagggtacaactctgccaaaaggcttctatgcagaagggtcgcgtggtggcagccaggcgagtagccgtagcagctcccgctctcgcaactcgtcccgtaactccactccgggctcttctcgcggcacgtccccggctcgtatggcaggtaacggtggtgacgctgctctggcgctgctactgctggacaggctgaaccagctggagtcgaagatgagtggtaaaggccaacagcagcagggccagaccgttaccaaaaagagcgcagctgaagcatctaaaaaaccgcgacagaaacgtaccgcgactaaagcgtacaatgtaacacaggccttcggtcgtcgaggtccggagcaaactcaaggaaactttggcgatcaggaattaatccgccaggggaccgactacaaacactggccgcaaattgcccagttcgccccatccgctagtgcattcttcggtatgagccgcatcggcatggaagatacgccaagtggtacgtggctgacctacaccggtgctatcaagcttgatgacaaggacccgaactttaaagaccaggttattctgcttaacaaacatattgatgcctataaaactttcccgccgaccgaacccaaaaaggacaaaaagaaaaaagctgatgaaacccaggctctaccgcagcgtcagaaaaaacagcaaactgtgactctgctgccagctgcggacctggatgatttttccaagcagctgcaacagtctatgagctctgcggactctacgcaggcttaa

SEQ ID NO: 16 - DNA, 2016 bp, Artificial Sequence
  Description of Artificial Sequence: Synthetic polynucleotide
atgcaccatcatcaccatcatggtggttctggttcgccgatacttggttattggaagattaaaggactggttcagcccacacgcctcctgctagaatacttagaggaaaaatatgaagagcacctgtacgaacgtgatgagggggacaaatggcgaaacaagaaatttgaattgggcttagaatttccaaatttgccgtattatatcgatggcgacgtaaaactgacccaatcaatggccattattcgctacatcgcagataaacataacatgctgggtggctgccctaaagaacgggctgagatctccatgctggaaggtgcggtgctcgacattcgctacggcgtcagtagaattgcgtatagcaaggatttcgaaactttaaaagtggatttcctgagcaaacttccggagatgctgaaaatgtttgaggataggctttgtcataagacgtatctcaatggtgatcatgttacccacccggactttatgctgtacgacgcccttgatgtcgttctgtatatggatcccatgtgcctggacgccttcccgaaattagtgtgttttaaaaaacgtatcgaagcgattccacagatcgataaatacttgaagtcttctaaatatattgcttggcctctgcaaggctggcaggcaacgttcggtgggggagatcatccgccaaaatcagatctggtgccgcgtgggagccctggcatacaccgcgacggtggttctggtgagaacctgtactttcaaagctcagataatgggcctcaaaaccagcgcaacgctccacgtataaccttcggtggcccgtctgactccacaggcagcaaccagaatggtgagcgtagtggagccaggtctaagcagcgccgtccccagggtctgccgaacaacacggcgagctggtttactgcgcttacccaacacggtaaagaagacttaaaattcccgcgtggccagggcgtcccgatcaacactaactcttccccggatgatcagattggttattaccgcagagcaactcgtcggattcgcggcggcgacggtaaaatgaaagatttgtctccgcgttggtacttttactatacgggcaccggtccggaagctggactgccctacggggcaaacaaggacgggatcatttgggtggctaccgaaggtgccctgaatactccaaaagatcatatcggcacccgtaaccctgctaataacgctgcgatcgttctgcaactgcctcagggtacaactctgccaaaaggcttctatgcagaagggtcgcgtggtggcagccaggcgagtagccgtagcagctcccgctctcgcaactcgtcccgtaactccactccgggctcttctcgcggcacgtccccggctcgtatggcaggtaacggtggtgacgctgctctggcgctgctactgctggacaggctgaaccagctggagtcgaagatgagtggtaaaggccaacagcagcagggccagaccgttaccaaaaagagcgcagctgaagcatctaaaaaaccgcgacagaaacgtaccgcgactaaagcgtacaatgtaacacaggccttcggtcgtcgaggtccggagcaaactcaaggaaactttggcgatcaggaattaatccgccaggggaccgactacaaacactggccgcaaattgcccagttcgccccatccgctagtgcattcttcggtatgagccgcatcggcatggaagtaacgccaagtggtacgtggctgacctacaccggtgctatcaagcttgatgacaaggacccgaactttaaagaccaggttattctgcttaacaaacatattgatgcctataaaactttcccgccgaccgaacccaaaaaggacaaaaagaaaaaagctgatgaaacccaggctctaccgcagcgtcagaaaaaacagcaaactgtgactctgctgccagctgcggacctggatgatttttccaagcagctgcaacagtctatgagctctgcggactctacgcaggcttaa

SEQ ID NO: 17 - DNA, 2016 bp, Artificial Sequence
  Description of Artificial Sequence: Synthetic polynucleotide
atgcaccatcatcaccatcatggtggttctggttcgccgatacttggttattggaagattaaaggactggttcagcccacacgcctcctgctagaatacttagaggaaaaatatgaagagcacctgtacgaacgtgatgagggggacaaatggcgaaacaagaaatttgaattgggcttagaatttccaaatttgccgtattatatcgatggcgacgtaaaactgacccaatcaatggccattattcgctacatcgcagataaacataacatgctgggtggctgccctaaagaacgggctgagatctccatgctggaaggtgcggtgctcgacattcgctacggcgtcagtagaattgcgtatagcaaggatttcgaaactttaaaagtggatttcctgagcaaacttccggagatgctgaaaatgtttgaggataggctttgtcataagacgtatctcaatggtgatcatgttacccacccggactttatgctgtacgacgcccttgatgtcgttctgtatatggatcccatgtgcctggacgccttcccgaaattagtgtgttttaaaaaacgtatcgaagcgattccacagatcgataaatacttgaagtcttctaaatatattgcttggcctctgcaaggctggcaggcaacgttcggtgggggagatcatccgccaaaatcagatctggtgccgcgtgggagccctggcatacaccgcgacggtggttctggtgagaacctgtactttcaaagctcagataatgggcctcaaaaccagcgcaacgctccacgtataaccttcggtggcccgtctgactccacaggcagcaaccagaatggtgagcgtagtggagccaggtctaagcagcgccgtccccagggtctgccgaacaacacggcgagctggtttactgcgcttacccaacacggtaaagaagacttaaaattcccgcgtggccagggcgtcccgatcaacactaactcttccccggatgatcagattggttattaccgcagagcaactcgtcggattcgcggcggcgacggtaaaatgaaagatttgtctccgcgttggtacttttactatctcggcaccggtccggaagctcaactgccctacggggcaaacaaggacgggatcatttgggtggctaccgaaggtgccctgaatactccaaaagatcatatcggcacccgtaaccctgctaataacgctgcgatcgttctgcaactgcctcagggtacaactctgccaaaaggcttctatgcagaagggtcgcgtggtggcagccaggcgagtagccgtagcagctcccgctctcgcaactcgtcccgtaactccactccgggctcttctcgcggcacgtccccggctcgtatggcaggtaacggtggtgacgctgctctggcgctgctactgctggacaggctgaaccagctggagtcgaagatgagtggtaaaggccaacagcagcagggccagaccgttaccaaaaagagcgcagctgaagcatctaaaaaaccgcgacagaaacgtaccgcgactaaagcgtacaatgtaacacaggccttcggtcgtcgaggtccggagcaaactcaaggaaactttggcgatcaggaattaatccgccaggggaccgactacaaacactggccgcaaattgcccagttcgccccatccgctagtgcattcttcggtatgagccgcatcggcatggaagtaacgccaagtggtacgtggctgacctacaccggtgctatcaagcttgatgacaaggacccgaactttaaagaccaggttattctgcttaacaaacatattgatgcctataaaactttcccgccgaccgaacccaaaaaggacaaaaagaaaaaagctgatgaaacccaggctctaccgcagcgtcagaaaaaacagcaaactgtgactctgctgccagctgcggacctggatgatttttccaagcagctgcaacagtctatgagctctgcggactctacgcaggcttaa

SEQ ID NO: 18 - DNA, 2016 bp, Artificial Sequence
  Description of Artificial Sequence: Synthetic polynucleotide
atgcaccatcatcaccatcatggtggttctggttcgccgatacttggttattggaagattaaaggactggttcagcccacacgcctcctgctagaatacttagaggaaaaatatgaagagcacctgtacgaacgtgatgagggggacaaatggcgaaacaagaaatttgaattgggcttagaatttccaaatttgccgtattatatcgatggcgacgtaaaactgacccaatcaatggccattattcgctacatcgcagataaacataacatgctgggtggctgccctaaagaacgggctgagatctccatgctggaaggtgcggtgctcgacattcgctacggcgtcagtagaattgcgtatagcaaggatttcgaaactttaaaagtggatttcctgagcaaacttccggagatgctgaaaatgtttgaggataggctttgtcataagacgtatctcaatggtgatcatgttacccacccggactttatgctgtacgacgcccttgatgtcgttctgtatatggatcccatgtgcctggacgccttcccgaaattagtgtgttttaaaaaacgtatcgaagcgattccacagatcgataaatacttgaagtcttctaaatatattgcttggcctctgcaaggctggcaggcaacgttcggtgggggagatcatccgccaaaatcagatctggtgccgcgtgggagccctggcatacaccgcgacggtggttctggtgagaacctgtactttcaaagctcagataatgggcctcaaaaccagcgcaacgctccacgtataaccttcggtggcccgtctgactccacaggcagcaaccagaatggtgagcgtagtggagccaggtctaagcagcgccgtccccagggtctgccgaacaacacggcgagctggtttactgcgcttacccaacacggtaaagaagacttaaaattcccgcgtggccagggcgtcccgatcaacactaactcttccccggatgatcagattggttattaccgcagagcaactcgtcggattcgcggcggcgacggtaaaatgaaagatttgtctccgcgttggtacttttactatctcggcaccggtccggaagctggactgccctacggggcaaacaaggacgggatcatttgggtggctaccgaaggtgccctgaatactccaaaagatcatatcggcacccgtaaccctgctaataacgctgcgatcgttctgcaactgcctcagggtacaactctgccaaaaaatttctatgcagaagggtcgcgtggtggcagccaggcgagtagccgtagcagctcccgctctcgcaactcgtcccgtaactccactccgggctcttctcgcggcacgtccccggctcgtatggcaggtaacggtggtgacgctgctctggcgctgctactgctggacaggctgaaccagctggagtcgaagatgagtggtaaaggccaacagcagcagggccagaccgttaccaaaaagagcgcagctgaagcatctaaaaaaccgcgacagaaacgtaccgcgactaaagcgtacaatgtaacacaggccttcggtcgtcgaggtccggagcaaactcaaggaaactttggcgatcaggaattaatccgccaggggaccgactacaaacactggccgcaaattgcccagttcgccccatccgctagtgcattcttcggtatgagccgcatcggcatggaagtaacgccaagtggtacgtggctgacctacaccggtgctatcaagcttgatgacaaggacccgaactttaaagaccaggttattctgcttaacaaacatattgatgcctataaaactttcccgccgaccgaacccaaaaaggacaaaaagaaaaaagctgatgaaacccaggctctaccgcagcgtcagaaaaaacagcaaactgtgactctgctgccagctgcggacctggatgatttttccaagcagctgcaacagtctatgagctctgcggactctacgcaggcttaa

SEQ ID NO: 19 - DNA, 2016 bp, Artificial Sequence
  Description of Artificial Sequence: Synthetic polynucleotide
atgcaccatcatcaccatcatggtggttctggttcgccgatacttggttattggaagattaaaggactggttcagcccacacgcctcctgctagaatacttagaggaaaaatatgaagagcacctgtacgaacgtgatgagggggacaaatggcgaaacaagaaatttgaattgggcttagaatttccaaatttgccgtattatatcgatggcgacgtaaaactgacccaatcaatggccattattcgctacatcgcagataaacataacatgctgggtggctgccctaaagaacgggctgagatctccatgctggaaggtgcggtgctcgacattcgctacggcgtcagtagaattgcgtatagcaaggatttcgaaactttaaaagtggatttcctgagcaaacttccggagatgctgaaaatgtttgaggataggctttgtcataagacgtatctcaatggtgatcatgttacccacccggactttatgctgtacgacgcccttgatgtcgttctgtatatggatcccatgtgcctggacgccttcccgaaattagtgtgttttaaaaaacgtatcgaagcgattccacagatcgataaatacttgaagtcttctaaatatattgcttggcctctgcaaggctggcaggcaacgttcggtgggggagatcatccgccaaaatcagatctggtgccgcgtgggagccctggcatacaccgcgacggtggttctggtgagaacctgtactttcaaagctcagataatgggcctcaaaaccagcgcaacgctccacgtataaccttcggtggcccgtctgactccacaggcagcaaccagaatggtgagcgtagtggagccaggtctaagcagcgccgtccccagggtctgccgaacaacacggcgagctggtttactgcgcttacccaacacggtaaagaagacttaaaattcccgcgtggccagggcgtcccgatcaacactaactcttccccggatgatcagattggttattaccgcagagcaactcgtcggattcgcggcggcgacggtaaaatgaaagatttgtctccgcgttggtacttttactatctcggcaccggtccggaagctggactgccctacggggcaaacaaggacgggatcatttgggtggctaccgaaggtgccctgaatactccaaaagatcatatcggcacccgtaaccctgctaataacgctgcgatcgttctgcaactgcctcagggtacaactctgccaaaaggcttctatgcagaagggtcgcgtggtggcagccaggcgagtagccgtagcagctcccgctctcgcaactcgtcccgtaactccactccgggctcttctcgcggcacgtccccggctcgtatggcaggtaacggtggtgacgctgctctggcgctgctactgctggacaggctgaaccagctggagtcgaagatgagtggtaaaggccaacagcagcagggccagaccgttaccaaaaagagcgcagctgaagcatctaaaaaaccgcgacagaaacgtaccgcgactaaagcgtacaatgtaacacaggccttcggtcgtcgaggtccggagcaaactcaaggaaactttggcgattcggaattaatccgccaggggaccgactacaaacactggccgcaaattgcccagttcgccccatccgctagtgcattcttcggtatgagccgcatcggcatggaagtaacgccaagtggtacgtggctgacctacaccggtgctatcaagcttgatgacaaggacccgaactttaaagaccaggttattctgcttaacaaacatattgatgcctataaaactttcccgccgaccgaacccaaaaaggacaaaaagaaaaaagctgatgaaacccaggctctaccgcagcgtcagaaaaaacagcaaactgtgactctgctgccagctgcggacctggatgatttttccaagcagctgcaacagtctatgagctctgcggactctacgcaggcttaa

SEQ ID NO: 20 - DNA, 2016 bp, Artificial Sequence
  Description of Artificial Sequence: Synthetic polynucleotide
atgcaccatcatcaccatcatggtggttctggttcgccgatacttggttattggaagattaaaggactggttcagcccacacgcctcctgctagaatacttagaggaaaaatatgaagagcacctgtacgaacgtgatgagggggacaaatggcgaaacaagaaatttgaattgggcttagaatttccaaatttgccgtattatatcgatggcgacgtaaaactgacccaatcaatggccattattcgctacatcgcagataaacataacatgctgggtggctgccctaaagaacgggctgagatctccatgctggaaggtgcggtgctcgacattcgctacggcgtcagtagaattgcgtatagcaaggatttcgaaactttaaaagtggatttcctgagcaaacttccggagatgctgaaaatgtttgaggataggctttgtcataagacgtatctcaatggtgatcatgttacccacccggactttatgctgtacgacgcccttgatgtcgttctgtatatggatcccatgtgcctggacgccttcccgaaattagtgtgttttaaaaaacgtatcgaagcgattccacagatcgataaatacttgaagtcttctaaatatattgcttggcctctgcaaggctggcaggcaacgttcggtgggggagatcatccgccaaaatcagatctggtgccgcgtgggagccctggcatacaccgcgacggtggttctggtgagaacctgtactttcaaagctcagataatgggcctcaaaaccagcgcaacgctccacgtataaccttcggtggcccgtctgactccacaggcagcaaccagaatggtgagcgtagtggagccaggtctaagcagcgccgtccccagggtctgccgaacaacacggcgagctggtttactgcgcttacccaacacggtaaagaagacttaaaattcccgcgtggccagggcgtcccgatcaacactaactcttccccggatgatcagattggttattaccgcagagcaactcgtcggattcgcggcggcgacggtaaaatgaaagatttgtctccgcgttggtacttttactatctcggcaccggtccggaagctggactgccctacggggcaaacaaggacgggatcatttgggtggctaccgaaggtgccctgaatactccaaaagatcatatcggcacccgtaaccctgctaataacgctgcgatcgttctgcaactgcctcagggtacaactctgccaaaaggcttctatgcagaagggtcgcgtggtggcagccaggcgagtagccgtagcagcgagcgctctcgcaactcgtcccgtaactccactccgggcgaagagcgcggcacggaaccggctcgtatggcaggtaacggtggtgacgctgctctggcgctgctactgctggacaggctgaaccagctggagtcgaagatgagtggtaaaggccaacagcagcagggccagaccgttaccaaaaagagcgcagctgaagcatctaaaaaaccgcgacagaaacgtaccgcgactaaagcgtacaatgtaacacaggccttcggtcgtcgaggtccggagcaaactcaaggaaactttggcgatcaggaattaatccgccaggggaccgactacaaacactggccgcaaattgcccagttcgccccatccgctagtgcattcttcggtatgagccgcatcggcatggaagtaacgccaagtggtacgtggctgacctacaccggtgctatcaagcttgatgacaaggacccgaactttaaagaccaggttattctgcttaacaaacatattgatgcctataaaactttcccgccgaccgaacccaaaaaggacaaaaagaaaaaagctgatgaaacccaggctctaccgcagcgtcagaaaaaacagcaaactgtgactctgctgccagctgcggacctggatgatttttccaagcagctgcaacagtctatgagctctgcggactctacgcaggcttaa

SEQ ID NO: 21 - DNA, 2016 bp, Artificial Sequence
  Description of Artificial Sequence: Synthetic polynucleotide
atgcaccatcatcaccatcatggtggttctggttcgccgatacttggttattggaagattaaaggactggttcagcccacacgcctcctgctagaatacttagaggaaaaatatgaagagcacctgtacgaacgtgatgagggggacaaatggcgaaacaagaaatttgaattgggcttagaatttccaaatttgccgtattatatcgatggcgacgtaaaactgacccaatcaatggccattattcgctacatcgcagataaacataacatgctgggtggctgccctaaagaacgggctgagatctccatgctggaaggtgcggtgctcgacattcgctacggcgtcagtagaattgcgtatagcaaggatttcgaaactttaaaagtggatttcctgagcaaacttccggagatgctgaaaatgtttgaggataggctttgtcataagacgtatctcaatggtgatcatgttacccacccggactttatgctgtacgacgcccttgatgtcgttctgtatatggatcccatgtgcctggacgccttcccgaaattagtgtgttttaaaaaacgtatcgaagcgattccacagatcgataaatacttgaagtcttctaaatatattgcttggcctctgcaaggctggcaggcaacgttcggtgggggagatcatccgccaaaatcagatctggtgccgcgtgggagccctggcatacaccgcgacggtggttctggtgagaacctgtactttcaaagctcagataatgggcctcaaaaccagcgcaacgctccacgtataaccttcggtggcccgtctgactccacaggcagcaaccagaatggtgagcgtagtggagccaggtctaagcagcgccgtccccagggtctgccgaacaacacggcgagctggtttactgcgcttacccaaaatggtaaagaagacttaaaattcccgcgtggccagggcgtcccgatcaacactaactcttccccggatgatcagattggttattaccgcagagcaactcgtcggattcgcggcggcgacggtaaaatgaaagatttgtctccgcgttggtacttttactatctcggcaccggtccggaagctggactgccctacggggcaaacaaggacgggatcatttgggtggctaccgaaggtgccctgaatactccaaaagatcatatcggcacccgtaaccctgctaataacgctgcgatcgttctgcaactgcctcagggtacaactctgccaaaaggcttctatgcagaagggtcgcgtggtggcagccaggcgagtagccgtagcagctcccgctctcgcaactcgtcccgtaactccactccgggctcttctcgcggcacgtccccggctcgtatggcaggtaacggtggtgacgctgctctggcgctgctactgctggacaggctgaaccagctggagtcgaagatgagtggtaaaggccaacagcagcagggccagaccgttaccaaaaagagcgcagctgaagcatctaaaaaaccgcgacagaaacgtaccgcgactaaagcgtacaatgtaacacaggccttcggtcgtcgaggtccggagcaaactcaaggaaactttggcgatcaggaattaatccgccaggggaccgactacaaacactggccgcaaattgcccagttcgccccatccgctagtgcattcttcggtatgagccgcatcggcatggaagtaacgccaagtggtacgtggctgacctacaccggtgctatcaagcttgatgacaaggacccgaactttaaagaccaggttattctgcttaacaaacatattgatgcctataaaactttcccgccgaccgaacccaaaaaggacaaaaagaaaaaagctgatgaaacccaggctctaccgcagcgtcagaaaaaacagcaaactgtgactctgctgccagctgcggacctggatgatttttccaagcagctgcaacagtctatgagctctgcggactctacgcaggcttaa

SEQ ID NO: 22 - DNA, 2016 bp, Artificial Sequence
  Description of Artificial Sequence: Synthetic polynucleotide
atgcaccatcatcaccatcatggtggttctggttcgccgatacttggttattggaagattaaaggactggttcagcccacacgcctcctgctagaatacttagaggaaaaatatgaagagcacctgtacgaacgtgatgagggggacaaatggcgaaacaagaaatttgaattgggcttagaatttccaaatttgccgtattatatcgatggcgacgtaaaactgacccaatcaatggccattattcgctacatcgcagataaacataacatgctgggtggctgccctaaagaacgggctgagatctccatgctggaaggtgcggtgctcgacattcgctacggcgtcagtagaattgcgtatagcaaggatttcgaaactttaaaagtggatttcctgagcaaacttccggagatgctgaaaatgtttgaggataggctttgtcataagacgtatctcaatggtgatcatgttacccacccggactttatgctgtacgacgcccttgatgtcgttctgtatatggatcccatgtgcctggacgccttcccgaaattagtgtgttttaaaaaacgtatcgaagcgattccacagatcgataaatacttgaagtcttctaaatatattgcttggcctctgcaaggctggcaggcaacgttcggtgggggagatcatccgccaaaatcagatctggtgccgcgtgggagccctggcatacaccgcgacggtggttctggtgagaacctgtactttcaaagctcagataatgggcctcaaaaccagcgcaacgctccacgtataaccttcggtggcccgtctgactccacaggcagcaaccagaatggtgagcgtagtggagccaggtctaagcagcgccgtccccagggtctgccgaacaacacggcgagctggtttactgcgcttacccaacacggtaaagaagacttaaaattcccgcgtggccagggcgtcccgatcaacgaaaactcttccccggatgatcagattggttattaccgcagagcaactcgtcggattcgcggcggcgacggtaaaatgaaagatttgtctccgcgttggtacttttactatctcggcaccggtccggaagctggactgccctacggggcaaacaaggacgggatcatttgggtggctaccgaaggtgccctgaatactccaaaagatcatatcggcacccgtaaccctgctaataacgctgcgatcgttctgcaactgcctcagggtacaactctgccaaaaggcttctatgcagaagggtcgcgtggtggcagccaggcgagtagccgtagcagctcccgctctcgcaactcgtcccgtaactccactccgggctcttctcgcggcacgtccccggctcgtatggcaggtaacggtggtgacgctgctctggcgctgctactgctggacaggctgaaccagctggagtcgaagatgagtggtaaaggccaacagcagcagggccagaccgttaccaaaaagagcgcagctgaagcatctaaaaaaccgcgacagaaacgtaccgcgactaaagcgtacaatgtaacacaggccttcggtcgtcgaggtccggagcaaactcaaggaaactttggcgatcaggaattaatccgccaggggaccgactacaaacactggccgcaaattgcccagttcgccccatccgctagtgcattcttcggtatgagccgcatcggcatggaagtaacgccaagtggtacgtggctgacctacaccggtgctatcaagcttgatgacaaggacccgaactttaaagaccaggttattctgcttaacaaacatattgatgcctataaaactttcccgccgaccgaacccaaaaaggacaaaaagaaaaaagctgatgaaacccaggctctaccgcagcgtcagaaaaaacagcaaactgtgactctgctgccagctgcggacctggatgatttttccaagcagctgcaacagtctatgagctctgcggactctacgcaggcttaa

SEQ ID NO: 23 - DNA, 2016 bp, Artificial Sequence
  Description of Artificial Sequence: Synthetic polynucleotide
atgcaccatcatcaccatcatggtggttctggttcgccgatacttggttattggaagattaaaggactggttcagcccacacgcctcctgctagaatacttagaggaaaaatatgaagagcacctgtacgaacgtgatgagggggacaaatggcgaaacaagaaatttgaattgggcttagaatttccaaatttgccgtattatatcgatggcgacgtaaaactgacccaatcaatggccattattcgctacatcgcagataaacataacatgctgggtggctgccctaaagaacgggctgagatctccatgctggaaggtgcggtgctcgacattcgctacggcgtcagtagaattgcgtatagcaaggatttcgaaactttaaaagtggatttcctgagcaaacttccggagatgctgaaaatgtttgaggataggctttgtcataagacgtatctcaatggtgatcatgttacccacccggactttatgctgtacgacgcccttgatgtcgttctgtatatggatcccatgtgcctggacgccttcccgaaattagtgtgttttaaaaaacgtatcgaagcgattccacagatcgataaatacttgaagtcttctaaatatattgcttggcctctgcaaggctggcaggcaacgttcggtgggggagatcatccgccaaaatcagatctggtgccgcgtgggagccctggcatacaccgcgacggtggttctggtgagaacctgtactttcaaagctcagataatgggcctcaaaaccagcgcaacgctccacgtataaccttcggtggcccgtctgactccacaggcagcaaccagaatggtgagcgtagtggagccaggtctaagcagcgccgtccccagggtctgccgaacaacacggcgagctggtttactgcgcttacccaacacggtaaagaagacttaaaattcccgaaaggccagggcgtcccgatcaacactaactctaagccggatgatcagattggttattaccgcagagaagtgcgtcggtatcgcggcggcgacggtcaaatgaaagatttgaatccgcgttggtacttttactatctcggcaccggtccggaagctggactgccctacggggcaaacaaggacgggatcatttgggtggctaccgaaggtgccctgaatactccaaaagatcatatcggcacccgtaaccctgctaataacgctgcgatcgttctgcaactgcctcagggtacaactctgccaaaaggcttctatgcagaagggtcgcgtggtggcagccaggcgagtagccgtagcagctcccgctctcgcaactcgtcccgtaactccactccgggctcttctcgcggcacgtccccggctcgtatggcaggtaacggtggtgacgctgctctggcgctgctactgctggacaggctgaaccagctggagtcgaagatgagtggtaaaggccaacagcagcagggccagaccgttaccaaaaagagcgcagctgaagcatctaaaaaaccgcgacagaaacgtaccgcgactaaagcgtacaatgtaacacaggccttcggtcgtcgaggtccggagcaaactcaaggaaactttggcgatcaggaattaatccgccaggggaccgactacaaacactggccgcaaattgcccagttcgccccatccgctagtgcattcttcggtatgagccgcatcggcatggaagtaacgccaagtggtacgtggctgacctacaccggtgctatcaagcttgatgacaaggacccgaactttaaagaccaggttattctgcttaacaaacatattgatgcctataaaactttcccgccgaccgaacccaaaaaggacaaaaagaaaaaagctgatgaaacccaggctctaccgcagcgtcagaaaaaacagcaaactgtgactctgctgccagctgcggacctggatgatttttccaagcagctgcaacagtctatgagctctgcggactctacgcaggcttaa

SEQ ID NO: 24 - DNA, 2016 bp, Artificial Sequence
  Description of Artificial Sequence: Synthetic polynucleotide
atgcaccatcatcaccatcatggtggttctggttcgccgatacttggttattggaagattaaaggactggttcagcccacacgcctcctgctagaatacttagaggaaaaatatgaagagcacctgtacgaacgtgatgagggggacaaatggcgaaacaagaaatttgaattgggcttagaatttccaaatttgccgtattatatcgatggcgacgtaaaactgacccaatcaatggccattattcgctacatcgcagataaacataacatgctgggtggctgccctaaagaacgggctgagatctccatgctggaaggtgcggtgctcgacattcgctacggcgtcagtagaattgcgtatagcaaggatttcgaaactttaaaagtggatttcctgagcaaacttccggagatgctgaaaatgtttgaggataggctttgtcataagacgtatctcaatggtgatcatgttacccacccggactttatgctgtacgacgcccttgatgtcgttctgtatatggatcccatgtgcctggacgccttcccgaaattagtgtgttttaaaaaacgtatcgaagcgattccacagatcgataaatacttgaagtcttctaaatatattgcttggcctctgcaaggctggcaggcaacgttcggtgggggagatcatccgccaaaatcagatctggtgccgcgtgggagccctggcatacaccgcgacggtggttctggtgagaacctgtactttcaaagctcagataatgggcctcaaaaccagcgcaacgctccacgtataaccttcggtggcccgtctgactccacaggcagcaaccagaatggtgagcgtagtggagccaggtctaagcagcgccgtccccagggtctgccgaacaacacggcgagctggtttactgcgcttacccaacacggtaaagaagacttaaaattcccgcgtggccagggcgtcccgatcaacactaactcttccccggatgatcagattggttattaccgcagagcaactcgtcggattcgcggcggcgacggtaaaatgaaagatttgtctccgcgttggtacttttactatctcggcaccggtccggaagctggactgccctacggggcaaacaaggacgggatcatttgggtggctaccgaaggtgccctgaatactccaaaagatcatatcggcacccgtaaccctgctaataacgctgcgatcgttctgcaactgcctcagggtacaactctgccaaaaggcttctatgcagaagggtcgcgtggtggcagccaggcgagtagccgtagcagctcccgctctcgcaactcgtcccgtaactccactccgggctcttctcgcggcacgtccccggctcgtatggcaggtaacggtggtgacgctgctctggcgctgctactgctggacaggctgaaccagctggagtcgaagatgagtggtaaaggccaacagcagcagggccagaccgttaccaaaaagagcgcagctgaagcatctaaaaaaccgcgacagaaacgtaccgcgactaaagcgtacaatgtaacacaggccttcggtcgtcgaggtccggagcaaactcaaggaaactttggcgatgaagaattaatccgccaggggaccgactacaaacactggccgcaaattgcccagttcgccccatccgctagtgcattcttcggtatgagccgcatcggcatggaagtaacgccaagtggtacgtggctgacctacaccggtgctatcaagcttgatgacaaggacccgaactttaaagaccaggttattctgcttaacaaacatattgatgcctataaaactttcccgccgaccgaacccaaaaaggacaaaaagaaaaaagctgatgaaacccaggctctaccgcagcgtcagaaaaaacagcaaactgtgactctgctgccagctgcggacctggatgatttttccaagcagctgcaacagtctatgagctctgcggactctacgcaggcttaa

SEQ ID NO: 25 - DNA, 2016 bp, Artificial Sequence
  Description of Artificial Sequence: Synthetic polynucleotide
atgcaccatcatcaccatcatggtggttctggttcgccgatacttggttattggaagattaaaggactggttcagcccacacgcctcctgctagaatacttagaggaaaaatatgaagagcacctgtacgaacgtgatgagggggacaaatggcgaaacaagaaatttgaattgggcttagaatttccaaatttgccgtattatatcgatggcgacgtaaaactgacccaatcaatggccattattcgctacatcgcagataaacataacatgctgggtggctgccctaaagaacgggctgagatctccatgctggaaggtgcggtgctcgacattcgctacggcgtcagtagaattgcgtatagcaaggatttcgaaactttaaaagtggatttcctgagcaaacttccggagatgctgaaaatgtttgaggataggctttgtcataagacgtatctcaatggtgatcatgttacccacccggactttatgctgtacgacgcccttgatgtcgttctgtatatggatcccatgtgcctggacgccttcccgaaattagtgtgttttaaaaaacgtatcgaagcgattccacagatcgataaatacttgaagtcttctaaatatattgcttggcctctgcaaggctggcaggcaacgttcggtgggggagatcatccgccaaaatcagatctggtgccgcgtgggagccctggcatacaccgcgacggtggttctggtgagaacctgtactttcaaagctcagataatgggcctcaaaaccagcgcaacgctccacgtataaccttcggtggcccgtctgactccacaggcagcaaccagaatggtgagcgtagtggagccaggtctaagcagcgccgtccccagggtctgccgaacaacacggcgagctggtttactgcgcttacccaacacggtaaagaagacttaaaattcccgcgtggccagggcgtcccgatcaacactaactcttccccggatgatcagattggttattaccgcagagcaactcgtcggattcgcggcggcgacggtaaaatgaaagatttgtctccgcgttggtacttttactatctcggcaccggtccgtatgctggactgccctacggggcaaacaaggacgggatcatttgggtggctaccgaaggtgccctgaatactccaaaagatcatatcggcacccgtaaccctgctaataacgctgcgatcgttctgcaactgcctcagggtacaactctgccaaaaggcttctatgcagaagggtcgcgtggtggcagccaggcgagtagccgtagcagctcccgctctcgcaactcgtcccgtaactccactccgggctcttctcgcggcacgtccccggctcgtatggcaggtaacggtggtgacgctgctctggcgctgctactgctggacaggctgaaccagctggagtcgaagatgagtggtaaaggccaacagcagcagggccagaccgttaccaaaaagagcgcagctgaagcatctaaaaaaccgcgacagaaacgtaccgcgactaaagcgtacaatgtaacacaggccttcggtcgtcgaggtccggagcaaactcaaggaaactttggcgatcaggaattaatccgccaggggaccgactacaaacactggccgcaaattgcccagttcgccccatccgctagtgcattcttcggtatgagccgcatcggcatggaagtaacgccaagtggtacgtggctgacctacaccggtgctatcaagcttgatgacaaggacccgaactttaaagaccaggttattctgcttaacaaacatattgatgcctataaaactttcccgccgaccgaacccaaaaaggacaaaaagaaaaaagctgatgaaacccaggctctaccgcagcgtcagaaaaaacagcaaactgtgactctgctgccagctgcggacctggatgatttttccaagcagctgcaacagtctatgagctctgcggactctacgcaggcttaa

SEQ ID NO: 26 - DNA, 2016 bp, Artificial Sequence
  Description of Artificial Sequence: Synthetic polynucleotide
atgcaccatcatcaccatcatggtggttctggttcgccgatacttggttattggaagattaaaggactggttcagcccacacgcctcctgctagaatacttagaggaaaaatatgaagagcacctgtacgaacgtgatgagggggacaaatggcgaaacaagaaatttgaattgggcttagaatttccaaatttgccgtattatatcgatggcgacgtaaaactgacccaatcaatggccattattcgctacatcgcagataaacataacatgctgggtggctgccctaaagaacgggctgagatctccatgctggaaggtgcggtgctcgacattcgctacggcgtcagtagaattgcgtatagcaaggatttcgaaactttaaaagtggatttcctgagcaaacttccggagatgctgaaaatgtttgaggataggctttgtcataagacgtatctcaatggtgatcatgttacccacccggactttatgctgtacgacgcccttgatgtcgttctgtatatggatcccatgtgcctggacgccttcccgaaattagtgtgttttaaaaaacgtatcgaagcgattccacagatcgataaatacttgaagtcttctaaatatattgcttggcctctgcaaggctggcaggcaacgttcggtgggggagatcatccgccaaaatcagatctggtgccgcgtgggagccctggcatacaccgcgacggtggttctggtgagaacctgtactttcaaagctcagataatgggcctcaaaaccagcgcaacgctccacgtataaccttcggtggcccgtctgactccacaggcagcaaccagaatggtgagcgtagtggagccaggtctaagcagcgccgtccccagggtctgccgaacaacacggcgagctggtttactgcgcttacccaacacggtaaagaagacttaaaattcccgcgtggccagggcgtcccgatcaacactaactcttccccggatgatcagattggttattaccgcagagcaactcgtcggattcgcggcggcgacggtaaaatgaaagatttgtctccgcgttggtacttttactatctcggcaccggtccggaagctggactgccctacggggcaaacaaggacgggatcatttgggtggctaccgaaggtgccctgaatactccaaaagatcatatcggcacccgtaaccctgctaataacgctgcgatcgttctgcaactggcgcagggtacaactctgccaaaaggcttctatgcagaagggtcgcgtggtggcagccaggcgagtagccgtagcagctcccgctctcgcaactcgtcccgtaactccactccgggctcttctcgcggcacgtccccggctcgtatggcaggtaacggtggtgacgctgctctggcgctgctactgctggacaggctgaaccagctggagtcgaagatgagtggtaaaggccaacagcagcagggccagaccgttaccaaaaagagcgcagctgaagcatctaaaaaaccgcgacagaaacgtaccgcgactaaagcgtacaatgtaacacaggccttcggtcgtcgaggtccggagcaaactcaaggaaactttggcgatcaggaattaatccgccaggggaccgactacaaacactggccgcaaattgcccagttcgccccatccgctagtgcattcttcggtatgagccgcatcggcatggaagtaacgccaagtggtacgtggctgacctacaccggtgctatcaagcttgatgacaaggacccgaactttaaagaccaggttattctgcttaacaaacatattgatgcctataaaactttcccgccgaccgaacccaaaaaggacaaaaagaaaaaagctgatgaaacccaggctctaccgcagcgtcagaaaaaacagcaaactgtgactctgctgccagctgcggacctggatgatttttccaagcagctgcaacagtctatgagctctgcggactctacgcaggcttaa

SEQ ID NO: 27 - DNA, 2016 bp, Artificial Sequence
  Description of Artificial Sequence: Synthetic polynucleotide
atgcaccatcatcaccatcatggtggttctggttcgccgatacttggttattggaagattaaaggactggttcagcccacacgcctcctgctagaatacttagaggaaaaatatgaagagcacctgtacgaacgtgatgagggggacaaatggcgaaacaagaaatttgaattgggcttagaatttccaaatttgccgtattatatcgatggcgacgtaaaactgacccaatcaatggccattattcgctacatcgcagataaacataacatgctgggtggctgccctaaagaacgggctgagatctccatgctggaaggtgcggtgctcgacattcgctacggcgtcagtagaattgcgtatagcaaggatttcgaaactttaaaagtggatttcctgagcaaacttccggagatgctgaaaatgtttgaggataggctttgtcataagacgtatctcaatggtgatcatgttacccacccggactttatgctgtacgacgcccttgatgtcgttctgtatatggatcccatgtgcctggacgccttcccgaaattagtgtgttttaaaaaacgtatcgaagcgattccacagatcgataaatacttgaagtcttctaaatatattgcttggcctctgcaaggctggcaggcaacgttcggtgggggagatcatccgccaaaatcagatctggtgccgcgtgggagccctggcatacaccgcgacggtggttctggtgagaacctgtactttcaaagctcagataatgggcctcaaaaccagcgcaacgctccacgtataaccttcggtggcccgtctgactccacaggcagcaaccagaatggtgagcgtagtggagccaggtctaagcagcgccgtccccagggtctgccgaacaacacggcgagctggtttactggccttacccaatttggtaaagaagacttaaaattcccgccgggccagggcgtcccgatcaacactaactcttccccggatgatcagattggttattaccgcagagcaactcgtcggattcgcggcggcgacggtaaaatgaaagatttgccaccgcgttggtacttttactatctcggcaccggtccgcatgctgatctgccctacgggcaaaagcaagacggggttttttgggtggctcgcccaggtgccctgaatactccaaaagatcatatcggcacccgtaaccctgctaataacgctgcgatcccactgcaactgcctccgggtacaaaactgccaaaaggcttctatgcagaagggtcgcgtggtggcagccaggcgagtagccgtagcagctcccgctctcgcaactcgtcccgtaactccactccgggctcttctcgcggcacgtccccggctcgtatggcaggtaacggtggtgacgctgctctggcgctgctactgctggacaggctgaaccagctggagtcgaagatgagtggtaaaggccaacagcagcagggccagaccgttaccaaaaagagcgcagctgaagcatctaaaaaaccgcgacagaaacgtaccgcgactaaagcgtacaatgtaacacaggccttcggtcgtcgaggtccggagcaaactcaaggaaactttggcgatcaggaattaatccgccaggggaccgactacaaacactggccgcaaattgcccagttcgccccatccgctagtgcattcttcggtatgagccgcatcggcatggaagtaacgccaagtggtacgtggctgacctacaccggtgctatcaagcttgatgacaaggacccgaactttaaagaccaggttattctgcttaacaaacatattgatgcctataaaactttcccgccgaccgaacccaaaaaggacaaaaagaaaaaagctgatgaaacccaggctctaccgcagcgtcagaaaaaacagcaaactgtgactctgctgccagctgcggacctggatgatttttccaagcagctgcaacagtctatgagctctgcggactctacgcaggcttaa

SEQ ID NO: 28 - DNA, 2016 bp, Artificial Sequence
  Description of Artificial Sequence: Synthetic polynucleotide
atgcaccatcatcaccatcatggtggttctggttcgccgatacttggttattggaagattaaaggactggttcagcccacacgcctcctgctagaatacttagaggaaaaatatgaagagcacctgtacgaacgtgatgagggggacaaatggcgaaacaagaaatttgaattgggcttagaatttccaaatttgccgtattatatcgatggcgacgtaaaactgacccaatcaatggccattattcgctacatcgcagataaacataacatgctgggtggctgccctaaagaacgggctgagatctccatgctggaaggtgcggtgctcgacattcgctacggcgtcagtagaattgcgtatagcaaggatttcgaaactttaaaagtggatttcctgagcaaacttccggagatgctgaaaatgtttgaggataggctttgtcataagacgtatctcaatggtgatcatgttacccacccggactttatgctgtacgacgcccttgatgtcgttctgtatatggatcccatgtgcctggacgccttcccgaaattagtgtgttttaaaaaacgtatcgaagcgattccacagatcgataaatacttgaagtcttctaaatatattgcttggcctctgcaaggctggcaggcaacgttcggtgggggagatcatccgccaaaatcagatctggtgccgcgtgggagccctggcatacaccgcgacggtggttctggtgagaacctgtactttcaaagctcagataatgggcctcaaaaccagcgcaacgctccacgtataaccttcggtggcccgtctgactccacaggcagcaaccagaatggtgagcgtagtggagccaggtctaagcagcgccgtccccagggtctgccgaacaacacggcgagctggtttactgcgcttacccaacacggtaaagaagacttaaaattcccgcgtggccagggcgtcccgatcaacactaactcttccccggatgatcagattggttattaccgcagagcaactcgtcggattcgcggcggcgacggtaaaatgaaagatttgtctccgcgttggtacttttactatctcggcaccggtccggaagctggactgccctacggggcaaacaaggacggggtaatttgggtggctaccgaaggtgccctgaatactccaaaagatcatatcggcacccgtaaccctgctaataacgctgcgatcgttctgcaactgcctcagggtacaactctgccaaaaggcttctatgcagaagggtcgcgtggtggcagccaggcgagtagccgtagcagctcccgctctcgcaactcgtcccgtaactccactccgggctcttctcgcggcacgtccccggctcgtatggcaggtaacggtggtgacgctgctctggcgctgctactgctggacaggctgaaccagctggagtcgaagatgagtggtaaaggccaacagcagcagggccagaccgttaccaaaaagagcgcagctgaagcatctaaaaaaccgcgacagaaacgtaccgcgactaaagcgtacaatgtaacacaggccttcggtcgtcgaggtccggagcaaactcaaggaaactttggcgatcaggaattaatccgccaggggaccgactacaaacactggccgcaaattgcccagttcgccccatccgctagtgcattcttcggtatgagccgcatcggcatggaagtaacgccaagtggtacgtggctgacctacaccggtgctatcaagcttgatgacaaggacccgaactttaaagaccaggttattctgcttaacaaacatattgatgcctataaaactttcccgccgaccgaacccaaaaaggacaaaaagaaaaaagctgatgaaacccaggctctaccgcagcgtcagaaaaaacagcaaactgtgactctgctgccagctgcggacctggatgatttttccaagcagctgcaacagtctatgagctctgcggactctacgcaggcttaa

SEQ ID NO: 29 - DNA, 2016 bp, Artificial Sequence
  Description of Artificial Sequence: Synthetic polynucleotide
atgcaccatcatcaccatcatggtggttctggttcgccgatacttggttattggaagattaaaggactggttcagcccacacgcctcctgctagaatacttagaggaaaaatatgaagagcacctgtacgaacgtgatgagggggacaaatggcgaaacaagaaatttgaattgggcttagaatttccaaatttgccgtattatatcgatggcgacgtaaaactgacccaatcaatggccattattcgctacatcgcagataaacataacatgctgggtggctgccctaaagaacgggctgagatctccatgctggaaggtgcggtgctcgacattcgctacggcgtcagtagaattgcgtatagcaaggatttcgaaactttaaaagtggatttcctgagcaaacttccggagatgctgaaaatgtttgaggataggctttgtcataagacgtatctcaatggtgatcatgttacccacccggactttatgctgtacgacgcccttgatgtcgttctgtatatggatcccatgtgcctggacgccttcccgaaattagtgtgttttaaaaaacgtatcgaagcgattccacagatcgataaatacttgaagtcttctaaatatattgcttggcctctgcaaggctggcaggcaacgttcggtgggggagatcatccgccaaaatcagatctggtgccgcgtgggagccctggcatacaccgcgacggtggttctggtgagaacctgtactttcaaagctcagataatgggcctcaaaaccagcgcaacgctccacgtataaccttcggtggcccgtctgactccacaggcagcaaccagaatggtgagcgtagtggagccaggtctaagcagcgccgtccccagggtctgccgaacaacacggcgagctggtttcaagcgcttacccaacacggtaaagaagacttaaaattcccgcgtggccagggcgtcccgatcaacactaactcttccccggatgatcagattggttattaccgcagagcaactcgtcggattcgcggcggcgacggtaaaatgaaagatttgtctccgcgttggtacttttactatctcggcaccggtccggaagctggactgccctacggggcaaacaaggacgggatcatttgggtggctaccgaaggtgccctgaatactccaaaagatcatatcggcacccgtaaccctgctaataacgctgcgatcgttctgcaactgcctcagggtacaactctgccaaaaggcttctatgcagaagggtcgcgtggtggcagccaggcgagtagccgtagcagctcccgctctcgcaactcgtcccgtaactccactccgggctcttctcgcggcacgtccccggctcgtatggcaggtaacggtggtgacgctgctctggcgctgctactgctggacaggctgaaccagctggagtcgaagatgagtggtaaaggccaacagcagcagggccagaccgttaccaaaaagagcgcagctgaagcatctaaaaaaccgcgacagaaacgtaccgcgactaaagcgtacaatgtaacacaggccttcggtcgtcgaggtccggagcaaactcaaggaaactttggcgatcaggaattaatccgccaggggaccgactacaaacactggccgcaaattgcccagttcgccccatccgctagtgcattcttcggtatgagccgcatcggcatggaagtaacgccaagtggtacgtggctgacctacaccggtgctatcaagcttgatgacaaggacccgaactttaaagaccaggttattctgcttaacaaacatattgatgcctataaaactttcccgccgaccgaacccaaaaaggacaaaaagaaaaaagctgatgaaacccaggctctaccgcagcgtcagaaaaaacagcaaactgtgactctgctgccagctgcggacctggatgatttttccaagcagctgcaacagtctatgagctctgcggactctacgcaggcttaa

SEQ ID NO: 30 - DNA, 2016 bp, Artificial Sequence
  Description of Artificial Sequence: Synthetic polynucleotide
atgcaccatcatcaccatcatggtggttctggttcgccgatacttggttattggaagattaaaggactggttcagcccacacgcctcctgctagaatacttagaggaaaaatatgaagagcacctgtacgaacgtgatgagggggacaaatggcgaaacaagaaatttgaattgggcttagaatttccaaatttgccgtattatatcgatggcgacgtaaaactgacccaatcaatggccattattcgctacatcgcagataaacataacatgctgggtggctgccctaaagaacgggctgagatctccatgctggaaggtgcggtgctcgacattcgctacggcgtcagtagaattgcgtatagcaaggatttcgaaactttaaaagtggatttcctgagcaaacttccggagatgctgaaaatgtttgaggataggctttgtcataagacgtatctcaatggtgatcatgttacccacccggactttatgctgtacgacgcccttgatgtcgttctgtatatggatcccatgtgcctggacgccttcccgaaattagtgtgttttaaaaaacgtatcgaagcgattccacagatcgataaatacttgaagtcttctaaatatattgcttggcctctgcaaggctggcaggcaacgttcggtgggggagatcatccgccaaaatcagatctggtgccgcgtgggagccctggcatacaccgcgacggtggttctggtgagaacctgtactttcaaagctcagataatgggcctcaaaaccagcgcaacgctccacgtataaccttcggtggcccgtctgactccacaggcagcaaccagaatggtgagcgtagtggagccaggtctaagcagcgccgtccccagggtctgccgaacaacacggcgagctggtttactggccttacccaacacggtaaagaagacttaaaattcccgccaggccagggcgtcccgatcaacactaactcttccccggatgatcagattggttattaccgcagagcaactcgtcggattcgcggcggcgacggtaaaatgaaagatttgccaccgcgttggtacttttactatctcggcaccggtccggaagctgatctgccctacgggcaagttaagcctgggatcgtgtgggtggctgaggaaggtgccctgaatactccaaaagatcatatcggcacccgtaaccctgctaataacgctgcgatcccgctgcaactgcctccgggtacaactctgccaaaaggcttctatgcagaagggtcgcgtggtggcagccaggcgagtagccgtagcagctcccgctctcgcaactcgtcccgtaactccactccgggctcttctcgcggcacgtccccggctcgtatggcaggtaacggtggtgacgctgctctggcgctgctactgctggacaggctgaaccagctggagtcgaagatgagtggtaaaggccaacagcagcagggccagaccgttaccaaaaagagcgcagctgaagcatctaaaaaaccgcgacagaaacgtaccgcgactaaagcgtacaatgtaacacaggccttcggtcgtcgaggtccggagcaaactcaaggaaactttggcgatcaggaattaatccgccaggggaccgactacaaacactggccgcaaattgcccagttcgccccatccgctagtgcattcttcggtatgagccgcatcggcatggaagtaacgccaagtggtacgtggctgacctacaccggtgctatcaagcttgatgacaaggacccgaactttaaagaccaggttattctgcttaacaaacatattgatgcctataaaactttcccgccgaccgaacccaaaaaggacaaaaagaaaaaagctgatgaaacccaggctctaccgcagcgtcagaaaaaacagcaaactgtgactctgctgccagctgcggacctggatgatttttccaagcagctgcaacagtctatgagctctgcggactctacgcaggcttaa

SEQ ID NO: 31 - DNA, 2016 bp, Artificial Sequence
  Description of Artificial Sequence: Synthetic polynucleotide
atgcaccatcatcaccatcatggtggttctggttcgccgatacttggttattggaagattaaaggactggttcagcccacacgcctcctgctagaatacttagaggaaaaatatgaagagcacctgtacgaacgtgatgagggggacaaatggcgaaacaagaaatttgaattgggcttagaatttccaaatttgccgtattatatcgatggcgacgtaaaactgacccaatcaatggccattattcgctacatcgcagataaacataacatgctgggtggctgccctaaagaacgggctgagatctccatgctggaaggtgcggtgctcgacattcgctacggcgtcagtagaattgcgtatagcaaggatttcgaaactttaaaagtggatttcctgagcaaacttccggagatgctgaaaatgtttgaggataggctttgtcataagacgtatctcaatggtgatcatgttacccacccggactttatgctgtacgacgcccttgatgtcgttctgtatatggatcccatgtgcctggacgccttcccgaaattagtgtgttttaaaaaacgtatcgaagcgattccacagatcgataaatacttgaagtcttctaaatatattgcttggcctctgcaaggctggcaggcaacgttcggtgggggagatcatccgccaaaatcagatctggtgccgcgtgggagccctggcatacaccgcgacggtggttctggtgagaacctgtactttcaaagctcagataatgggcctcaaaaccagcgcaacgctccacgtataaccttcggtggcccgtctgactccacaggcagcaaccagaatggtgagcgtagtggagccaggtctaagcagcgccgtccccagggtctgccgaacaacacggcgagctggtttactgcgcttacccaacacggtaaagaagacttaaaattcccgcgtggccagggcgtcccgatcaacactaactcttccccggatgatcagattggttattaccgcagagcaactcgtcggattcgcggcggcgacggtaaaatgaaagatttgtctccgcgttggtacttttactatctcggcaccggtccggaagctggactgccctacggggcaaacaaggacgggatcatttgggtggctaccgaaggtgccctgaatactccaaaagatcatatcggcacccgtaaccctgctaataacgctgcgatcgttctgcaactgcctcagggtacaactctgccaaaaggcttctatgcagaagggtcgcgtggtggcagccaggcgagtagccgtagcagctcccgctctcgcaactcgtcccgtaactccactccgggctcttctcgcggcacgtccccggctcgtatggcaggtaacggtggtgacgctgctctggcgctgctactgctggacaggctgaaccagctggagtcgaagatgagtggtaaaggccaacagcagcagggccagaccgttaccaaaaagagcgcagctgaagcatctaaaaaaccgcgacagaaacgtaccgcgactaaaggatacaatgtaacacaggccttcggtcgtcgaggtccggagcaaactcaaggaaactttggcgatcaggatttaatcaaattagggaccgactacaaacactggccgcaaattgcccagttcgccccatccgctagtgcattcttcggtatgagccgcatcagcacggaagaaacgccaagtggtacgtggctgacctacaccggtgctatcaagcttgataaaaaggacccgaactttaaagaccaggttattctgcttaacaaacatattgatgcctataaaactttcccgccgaccgaacccaaaaaggacaaaaagaaaaaagctgatgaaacccaggctctaccgcagcgtcagaaaaaacagcaaactgtgactctgctgccagctgcggacctggatgatttttccaagcagctgcaacagtctatgagctctgcggactctacgcaggcttaa

SEQ ID NO: 32 - DNA, 2016 bp, Artificial Sequence
  Description of Artificial Sequence: Synthetic polynucleotide
atgcaccatcatcaccatcatggtggttctggttcgccgatacttggttattggaagattaaaggactggttcagcccacacgcctcctgctagaatacttagaggaaaaatatgaagagcacctgtacgaacgtgatgagggggacaaatggcgaaacaagaaatttgaattgggcttagaatttccaaatttgccgtattatatcgatggcgacgtaaaactgacccaatcaatggccattattcgctacatcgcagataaacataacatgctgggtggctgccctaaagaacgggctgagatctccatgctggaaggtgcggtgctcgacattcgctacggcgtcagtagaattgcgtatagcaaggatttcgaaactttaaaagtggatttcctgagcaaacttccggagatgctgaaaatgtttgaggataggctttgtcataagacgtatctcaatggtgatcatgttacccacccggactttatgctgtacgacgcccttgatgtcgttctgtatatggatcccatgtgcctggacgccttcccgaaattagtgtgttttaaaaaacgtatcgaagcgattccacagatcgataaatacttgaagtcttctaaatatattgcttggcctctgcaaggctggcaggcaacgttcggtgggggagatcatccgccaaaatcagatctggtgccgcgtgggagccctggcatacaccgcgacggtggttctggtgagaacctgtactttcaaagctcagataatgggcctcaaaaccagcgcaacgctccacgtataaccttcggtggcccgtctgactccacaggcagcaaccagaatggtgagcgtagtggagccaggtctaagcagcgccgtccccagggtctgccgaacaacacggcgagctggtttactgcgcttacccaacacggtaaagaagacttaaaattcccgcgtggccagggcgtcccgatcaacactaactcttccccggatgatcagattggttattaccgcagagcaactcgtcggattcgcggcggcgacggtaaaatgaaagatttgtctccgcgttggtacttttactatctcggcaccggtccggaagctggactgccctacggggcaagcaaggacgggatcatttgggtggctaccgaaggtgccctgaatactccaaaagatcatatcggcacccgtaaccctgctaataacgctgcgatcgttctgcaactgcctcagggtacaactctgccaaaaggcttctatgcagaagggtcgcgtggtggcagccaggcgagtagccgtagcagctcccgctctcgcaactcgtcccgtaactccactccgggctcttctcgcggcacgtccccggctcgtatggcaggtaacggtggtgacgctgctctggcgctgctactgctggacaggctgaaccagctggagtcgaagatgagtggtaaaggccaacagcagcagggccagaccgttaccaaaaagagcgcagctgaagcatctaaaaaaccgcgacagaaacgtaccgcgactaaagcgtacaatgtaacacaggccttcggtcgtcgaggtccggagcaaactcaaggaaactttggcgatcaggaattaatccgccaggggaccgactacaaacactggccgcaaattgcccagttcgccccatccgctagtgcattcttcggtatgagccgcatcggcatggaagtaacgccaagtggtacgtggctgacctacaccggtgctatcaagcttgatgacaaggacccgaactttaaagaccaggttattctgcttaacaaacatattgatgcctataaaactttcccgccgaccgaacccaaaaaggacaaaaagaaaaaagctgatgaaacccaggctctaccgcagcgtcagaaaaaacagcaaactgtgactctgctgccagctgcggacctggatgatttttccaagcagctgcaacagtctatgagctctgcggactctacgcaggcttaa

SEQ ID NO: 33 - DNA, 2016 bp, Artificial Sequence
  Description of Artificial Sequence: Synthetic polynucleotide
atgcaccatcatcaccatcatggtggttctggttcgccgatacttggttattggaagattaaaggactggttcagcccacacgcctcctgctagaatacttagaggaaaaatatgaagagcacctgtacgaacgtgatgagggggacaaatggcgaaacaagaaatttgaattgggcttagaatttccaaatttgccgtattatatcgatggcgacgtaaaactgacccaatcaatggccattattcgctacatcgcagataaacataacatgctgggtggctgccctaaagaacgggctgagatctccatgctggaaggtgcggtgctcgacattcgctacggcgtcagtagaattgcgtatagcaaggatttcgaaactttaaaagtggatttcctgagcaaacttccggagatgctgaaaatgtttgaggataggctttgtcataagacgtatctcaatggtgatcatgttacccacccggactttatgctgtacgacgcccttgatgtcgttctgtatatggatcccatgtgcctggacgccttcccgaaattagtgtgttttaaaaaacgtatcgaagcgattccacagatcgataaatacttgaagtcttctaaatatattgcttggcctctgcaaggctggcaggcaacgttcggtgggggagatcatccgccaaaatcagatctggtgccgcgtgggagccctggcatacaccgcgacggtggttctggtgagaacctgtactttcaaagctcagataatgggcctcaaaaccagcgcaacgctccacgtataaccttcggtggcccgtctgactccacaggcagcaaccagaatggtgagcgtagtggagccaggtctaagcagcgccgtccccagggtctgccgaacaacacggcgagctggtttactgcgcttacccaacacggtaaagaagacttaaaattcccgcgtggccagggcgtcccgatcaacactaactcttccccggatgatcagattggttattaccgcagagcaactcgtcggattcgcggcggcgacggtaaaatgaaagatttgtctccgcgttggtacttttactatctcggcaccggtccggaagctggactgccctacggggcacgaaaggacgggatcatttgggtggctaccgaaggtgccctgaatactccaaaagatcatatcggcacccgtaaccctgctaataacgctgcgatcgttctgcaactgcctcagggtacaactctgccaaaaggcttctatgcagaagggtcgcgtggtggcagccaggcgagtagccgtagcagctcccgctctcgcaactcgtcccgtaactccactccgggctcttctcgcggcacgtccccggctcgtatggcaggtaacggtggtgacgctgctctggcgctgctactgctggacaggctgaaccagctggagtcgaagatgagtggtaaaggccaacagcagcagggccagaccgttaccaaaaagagcgcagctgaagcatctaaaaaaccgcgacagaaacgtaccgcgactaaagcgtacaatgtaacacaggccttcggtcgtcgaggtccggagcaaactcaaggaaactttggcgatcaggaattaatccgccaggggaccgactacaaacactggccgcaaattgcccagttcgccccatccgctagtgcattcttcggtatgagccgcatcggcatggaagtaacgccaagtggtacgtggctgacctacaccggtgctatcaagcttgatgacaaggacccgaactttaaagaccaggttattctgcttaacaaacatattgatgcctataaaactttcccgccgaccgaacccaaaaaggacaaaaagaaaaaagctgatgaaacccaggctctaccgcagcgtcagaaaaaacagcaaactgtgactctgctgccagctgcggacctggatgatttttccaagcagctgcaacagtctatgagctctgcggactctacgcaggcttaa

SEQ ID NO: 34 - DNA, 2016 bp, Artificial Sequence
  Description of Artificial Sequence: Synthetic polynucleotide
atgcaccatcatcaccatcatggtggttctggttcgccgatacttggttattggaagattaaaggactggttcagcccacacgcctcctgctagaatacttagaggaaaaatatgaagagcacctgtacgaacgtgatgagggggacaaatggcgaaacaagaaatttgaattgggcttagaatttccaaatttgccgtattatatcgatggcgacgtaaaactgacccaatcaatggccattattcgctacatcgcagataaacataacatgctgggtggctgccctaaagaacgggctgagatctccatgctggaaggtgcggtgctcgacattcgctacggcgtcagtagaattgcgtatagcaaggatttcgaaactttaaaagtggatttcctgagcaaacttccggagatgctgaaaatgtttgaggataggctttgtcataagacgtatctcaatggtgatcatgttacccacccggactttatgctgtacgacgcccttgatgtcgttctgtatatggatcccatgtgcctggacgccttcccgaaattagtgtgttttaaaaaacgtatcgaagcgattccacagatcgataaatacttgaagtcttctaaatatattgcttggcctctgcaaggctggcaggcaacgttcggtgggggagatcatccgccaaaatcagatctggtgccgcgtgggagccctggcatacaccgcgacggtggttctggtgagaacctgtactttcaaagctcagataatgggcctcaaaaccagcgcaacgctccacgtataaccttcggtggcccgtctgactccacaggcagcaaccagaatggtgagcgtagtggagccaggtctaagcagcgccgtccccagggtctgccgaacaacacggcgagctggtttactgcgcttacccaacacggtaaagaagacttaaaattcccgcgtggccagggcgtcccgatcaacactaactcttccccggatgatcagattggttattaccgcagagcaactcgtcggattcgcggcggcgacggtaaaatgaaagatttgtctccgcgttggtacttttactatctcggcaccggtccggaagctggactgccctacggggcaaacaaggacgggatcatttgggtggctaccgaaggtgccctgaatactccaaaagatcatatcggcacccgtaaccctgctaataacgctgcgatcgttctgcaactgcctcagggtacaactctgccaaaaggcttctatgcagaagggtcgcgtggtggcagccaggcgagtagccgtagcagctcccgctctcgcaactcgtcccgtaactccactccgggctcttctcgcggcacgtccccggctcgtatggcaggtaacggtggtgacgctgctctggcgctgctactgctggacaggctgaaccagctggagtcgaagatgagtggtaaaggccaacagcagcagggccagaccgttaccaaaaagagcgcagctgaagcatctaaaaaaccgcgacagaaacgtaccgcgactaaacattacaatgtaacacaggccttcggtcgtcgaggtccggagcaaactcaaggaaactttggcgatcaggaattaatccgccaggggaccgactacaaacactggccgcaaattgcccagttcgccccatccgctagtgcattcttcggtatgagccgcatcggcatggaagtaacgccaagtggtacgtggctgacctacaccggtgctatcaagcttgatgacaaggacccgaactttaaagaccaggttattctgcttaacaaacatattgatgcctataaaactttcccgccgaccgaacccaaaaaggacaaaaagaaaaaagctgatgaaacccaggctctaccgcagcgtcagaaaaaacagcaaactgtgactctgctgccagctgcggacctggatgatttttccaagcagctgcaacagtctatgagctctgcggactctacgcaggcttaa

SEQ ID NO: 35 - DNA, 2016 bp, Artificial Sequence
  Description of Artificial Sequence: Synthetic polynucleotide
atgcaccatcatcaccatcatggtggttctggttcgccgatacttggttattggaagattaaaggactggttcagcccacacgcctcctgctagaatacttagaggaaaaatatgaagagcacctgtacgaacgtgatgagggggacaaatggcgaaacaagaaatttgaattgggcttagaatttccaaatttgccgtattatatcgatggcgacgtaaaactgacccaatcaatggccattattcgctacatcgcagataaacataacatgctgggtggctgccctaaagaacgggctgagatctccatgctggaaggtgcggtgctcgacattcgctacggcgtcagtagaattgcgtatagcaaggatttcgaaactttaaaagtggatttcctgagcaaacttccggagatgctgaaaatgtttgaggataggctttgtcataagacgtatctcaatggtgatcatgttacccacccggactttatgctgtacgacgcccttgatgtcgttctgtatatggatcccatgtgcctggacgccttcccgaaattagtgtgttttaaaaaacgtatcgaagcgattccacagatcgataaatacttgaagtcttctaaatatattgcttggcctctgcaaggctggcaggcaacgttcggtgggggagatcatccgccaaaatcagatctggtgccgcgtgggagccctggcatacaccgcgacggtggttctggtgagaacctgtactttcaaagctcagataatgggcctcaaaaccagcgcaacgctccacgtataaccttcggtggcccgtctgactccacaggcagcaaccagaatggtgagcgtagtggagccaggtctaagcagcgccgtccccagggtctgccgaacaacacggcgagctggtttactccgcttacccaacacggtaaagaagacttaaaattcccgccgggccagggcgtcccgatcaacactaactcttccccggatgatcagattggttattaccgcagagcaactcgtcggattcgcggcggcgacggtaaaatgaaagatttgcctccgcgttggtacttttactatctcggcaccggtccggaagctgatctgccctacggggcagtgaagccagggatcttttgggtggctgaggaaggtgccctgaatactccaaaagatcatatcggcacccgtaaccctgctaataacgctgcgatccccctgcaactgcctccgggtacaactctgccaaaaggcttctatgcagaagggtcgcgtggtggcagccaggcgagtagccgtagcagctcccgctctcgcaactcgtcccgtaactccactccgggctcttctcgcggcacgtccccggctcgtatggcaggtaacggtggtgacgctgctctggcgctgctactgctggacaggctgaaccagctggagtcgaagatgagtggtaaaggccaacagcagcagggccagaccgttaccaaaaagagcgcagctgaagcatctaaaaaaccgcgacagaaacgtaccgcgactaaagcgtacaatgtaacacaggccttcggtcgtcgaggtccggagcaaactcaaggaaactttggcgatcaggaattaatccgccaggggaccgactacaaacactggccgcaaattgcccagttcgccccatccgctagtgcattcttcggtatgagccgcatcggcatggaagtaacgccaagtggtacgtggctgacctacaccggtgctatcaagcttgatgacaaggacccgaactttaaagaccaggttattctgcttaacaaacatattgatgcctataaaactttcccgccgaccgaacccaaaaaggacaaaaagaaaaaagctgatgaaacccaggctctaccgcagcgtcagaaaaaacagcaaactgtgactctgctgccagctgcggacctggatgatttttccaagcagctgcaacagtctatgagctctgcggactctacgcaggcttaa

SEQ ID NO: 36 - DNA, 2016 bp, Artificial Sequence
  Description of Artificial Sequence: Synthetic polynucleotide
atgcaccatcatcaccatcatggtggttctggttcgccgatacttggttattggaagattaaaggactggttcagcccacacgcctcctgctagaatacttagaggaaaaatatgaagagcacctgtacgaacgtgatgagggggacaaatggcgaaacaagaaatttgaattgggcttagaatttccaaatttgccgtattatatcgatggcgacgtaaaactgacccaatcaatggccattattcgctacatcgcagataaacataacatgctgggtggctgccctaaagaacgggctgagatctccatgctggaaggtgcggtgctcgacattcgctacggcgtcagtagaattgcgtatagcaaggatttcgaaactttaaaagtggatttcctgagcaaacttccggagatgctgaaaatgtttgaggataggctttgtcataagacgtatctcaatggtgatcatgttacccacccggactttatgctgtacgacgcccttgatgtcgttctgtatatggatcccatgtgcctggacgccttcccgaaattagtgtgttttaaaaaacgtatcgaagcgattccacagatcgataaatacttgaagtcttctaaatatattgcttggcctctgcaaggctggcaggcaacgttcggtgggggagatcatccgccaaaatcagatctggtgccgcgtgggagccctggcatacaccgcgacggtggttctggtgagaacctgtactttcaaagctcagataatgggcctcaaaaccagcgcaacgctccacgtataaccttcggtggcccgtctgactccacaggcagcaaccagaatggtgagcgtagtggagccaggtctaagcagcgccgtccccagggtctgccgaacaacacggcgagctggtttactgcgcttacccaacacggtaaagaagacttaaaattcccgcgtggccagggcgtcccgatcaacactaactcttccccggatgatcagattggttattaccgcagagcaactcgtcggattcgcggcggcgacggtaaaatgaaagatttgtctccgcgttggtacttttactatctcggcaccggtccggaagctggactgccctacggggcaaacaaggacgggatcatttgggtggctaccgaaggtgccctgaatactccaaaagatcatatcggcacccgtaaccctgctaataacgctgcgatcgttctgcaactgcctcagggtacaactctgccaaaaggcttctatgcagaagggtcgcgtggtggcagccaggcgagtagccgtagcagctcccgctctcgcaactcgtcccgtaactccactccgggctcttctcgcggcacgtccccggctcgtatggcaggtaacggtggtgacgctgctctggcgctgctactgctggacaggctgaaccagctggagtcgaagatgagtggtaaaggccaacagcagcagggccagaccgttaccaaaaagagcgcagctgaagcatctaaaaaaccgcgacagaaacgtaccgcgactaaagcgtacaatgtaacacaggccttcggtcgtcgaggtccggagcaaactcaaggaaactttggcgatcaggaattaatccgccaggggaccgacgataaacactggccgcaaattgcccagttcgccccatccgctagtgcattcttcggtatgagccgcatcggcatggaagtaacgccaagtggtacgtggctgacctacaccggtgctatcaagcttgatgacaaggacccgaactttaaagaccaggttattctgcttaacaaacatattgatgcctataaaactttcccgccgaccgaacccaaaaaggacaaaaagaaaaaagctgatgaaacccaggctctaccgcagcgtcagaaaaaacagcaaactgtgactctgctgccagctgcggacctggatgatttttccaagcagctgcaacagtctatgagctctgcggactctacgcaggcttaa

SEQ ID NO: 37 - DNA, 2016 bp, Artificial Sequence
  Description of Artificial Sequence: Synthetic polynucleotide
atgcaccatcatcaccatcatggtggttctggttcgccgatacttggttattggaagattaaaggactggttcagcccacacgcctcctgctagaatacttagaggaaaaatatgaagagcacctgtacgaacgtgatgagggggacaaatggcgaaacaagaaatttgaattgggcttagaatttccaaatttgccgtattatatcgatggcgacgtaaaactgacccaatcaatggccattattcgctacatcgcagataaacataacatgctgggtggctgccctaaagaacgggctgagatctccatgctggaaggtgcggtgctcgacattcgctacggcgtcagtagaattgcgtatagcaaggatttcgaaactttaaaagtggatttcctgagcaaacttccggagatgctgaaaatgtttgaggataggctttgtcataagacgtatctcaatggtgatcatgttacccacccggactttatgctgtacgacgcccttgatgtcgttctgtatatggatcccatgtgcctggacgccttcccgaaattagtgtgttttaaaaaacgtatcgaagcgattccacagatcgataaatacttgaagtcttctaaatatattgcttggcctctgcaaggctggcaggcaacgttcggtgggggagatcatccgccaaaatcagatctggtgccgcgtgggagccctggcatacaccgcgacggtggttctggtgagaacctgtactttcaaagctcagataatgggcctcaaaaccagcgcaacgctccacgtataaccttcggtggcccgtctgactccacaggcagcaaccagaatggtgagcgtagtggagccaggtctaagcagcgccgtccccagggtctgccgaacaacacggcgagctggtttactgcgcttacccaacacggtaaagaagacttaaaattcccgcgtggccagggcgtcccgatcaacactaactcttccccggatgatcagattggttattaccgcagacgcactcgtcggattcgcggcggcgacggtaaaatgaaagatttgtctccgcgttggtacttttactatctcggcaccggtccggaagctggactgccctacggggcaaacaaggacgggatcatttgggtggctaccgaaggtgccctgaatactccaaaagatcatatcggcacccgtaaccctgctaataacgctgcgatcgttctgcaactgcctcagggtacaactctgccaaaaggcttctatgcagaagggtcgcgtggtggcagccaggcgagtagccgtagcagctcccgctctcgcaactcgtcccgtaactccactccgggctcttctcgcggcacgtccccggctcgtatggcaggtaacggtggtgacgctgctctggcgctgctactgctggacaggctgaaccagctggagtcgaagatgagtggtaaaggccaacagcagcagggccagaccgttaccaaaaagagcgcagctgaagcatctaaaaaaccgcgacagaaacgtaccgcgactaaagcgtacaatgtaacacaggccttcggtcgtcgaggtccggagcaaactcaaggaaactttggcgatcaggaattaatccgccaggggaccgactacaaacactggccgcaaattgcccagttcgccccatccgctagtgcattcttcggtatgagccgcatcggcatggaagtaacgccaagtggtacgtggctgacctacaccggtgctatcaagcttgatgacaaggacccgaactttaaagaccaggttattctgcttaacaaacatattgatgcctataaaactttcccgccgaccgaacccaaaaaggacaaaaagaaaaaagctgatgaaacccaggctctaccgcagcgtcagaaaaaacagcaaactgtgactctgctgccagctgcggacctggatgatttttccaagcagctgcaacagtctatgagctctgcggactctacgcaggcttaa

SEQ ID NO: 38 - DNA, 2016 bp, Artificial Sequence
  Description of Artificial Sequence: Synthetic polynucleotide
atgcaccatcatcaccatcatggtggttctggttcgccgatacttggttattggaagattaaaggactggttcagcccacacgcctcctgctagaatacttagaggaaaaatatgaagagcacctgtacgaacgtgatgagggggacaaatggcgaaacaagaaatttgaattgggcttagaatttccaaatttgccgtattatatcgatggcgacgtaaaactgacccaatcaatggccattattcgctacatcgcagataaacataacatgctgggtggctgccctaaagaacgggctgagatctccatgctggaaggtgcggtgctcgacattcgctacggcgtcagtagaattgcgtatagcaaggatttcgaaactttaaaagtggatttcctgagcaaacttccggagatgctgaaaatgtttgaggataggctttgtcataagacgtatctcaatggtgatcatgttacccacccggactttatgctgtacgacgcccttgatgtcgttctgtatatggatcccatgtgcctggacgccttcccgaaattagtgtgttttaaaaaacgtatcgaagcgattccacagatcgataaatacttgaagtcttctaaatatattgcttggcctctgcaaggctggcaggcaacgttcggtgggggagatcatccgccaaaatcagatctggtgccgcgtgggagccctggcatacaccgcgacggtggttctggtgagaacctgtactttcaaagctcagataatgggcctcaaaaccagcgcaacgctccacgtataaccttcggtggcccgtctgactccacaggcagcaaccagaatggtgagcgtagtggagccaggtctaagcagcgccgtccccagggtctgccgaacaacacggcgagctggtttactggccttacccaacacggtaaagaagacttaaaattcccgcccggccagggcgtcccgatcaacactaactcttccccggatgatcagattggttattaccgcagagcaactcgtcggattcgcggcggcgacggtaaaatgaaagatttgccaccgcgttggtacttttactatctcggcaccggtccggaagctgatctgccctacggggcagttaaggacgggatcttttgggtggctgaggaaggtgccctgaatactccaaaagatcatatcggcacccgtaaccctgctaataacgctgcgatccctctgcaactgcctccgggtacaactctgccaaaaggcttctatgcagaagggtcgcgtggtggcagccaggcgagtagccgtagcagctcccgctctcgcaactcgtcccgtaactccactccgggctcttctcgcggcacgtccccggctcgtatggcaggtaacggtggtgacgctgctctggcgctgctactgctggacaggctgaaccagctggagtcgaagatgagtggtaaaggccaacagcagcagggccagaccgttaccaaaaagagcgcagctgaagcatctaaaaaaccgcgacagaaacgtaccgcgactaaagcgtacaatgtaacacaggccttcggtcgtcgaggtccggagcaaactcaaggaaactttggcgatcaggaattaatccgccaggggaccgactacaaacactggccgcaaattgcccagttcgccccatccgctagtgcattcttcggtatgagccgcatcggcatggaagtaacgccaagtggtacgtggctgacctacaccggtgctatcaagcttgatgacaaggacccgaactttaaagaccaggttattctgcttaacaaacatattgatgcctataaaactttcccgccgaccgaacccaaaaaggacaaaaagaaaaaagctgatgaaacccaggctctaccgcagcgtcagaaaaaacagcaaactgtgactctgctgccagctgcggacctggatgatttttccaagcagctgcaacagtctatgagctctgcggactctacgcaggcttaa

SEQ ID NO: 39 - DNA, 2016 bp, Artificial Sequence
  Description of Artificial Sequence: Synthetic polynucleotide
atgcaccatcatcaccatcatggtggttctggttcgccgatacttggttattggaagattaaaggactggttcagcccacacgcctcctgctagaatacttagaggaaaaatatgaagagcacctgtacgaacgtgatgagggggacaaatggcgaaacaagaaatttgaattgggcttagaatttccaaatttgccgtattatatcgatggcgacgtaaaactgacccaatcaatggccattattcgctacatcgcagataaacataacatgctgggtggctgccctaaagaacgggctgagatctccatgctggaaggtgcggtgctcgacattcgctacggcgtcagtagaattgcgtatagcaaggatttcgaaactttaaaagtggatttcctgagcaaacttccggagatgctgaaaatgtttgaggataggctttgtcataagacgtatctcaatggtgatcatgttacccacccggactttatgctgtacgacgcccttgatgtcgttctgtatatggatcccatgtgcctggacgccttcccgaaattagtgtgttttaaaaaacgtatcgaagcgattccacagatcgataaatacttgaagtcttctaaatatattgcttggcctctgcaaggctggcaggcaacgttcggtgggggagatcatccgccaaaatcagatctggtgccgcgtgggagccctggcatacaccgcgacggtggttctggtgagaacctgtactttcaaagctcagataatgggcctcaaaaccagcgcaacgctccacgtataaccttcggtggcccgtctgactccacaggcagcaaccagaatggtgagcgtagtggagccaggtctaagcagcgccgtccccagggtctgccgaacaacacggcgagctggtttactgcgcttacccaacacggtaaagaagacttaaaattcccgcgtggccagggcgtcccgatcaacactaactcttccccggatgatcagattggttattaccgcagagcaactcgtcggattcgcggcggcgacggtaaaatgaaagatttgtctccgcgttggtacttttactattcgggcaccggtccggaagctggactgccctacggggcaaacaaggacgggatcatttgggtggctaccgaaggtgccctgaatactccaaaagatcatatcggcacccgtaaccctgctaataacgctgcgatcgttctgcaactgcctcagggtacaactctgccaaaaggcttctatgcagaagggtcgcgtggtggcagccaggcgagtagccgtagcagctcccgctctcgcaactcgtcccgtaactccactccgggctcttctcgcggcacgtccccggctcgtatggcaggtaacggtggtgacgctgctctggcgctgctactgctggacaggctgaaccagctggagtcgaagatgagtggtaaaggccaacagcagcagggccagaccgttaccaaaaagagcgcagctgaagcatctaaaaaaccgcgacagaaacgtaccgcgactaaagcgtacaatgtaacacaggccttcggtcgtcgaggtccggagcaaactcaaggaaactttggcgatcaggaattaatccgccaggggaccgactacaaacactggccgcaaattgcccagttcgccccatccgctagtgcattcttcggtatgagccgcatcggcatggaagtaacgccaagtggtacgtggctgacctacaccggtgctatcaagcttgatgacaaggacccgaactttaaagaccaggttattctgcttaacaaacatattgatgcctataaaactttcccgccgaccgaacccaaaaaggacaaaaagaaaaaagctgatgaaacccaggctctaccgcagcgtcagaaaaaacagcaaactgtgactctgctgccagctgcggacctggatgatttttccaagcagctgcaacagtctatgagctctgcggactctacgcaggcttaa

SEQ ID NO: 40 - DNA, 2016 bp, Artificial Sequence
  Description of Artificial Sequence: Synthetic polynucleotide
atgcaccatcatcaccatcatggtggttctggttcgccgatacttggttattggaagattaaaggactggttcagcccacacgcctcctgctagaatacttagaggaaaaatatgaagagcacctgtacgaacgtgatgagggggacaaatggcgaaacaagaaatttgaattgggcttagaatttccaaatttgccgtattatatcgatggcgacgtaaaactgacccaatcaatggccattattcgctacatcgcagataaacataacatgctgggtggctgccctaaagaacgggctgagatctccatgctggaaggtgcggtgctcgacattcgctacggcgtcagtagaattgcgtatagcaaggatttcgaaactttaaaagtggatttcctgagcaaacttccggagatgctgaaaatgtttgaggataggctttgtcataagacgtatctcaatggtgatcatgttacccacccggactttatgctgtacgacgcccttgatgtcgttctgtatatggatcccatgtgcctggacgccttcccgaaattagtgtgttttaaaaaacgtatcgaagcgattccacagatcgataaatacttgaagtcttctaaatatattgcttggcctctgcaaggctggcaggcaacgttcggtgggggagatcatccgccaaaatcagatctggtgccgcgtgggagccctggcatacaccgcgacggtggttctggtgagaacctgtactttcaaagctcagataatgggcctcaaaaccagcgcaacgctccacgtataaccttcggtggcccgtctgactccacaggcagcaaccagaatggtgagcgtagtggagccaggtctaagcagcgccgtccccagggtctgccgaacaacacggcgagctggtttactgcgcttacccaacacggtaaagaagacttaaaattcccgcgtggccagggcgtcccgatcaacactaactcttccccggatgatcagattggttattaccgcagagcaactcgtcggattcgcggcggcgacggtaaaatgaaagatttgtctccgcgttggtacttttactatctcggcaccggtccggaagctggactgccctacggggcaaacaaggacgggatcatttgggtggctaccgaaggtgccatgaatactccaaaagatcatatcggcacccgtaaccctgctaataacgctgcgatcgttctgcaactgcctcagggtacaactctgccaaaaggcttctatgcagaagggtcgcgtggtggcagccaggcgagtagccgtagcagctcccgctctcgcaactcgtcccgtaactccactccgggctcttctcgcggcacgtccccggctcgtatggcaggtaacggtggtgacgctgctctggcgctgctactgctggacaggctgaaccagctggagtcgaagatgagtggtaaaggccaacagcagcagggccagaccgttaccaaaaagagcgcagctgaagcatctaaaaaaccgcgacagaaacgtaccgcgactaaagcgtacaatgtaacacaggccttcggtcgtcgaggtccggagcaaactcaaggaaactttggcgatcaggaattaatccgccaggggaccgactacaaacactggccgcaaattgcccagttcgccccatccgctagtgcattcttcggtatgagccgcatcggcatggaagtaacgccaagtggtacgtggctgacctacaccggtgctatcaagcttgatgacaaggacccgaactttaaagaccaggttattctgcttaacaaacatattgatgcctataaaactttcccgccgaccgaacccaaaaaggacaaaaagaaaaaagctgatgaaacccaggctctaccgcagcgtcagaaaaaacagcaaactgtgactctgctgccagctgcggacctggatgatttttccaagcagctgcaacagtctatgagctctgcggactctacgcaggcttaa

SEQ ID NO: 41 - DNA, 2016 bp, Artificial Sequence
  Description of Artificial Sequence: Synthetic polynucleotide
atgcaccatcatcaccatcatggtggttctggttcgccgatacttggttattggaagattaaaggactggttcagcccacacgcctcctgctagaatacttagaggaaaaatatgaagagcacctgtacgaacgtgatgagggggacaaatggcgaaacaagaaatttgaattgggcttagaatttccaaatttgccgtattatatcgatggcgacgtaaaactgacccaatcaatggccattattcgctacatcgcagataaacataacatgctgggtggctgccctaaagaacgggctgagatctccatgctggaaggtgcggtgctcgacattcgctacggcgtcagtagaattgcgtatagcaaggatttcgaaactttaaaagtggatttcctgagcaaacttccggagatgctgaaaatgtttgaggataggctttgtcataagacgtatctcaatggtgatcatgttacccacccggactttatgctgtacgacgcccttgatgtcgttctgtatatggatcccatgtgcctggacgccttcccgaaattagtgtgttttaaaaaacgtatcgaagcgattccacagatcgataaatacttgaagtcttctaaatatattgcttggcctctgcaaggctggcaggcaacgttcggtgggggagatcatccgccaaaatcagatctggtgccgcgtgggagccctggcatacaccgcgacggtggttctggtgagaacctgtactttcaaagctcagataatgggcctcaaaaccagcgcaacgctccacgtataaccttcggtggcccgtctgactccacaggcagcaaccagaatggtgagcgtagtggagccaggtctaagcagcgccgtccccagggtctgccgaacaacacggcgagctggtttactggccttacccaaaatggtaaagaagacttaaaattcccgcccggccagggcgtcccgatcaacactaactcttccccggatgatcagattggttattaccgcagagcaactcgtcggattcgcggcggcgacggtaaaatgaaagatttgccaccgcgttggtacttttactatctcggcaccggtccgcatgctgatctgccctacgggcaaaaacaggacggggtgttttgggtggctcgacctggtgccctgaatactccaaaagatcatatcggcacccgtaaccctgctaataacgctgcgatcccgctgcaactgcctccgggtacaaagctgccaaaaggcttctatgcagaagggtcgcgtggtggcagccaggcgagtagccgtagcagctcccgctctcgcaactcgtcccgtaactccactccgggctcttctcgcggcacgtccccggctcgtatggcaggtaacggtggtgacgctgctctggcgctgctactgctggacaggctgaaccagctggagtcgaagatgagtggtaaaggccaacagcagcagggccagaccgttaccaaaaagagcgcagctgaagcatctaaaaaaccgcgacagaaacgtaccgcgactaaagcgtacaatgtaacacaggccttcggtcgtcgaggtccggagcaaactcaaggaaactttggcgatcaggaattaatccgccaggggaccgactacaaacactggccgcaaattgcccagttcgccccatccgctagtgcattcttcggtatgagccgcatcggcatggaagtaacgccaagtggtacgtggctgacctacaccggtgctatcaagcttgatgacaaggacccgaactttaaagaccaggttattctgcttaacaaacatattgatgcctataaaactttcccgccgaccgaacccaaaaaggacaaaaagaaaaaagctgatgaaacccaggctctaccgcagcgtcagaaaaaacagcaaactgtgactctgctgccagctgcggacctggatgatttttccaagcagctgcaacagtctatgagctctgcggactctacgcaggcttaa

SEQ ID NO: 42 - DNA, 2016 bp, Artificial Sequence
  Description of Artificial Sequence: Synthetic polynucleotide
atgcaccatcatcaccatcatggtggttctggttcgccgatacttggttattggaagattaaaggactggttcagcccacacgcctcctgctagaatacttagaggaaaaatatgaagagcacctgtacgaacgtgatgagggggacaaatggcgaaacaagaaatttgaattgggcttagaatttccaaatttgccgtattatatcgatggcgacgtaaaactgacccaatcaatggccattattcgctacatcgcagataaacataacatgctgggtggctgccctaaagaacgggctgagatctccatgctggaaggtgcggtgctcgacattcgctacggcgtcagtagaattgcgtatagcaaggatttcgaaactttaaaagtggatttcctgagcaaacttccggagatgctgaaaatgtttgaggataggctttgtcataagacgtatctcaatggtgatcatgttacccacccggactttatgctgtacgacgcccttgatgtcgttctgtatatggatcccatgtgcctggacgccttcccgaaattagtgtgttttaaaaaacgtatcgaagcgattccacagatcgataaatacttgaagtcttctaaatatattgcttggcctctgcaaggctggcaggcaacgttcggtgggggagatcatccgccaaaatcagatctggtgccgcgtgggagccctggcatacaccgcgacggtggttctggtgagaacctgtactttcaaagctcagataatgggcctcaaaaccagcgcaacgctccacgtataaccttcggtggcccgtctgactccacaggcagcaaccagaatggtgagcgtagtggagccaggtctaagcagcgccgtccccagggtctgccgaacaacacggcgagctggtttactgcgcttacccaacacggtaaagaagacttaaaattcccgcgtggccagggcgtcccgatcaacactaactcttccccggatgatcagattggttattaccgcagagcaactcgtcggattcgcggcggcgacggtaaaatgaaagatttgtctccgcgttggtacttttactatctcggcaccggtccggaagctggactgccctacggggcaaacaaggacgggatcatttgggtggctaccgaaggtgccctgaatactccaaaagatcatatcggcacccgtaaccctgctaataacgctgcgatcaaactgcaactgcctcagggtacaactctgccaaaaggcttctatgcagaagggtcgcgtggtggcagccaggcgagtagccgtagcagctcccgctctcgcaactcgtcccgtaactccactccgggctcttctcgcggcacgtccccggctcgtatggcaggtaacggtggtgacgctgctctggcgctgctactgctggacaggctgaaccagctggagtcgaagatgagtggtaaaggccaacagcagcagggccagaccgttaccaaaaagagcgcagctgaagcatctaaaaaaccgcgacagaaacgtaccgcgactaaagcgtacaatgtaacacaggccttcggtcgtcgaggtccggagcaaactcaaggaaactttggcgatcaggaattaatccgccaggggaccgactacaaacactggccgcaaattgcccagttcgccccatccgctagtgcattcttcggtatgagccgcatcggcatggaagtaacgccaagtggtacgtggctgacctacaccggtgctatcaagcttgatgacaaggacccgaactttaaagaccaggttattctgcttaacaaacatattgatgcctataaaactttcccgccgaccgaacccaaaaaggacaaaaagaaaaaagctgatgaaacccaggctctaccgcagcgtcagaaaaaacagcaaactgtgactctgctgccagctgcggacctggatgatttttccaagcagctgcaacagtctatgagctctgcggactctacgcaggcttaa

SEQ ID NO: 43 - DNA, 2016 bp, Artificial Sequence
  Description of Artificial Sequence: Synthetic polynucleotide
atgcaccatcatcaccatcatggtggttctggttcgccgatacttggttattggaagattaaaggactggttcagcccacacgcctcctgctagaatacttagaggaaaaatatgaagagcacctgtacgaacgtgatgagggggacaaatggcgaaacaagaaatttgaattgggcttagaatttccaaatttgccgtattatatcgatggcgacgtaaaactgacccaatcaatggccattattcgctacatcgcagataaacataacatgctgggtggctgccctaaagaacgggctgagatctccatgctggaaggtgcggtgctcgacattcgctacggcgtcagtagaattgcgtatagcaaggatttcgaaactttaaaagtggatttcctgagcaaacttccggagatgctgaaaatgtttgaggataggctttgtcataagacgtatctcaatggtgatcatgttacccacccggactttatgctgtacgacgcccttgatgtcgttctgtatatggatcccatgtgcctggacgccttcccgaaattagtgtgttttaaaaaacgtatcgaagcgattccacagatcgataaatacttgaagtcttctaaatatattgcttggcctctgcaaggctggcaggcaacgttcggtgggggagatcatccgccaaaatcagatctggtgccgcgtgggagccctggcatacaccgcgacggtggttctggtgagaacctgtactttcaaagctcagataatgggcctcaaaaccagcgcaacgctccacgtataaccttcggtggcccgtctgactccacaggcagcaaccagaatggtgagcgtagtggagccaggtctaagcagcgccgtccccagggtctgccgaacaacacggcgagctggtttactgcgcttacccaacacggtaaagaagacttaaaattcccgcgtggccagggcgtcccgatcaacactaactcttccccggatgatcagattggttattaccgcagagcaactcgtcggattcgcggcggcgacggtaaaatgaaagatttgtctccgcgttggtacttttactatctcggcaccggtccggaagctggactgccctacggggcaaacaaggacgggatcatttgggtggctaccgaaggtgccctgaatactccaaaagatcatatcggctcgcgtaaccctgctaataacgctgcgatcgttctgcaactgcctcagggtacaactctgccaaaaggcttctatgcagaagggtcgcgtggtggcagccaggcgagtagccgtagcagctcccgctctcgcaactcgtcccgtaactccactccgggctcttctcgcggcacgtccccggctcgtatggcaggtaacggtggtgacgctgctctggcgctgctactgctggacaggctgaaccagctggagtcgaagatgagtggtaaaggccaacagcagcagggccagaccgttaccaaaaagagcgcagctgaagcatctaaaaaaccgcgacagaaacgtaccgcgactaaagcgtacaatgtaacacaggccttcggtcgtcgaggtccggagcaaactcaaggaaactttggcgatcaggaattaatccgccaggggaccgactacaaacactggccgcaaattgcccagttcgccccatccgctagtgcattcttcggtatgagccgcatcggcatggaagtaacgccaagtggtacgtggctgacctacaccggtgctatcaagcttgatgacaaggacccgaactttaaagaccaggttattctgcttaacaaacatattgatgcctataaaactttcccgccgaccgaacccaaaaaggacaaaaagaaaaaagctgatgaaacccaggctctaccgcagcgtcagaaaaaacagcaaactgtgactctgctgccagctgcggacctggatgatttttccaagcagctgcaacagtctatgagctctgcggactctacgcaggcttaa

SEQ ID NO: 44 - DNA, 2016 bp, Artificial Sequence
  Description of Artificial Sequence: Synthetic polynucleotide
atgcaccatcatcaccatcatggtggttctggttcgccgatacttggttattggaagattaaaggactggttcagcccacacgcctcctgctagaatacttagaggaaaaatatgaagagcacctgtacgaacgtgatgagggggacaaatggcgaaacaagaaatttgaattgggcttagaatttccaaatttgccgtattatatcgatggcgacgtaaaactgacccaatcaatggccattattcgctacatcgcagataaacataacatgctgggtggctgccctaaagaacgggctgagatctccatgctggaaggtgcggtgctcgacattcgctacggcgtcagtagaattgcgtatagcaaggatttcgaaactttaaaagtggatttcctgagcaaacttccggagatgctgaaaatgtttgaggataggctttgtcataagacgtatctcaatggtgatcatgttacccacccggactttatgctgtacgacgcccttgatgtcgttctgtatatggatcccatgtgcctggacgccttcccgaaattagtgtgttttaaaaaacgtatcgaagcgattccacagatcgataaatacttgaagtcttctaaatatattgcttggcctctgcaaggctggcaggcaacgttcggtgggggagatcatccgccaaaatcagatctggtgccgcgtgggagccctggcatacaccgcgacggtggttctggtgagaacctgtactttcaaagctcagataatgggcctcaaaaccagcgcaacgctccacgtataaccttcggtggcccgtctgactccacaggcagcaaccagaatggtgagcgtagtggagccaggtctaagcagcgccgtccccagggtctgccgaacaacacggcgagctggtttactgcgcttacccaacacggtaaagaagacttaaaattcccgcgtggccagggcgtcccgatcaacactaactcttccccggatgatcagattggttattaccgcagagcaactcgtcggattcgcggcggcgacggtaaaatgaaagatttgtctccgcgttggtacttttactatctcggcaccggtccggaagctggactgccctacggggcaaacaaggacgggatcatttgggtggctaccgaaggtgccctgaatactccaaaagatcatatcggcacccgtaaccctgctaataacgctgcgatcgttctgcaactgcctcagggtacaactctgccaaaaggcttctatgcagaagggtcgcgtggtggcagccaggcgagtagccgtagcagctcccgctctcgcaactcgtcccgtaactccactccgggctcttctcgcggcacgtccccggctcgtatggcaggtaacggtggtgacgctgctctggcgctgctactgctggacaggctgaaccagctggagtcgaagatgagtggtaaaggccaacagcagcagggccagaccgttaccaaaaagagcgcagctgaagcatctaaaaaaccgcgacagaaacgtaccgcgactaaagcgtacaatgtaacacaggccttcggtcgtcgaggtccggagcaaactcaaggaaactttggcgatcaggaattaatccgccaggggaccgactacaaacactggccgcaaattgcccagttcgccccatccgctagtgcattcttcggtatgagccgcatcggcatggaagtaacgccagatggtacgtggctgacctacaccggtgctatcaagcttgatgacaaggacccgaactttaaagaccaggttattctgcttaacaaacatattgatgcctataaaactttcccgccgaccgaacccaaaaaggacaaaaagaaaaaagctgatgaaacccaggctctaccgcagcgtcagaaaaaacagcaaactgtgactctgctgccagctgcggacctggatgatttttccaagcagctgcaacagtctatgagctctgcggactctacgcaggcttaa

SEQ ID NO: 45 - DNA, 2016 bp, Artificial Sequence
  Description of Artificial Sequence: Synthetic polynucleotide
atgcaccatcatcaccatcatggtggttctggttcgccgatacttggttattggaagattaaaggactggttcagcccacacgcctcctgctagaatacttagaggaaaaatatgaagagcacctgtacgaacgtgatgagggggacaaatggcgaaacaagaaatttgaattgggcttagaatttccaaatttgccgtattatatcgatggcgacgtaaaactgacccaatcaatggccattattcgctacatcgcagataaacataacatgctgggtggctgccctaaagaacgggctgagatctccatgctggaaggtgcggtgctcgacattcgctacggcgtcagtagaattgcgtatagcaaggatttcgaaactttaaaagtggatttcctgagcaaacttccggagatgctgaaaatgtttgaggataggctttgtcataagacgtatctcaatggtgatcatgttacccacccggactttatgctgtacgacgcccttgatgtcgttctgtatatggatcccatgtgcctggacgccttcccgaaattagtgtgttttaaaaaacgtatcgaagcgattccacagatcgataaatacttgaagtcttctaaatatattgcttggcctctgcaaggctggcaggcaacgttcggtgggggagatcatccgccaaaatcagatctggtgccgcgtgggagccctggcatacaccgcgacggtggttctggtgagaacctgtactttcaaagctcagataatgggcctcaaaaccagcgcaacgctccacgtataaccttcggtggcccgtctgactccacaggcagcaaccagaatggtgagcgtagtggagccaggtctaagcagcgccgtccccagggtctgccgaacaacacggcgagctggtttactgcgcttacccaacacggtaaagaagacttaaaattcccgcgtggccagggcgtcccgatcaacactaactcttccccggatgatcagattggttattaccgcagagcaactcgtcggattcgcggcggcgacggtaaaatgaaagatttgtctccgcgttggtacttttactatctcggcaccggtccggaagctggactgccctacggggcaaacaaggacgggatcatttgggtggctaccgaaggtgccctgaatactccaaaagatcatatcggcacccgtaaccctgctaataacgctgcgatcgttctgcaactgcctcagggtacaactctgccaaaaggcttctatgcagaagggtcgcgtggtggcagccaggcgagtagccgtagcagctcccgctctcgcaactcgtcccgtaactccactccgggctcttctcgcggcacgtccccggctcgtatggcaggtaacggtggtgacgctgctctggcgctgctactgctggacaggctgaaccagctggagtcgaagatgagtggtaaaggccaacagcagcagggccagaccgttaccaaaaagagcgcagctgaaatgtctaaaaaaccgcgacagaaacgtaccgcgactaaaggctgcaatgtaacacagtgtttcggtccgcgaggtccggagcaaactcaaggaaactttggcgatgatgatttaatcaaattggggaccgactacaaacactggccgcaaattgcccagttcgccccatccgctagtgcattcttcggtatgagccgcatctcatcgaaggaacagccaagtggtacgtggctgacctacaccggtgctatcaagcttgataaagatgacccgaactttaaagaccaggttattctgcttaacaaacatattgatgcctataaaactttcccgccgaccgaacccaaaaaggacaaaaagaaaaaagctgatgaaacccaggctctaccgcagcgtcagaaaaaacagcaaactgtgactctgctgccagctgcggacctggatgatttttccaagcagctgcaacagtctatgagctctgcggactctacgcaggcttaa

SEQ ID NO: 46 - DNA, 2016 bp, Artificial Sequence
  Description of Artificial Sequence: Synthetic polynucleotide
atgcaccatcatcaccatcatggtggttctggttcgccgatacttggttattggaagattaaaggactggttcagcccacacgcctcctgctagaatacttagaggaaaaatatgaagagcacctgtacgaacgtgatgagggggacaaatggcgaaacaagaaatttgaattgggcttagaatttccaaatttgccgtattatatcgatggcgacgtaaaactgacccaatcaatggccattattcgctacatcgcagataaacataacatgctgggtggctgccctaaagaacgggctgagatctccatgctggaaggtgcggtgctcgacattcgctacggcgtcagtagaattgcgtatagcaaggatttcgaaactttaaaagtggatttcctgagcaaacttccggagatgctgaaaatgtttgaggataggctttgtcataagacgtatctcaatggtgatcatgttacccacccggactttatgctgtacgacgcccttgatgtcgttctgtatatggatcccatgtgcctggacgccttcccgaaattagtgtgttttaaaaaacgtatcgaagcgattccacagatcgataaatacttgaagtcttctaaatatattgcttggcctctgcaaggctggcaggcaacgttcggtgggggagatcatccgccaaaatcagatctggtgccgcgtgggagccctggcatacaccgcgacggtggttctggtgagaacctgtactttcaaagctcagataatgggcctcaaaaccagcgcaacgctccacgtataaccttcggtggcccgtctgactccacaggcagcaaccagaatggtgagcgtagtggagccaggtctaagcagcgccgtccccagggtctgccgaacaacacggcgagctggtttactgcgcttacccaacacggtaaagaagacttaaaattcccgcgtggccagggcgtcccgatcaacactaactcttccccggatgatcagattggttattaccgcagagcaactcgtcggattcgcggcggcgacggtaaaatgaaagatttgtctccgcgttggtacttttactatctcggcaccggtccggaagctggactgccctacggggcaaacaaggacgggatcatttgggtggctaccgaaggtgccctgaatactccaaaagatcatatcggcacccgtaaccctgctaataacgctgcgatcgttctgcaactgcctcagggtacaactctgccaaaaggcttctatgcagaagggtcgcgtggtggcagccaggcgagtagccgtagcagctcccgctctcgcaactcgtcccgtaactccactccgggctcttctcgcggcacgtccccggctcgtatggcaggtaacggtggtgacgctgctctggcgctgctactgctggacaggctgaaccagctggagtcgaagatgagtggtaaaggccaacagcagcagggccagaccgttaccaaaaagagcgcagctgaagcatctaaaaaaccgcgacagaaacgtaccgcgactaaagcgtacaatgtaacacaggccttcggtcgtcgaggtccggagcaaactcaaggaaactttggcgatcaggaattaatccgccaggggaccgactacaaacactggccgcaaattgcccagttcgccccatccgctagtgcattcttcggtatgagccgcatcggcatggaagtaacgccaagtggtacgtggctgacctacaccggtaagatcaagcttgatgacaaggacccgaactttaaagaccaggttattctgcttaacaaacatattgatgcctataaaactttcccgccgaccgaacccaaaaaggacaaaaagaaaaaagctgatgaaacccaggctctaccgcagcgtcagaaaaaacagcaaactgtgactctgctgccagctgcggacctggatgatttttccaagcagctgcaacagtctatgagctctgcggactctacgcaggcttaa

SEQ ID NO: 47 - DNA, 2016 bp, Artificial Sequence
  Description of Artificial Sequence: Synthetic polynucleotide
atgcaccatcatcaccatcatggtggttctggttcgccgatacttggttattggaagattaaaggactggttcagcccacacgcctcctgctagaatacttagaggaaaaatatgaagagcacctgtacgaacgtgatgagggggacaaatggcgaaacaagaaatttgaattgggcttagaatttccaaatttgccgtattatatcgatggcgacgtaaaactgacccaatcaatggccattattcgctacatcgcagataaacataacatgctgggtggctgccctaaagaacgggctgagatctccatgctggaaggtgcggtgctcgacattcgctacggcgtcagtagaattgcgtatagcaaggatttcgaaactttaaaagtggatttcctgagcaaacttccggagatgctgaaaatgtttgaggataggctttgtcataagacgtatctcaatggtgatcatgttacccacccggactttatgctgtacgacgcccttgatgtcgttctgtatatggatcccatgtgcctggacgccttcccgaaattagtgtgttttaaaaaacgtatcgaagcgattccacagatcgataaatacttgaagtcttctaaatatattgcttggcctctgcaaggctggcaggcaacgttcggtgggggagatcatccgccaaaatcagatctggtgccgcgtgggagccctggcatacaccgcgacggtggttctggtgagaacctgtactttcaaagctcagataatgggcctcaaaaccagcgcaacgctccacgtataaccttcggtggcccgtctgactccacaggcagcaaccagaatggtgagcgtagtggagccaggtctaagcagcgccgtccccagggtctgccgaacaacacggcgagctggtttactgcgcttacccaacacggtaaagaagacttaaaattcccgcgtggccagggcgtcccgatcaacactaactcttccccggatgatcagattggttattaccgcagagcaactcgtcggtatcgcggcggcgacggtaaaatgaaagatttgtctccgcgttggtacttttactatctcggcaccggtccggaagctggactgccctacggggcaaacaaggacgggatcatttgggtggctaccgaaggtgccctgaatactccaaaagatcatatcggcacccgtaaccctgctaataacgctgcgatcgttctgcaactgcctcagggtacaactctgccaaaaggcttctatgcagaagggtcgcgtggtggcagccaggcgagtagccgtagcagctcccgctctcgcaactcgtcccgtaactccactccgggctcttctcgcggcacgtccccggctcgtatggcaggtaacggtggtgacgctgctctggcgctgctactgctggacaggctgaaccagctggagtcgaagatgagtggtaaaggccaacagcagcagggccagaccgttaccaaaaagagcgcagctgaagcatctaaaaaaccgcgacagaaacgtaccgcgactaaagcgtacaatgtaacacaggccttcggtcgtcgaggtccggagcaaactcaaggaaactttggcgatcaggaattaatccgccaggggaccgactacaaacactggccgcaaattgcccagttcgccccatccgctagtgcattcttcggtatgagccgcatcggcatggaagtaacgccaagtggtacgtggctgacctacaccggtgctatcaagcttgatgacaaggacccgaactttaaagaccaggttattctgcttaacaaacatattgatgcctataaaactttcccgccgaccgaacccaaaaaggacaaaaagaaaaaagctgatgaaacccaggctctaccgcagcgtcagaaaaaacagcaaactgtgactctgctgccagctgcggacctggatgatttttccaagcagctgcaacagtctatgagctctgcggactctacgcaggcttaa

SEQ ID NO: 48 - DNA, 2016 bp, Artificial Sequence
  Description of Artificial Sequence: Synthetic polynucleotide
atgcaccatcatcaccatcatggtggttctggttcgccgatacttggttattggaagattaaaggactggttcagcccacacgcctcctgctagaatacttagaggaaaaatatgaagagcacctgtacgaacgtgatgagggggacaaatggcgaaacaagaaatttgaattgggcttagaatttccaaatttgccgtattatatcgatggcgacgtaaaactgacccaatcaatggccattattcgctacatcgcagataaacataacatgctgggtggctgccctaaagaacgggctgagatctccatgctggaaggtgcggtgctcgacattcgctacggcgtcagtagaattgcgtatagcaaggatttcgaaactttaaaagtggatttcctgagcaaacttccggagatgctgaaaatgtttgaggataggctttgtcataagacgtatctcaatggtgatcatgttacccacccggactttatgctgtacgacgcccttgatgtcgttctgtatatggatcccatgtgcctggacgccttcccgaaattagtgtgttttaaaaaacgtatcgaagcgattccacagatcgataaatacttgaagtcttctaaatatattgcttggcctctgcaaggctggcaggcaacgttcggtgggggagatcatccgccaaaatcagatctggtgccgcgtgggagccctggcatacaccgcgacggtggttctggtgagaacctgtactttcaaagctcagataatgggcctcaaaaccagcgcaacgctccacgtataaccttcggtggcccgtctgactccacaggcagcaaccagaatggtgagcgtagtggagccaggtctaagcagcgccgtccccagggtctgccgaacaacacggcgagctggtttactgcgcttacccaacacggtaaagaagacttaaaattcccgcgtggccagggcgtcccgatcaacactaactcttccccggatgatcagattggttattaccgcagagcaactcgtcggattcgcggcggcgacggtaaaatgaaagatttgtctccgcgttggtacttttactatcatggcaccggtccggaagctggactgccctacggggcaaacaaggacgggatcatttgggtggctaccgaaggtgccctgaatactccaaaagatcatatcggcacccgtaaccctgctaataacgctgcgatcgttctgcaactgcctcagggtacaactctgccaaaaggcttctatgcagaagggtcgcgtggtggcagccaggcgagtagccgtagcagctcccgctctcgcaactcgtcccgtaactccactccgggctcttctcgcggcacgtccccggctcgtatggcaggtaacggtggtgacgctgctctggcgctgctactgctggacaggctgaaccagctggagtcgaagatgagtggtaaaggccaacagcagcagggccagaccgttaccaaaaagagcgcagctgaagcatctaaaaaaccgcgacagaaacgtaccgcgactaaagcgtacaatgtaacacaggccttcggtcgtcgaggtccggagcaaactcaaggaaactttggcgatcaggaattaatccgccaggggaccgactacaaacactggccgcaaattgcccagttcgccccatccgctagtgcattcttcggtatgagccgcatcggcatggaagtaacgccaagtggtacgtggctgacctacaccggtgctatcaagcttgatgacaaggacccgaactttaaagaccaggttattctgcttaacaaacatattgatgcctataaaactttcccgccgaccgaacccaaaaaggacaaaaagaaaaaagctgatgaaacccaggctctaccgcagcgtcagaaaaaacagcaaactgtgactctgctgccagctgcggacctggatgatttttccaagcagctgcaacagtctatgagctctgcggactctacgcaggcttaa

SEQ ID NO: 49 - DNA, 2016 bp, Artificial Sequence
  Description of Artificial Sequence: Synthetic polynucleotide
atgcaccatcatcaccatcatggtggttctggttcgccgatacttggttattggaagattaaaggactggttcagcccacacgcctcctgctagaatacttagaggaaaaatatgaagagcacctgtacgaacgtgatgagggggacaaatggcgaaacaagaaatttgaattgggcttagaatttccaaatttgccgtattatatcgatggcgacgtaaaactgacccaatcaatggccattattcgctacatcgcagataaacataacatgctgggtggctgccctaaagaacgggctgagatctccatgctggaaggtgcggtgctcgacattcgctacggcgtcagtagaattgcgtatagcaaggatttcgaaactttaaaagtggatttcctgagcaaacttccggagatgctgaaaatgtttgaggataggctttgtcataagacgtatctcaatggtgatcatgttacccacccggactttatgctgtacgacgcccttgatgtcgttctgtatatggatcccatgtgcctggacgccttcccgaaattagtgtgttttaaaaaacgtatcgaagcgattccacagatcgataaatacttgaagtcttctaaatatattgcttggcctctgcaaggctggcaggcaacgttcggtgggggagatcatccgccaaaatcagatctggtgccgcgtgggagccctggcatacaccgcgacggtggttctggtgagaacctgtactttcaaagctcagataatgggcctcaaaaccagcgcaacgctccacgtataaccttcggtggcccgtctgactccacaggcagcaaccagaatggtgagcgtagtggagccaggtctaagcagcgccgtccccagggtctgccgaacaacacggcgagctggtttactgcgcttacccaacacggtaaagaagacttaaaattcccgcgtggccagggcgtcccgatcaacactaactcttccccggatgatcagattggttattaccgcagagcaactcgtcggattcgcggcggcgacggtaaaatgaaagatttgtctccgcgttggtacttttactatctcggcaccggtccggaagctggactgccctacggggcaaacaaggacgggatcatttgggtggctaccgaaggtgccctgaatactccaaaagatcatatcggcacccgtaaccctgctaataacgctgcgatcgttctgcaatttcctcagggtacaactctgccaaaaggcttctatgcagaagggtcgcgtggtggcagccaggcgagtagccgtagcagctcccgctctcgcaactcgtcccgtaactccactccgggctcttctcgcggcacgtccccggctcgtatggcaggtaacggtggtgacgctgctctggcgctgctactgctggacaggctgaaccagctggagtcgaagatgagtggtaaaggccaacagcagcagggccagaccgttaccaaaaagagcgcagctgaagcatctaaaaaaccgcgacagaaacgtaccgcgactaaagcgtacaatgtaacacaggccttcggtcgtcgaggtccggagcaaactcaaggaaactttggcgatcaggaattaatccgccaggggaccgactacaaacactggccgcaaattgcccagttcgccccatccgctagtgcattcttcggtatgagccgcatcggcatggaagtaacgccaagtggtacgtggctgacctacaccggtgctatcaagcttgatgacaaggacccgaactttaaagaccaggttattctgcttaacaaacatattgatgcctataaaactttcccgccgaccgaacccaaaaaggacaaaaagaaaaaagctgatgaaacccaggctctaccgcagcgtcagaaaaaacagcaaactgtgactctgctgccagctgcggacctggatgatttttccaagcagctgcaacagtctatgagctctgcggactctacgcaggcttaa

SEQ ID NO: 50 - DNA, 2016 bp, Artificial Sequence
  Description of Artificial Sequence: Synthetic polynucleotide
atgcaccatcatcaccatcatggtggttctggttcgccgatacttggttattggaagattaaaggactggttcagcccacacgcctcctgctagaatacttagaggaaaaatatgaagagcacctgtacgaacgtgatgagggggacaaatggcgaaacaagaaatttgaattgggcttagaatttccaaatttgccgtattatatcgatggcgacgtaaaactgacccaatcaatggccattattcgctacatcgcagataaacataacatgctgggtggctgccctaaagaacgggctgagatctccatgctggaaggtgcggtgctcgacattcgctacggcgtcagtagaattgcgtatagcaaggatttcgaaactttaaaagtggatttcctgagcaaacttccggagatgctgaaaatgtttgaggataggctttgtcataagacgtatctcaatggtgatcatgttacccacccggactttatgctgtacgacgcccttgatgtcgttctgtatatggatcccatgtgcctggacgccttcccgaaattagtgtgttttaaaaaacgtatcgaagcgattccacagatcgataaatacttgaagtcttctaaatatattgcttggcctctgcaaggctggcaggcaacgttcggtgggggagatcatccgccaaaatcagatctggtgccgcgtgggagccctggcatacaccgcgacggtggttctggtgagaacctgtactttcaaagctcagataatgggcctcaaaaccagcgcaacgctccacgtataaccttcggtggcccgtctgactccacaggcagcaaccagaatggtgagcgtagtggagccaggtctaagcagcgccgtccccagggtctgccgaacaacacggcgagctggtttactgcgcttacccaacacggtaaagaagacttaaaattcccgcgtggccagggcgtcccgatcaacactaactcttccccggatgatcagattggttattaccgcagagcaactcgtcggattcgcggcggcgacggtaaaatgaaagatttgtctccgcgttggtacttttactatctcggcaccggtccggaagctggactgccctacggggcaaacaaggacgggatcatttgggtggctaccgaaggtgccctgaatactccaaaagatcatatcggcacccgtaaccctgctaataacgctgcgatcgttctgcaactgcctcagggtacaactctgccaaaaggcttctatgcagaagggtcgcgtggtggcagccaggcgagtagccgtagcagctcccgctctcgcaactcgtcccgtaactccactccgggctcttctcgcggcacgtccccggctcgtatggcaggtaacggtggtgacgctgctctggcgctgctactgctggacaggctgaaccagctggagtcgaagatgagtggtaaaggccaacagcagcagggccagaccgttaccaaaaagagcgcagctgaaatgtctaaaaaaccgcgacagaaacgtaccgcgactaaaggctgcaatgtaacacagtgtttcggtccccgaggtccggagcaaactcaaggaaactttggcgatgccgaattagtgaagaaagggaccgactacaaacactggccgcaaattgcccagttcgccccatccgctagtgcattcttcggtatgagccgcatctcatcaaaggaaacgccaagtggtacgtggctgacctacaccggtgctatcaagcttgataaagatgacccgaactttaaagaccaggttattctgcttaacaaacatattgatgcctataaaactttcccgccgaccgaacccaaaaaggacaaaaagaaaaaagctgatgaaacccaggctctaccgcagcgtcagaaaaaacagcaaactgtgactctgctgccagctgcggacctggatgatttttccaagcagctgcaacagtctatgagctctgcggactctacgcaggcttaa

SEQ ID NO: 51 - DNA, 2016 bp, Artificial Sequence
  Description of Artificial Sequence: Synthetic polynucleotide
atgcaccatcatcaccatcatggtggttctggttcgccgatacttggttattggaagattaaaggactggttcagcccacacgcctcctgctagaatacttagaggaaaaatatgaagagcacctgtacgaacgtgatgagggggacaaatggcgaaacaagaaatttgaattgggcttagaatttccaaatttgccgtattatatcgatggcgacgtaaaactgacccaatcaatggccattattcgctacatcgcagataaacataacatgctgggtggctgccctaaagaacgggctgagatctccatgctggaaggtgcggtgctcgacattcgctacggcgtcagtagaattgcgtatagcaaggatttcgaaactttaaaagtggatttcctgagcaaacttccggagatgctgaaaatgtttgaggataggctttgtcataagacgtatctcaatggtgatcatgttacccacccggactttatgctgtacgacgcccttgatgtcgttctgtatatggatcccatgtgcctggacgccttcccgaaattagtgtgttttaaaaaacgtatcgaagcgattccacagatcgataaatacttgaagtcttctaaatatattgcttggcctctgcaaggctggcaggcaacgttcggtgggggagatcatccgccaaaatcagatctggtgccgcgtgggagccctggcatacaccgcgacggtggttctggtgagaacctgtactttcaaagctcagataatgggcctcaaaaccagcgcaacgctccacgtataaccttcggtggcccgtctgactccacaggcagcaaccagaatggtgagcgtagtggagccaggtctaagcagcgccgtccccagggtctgccgaacaacacggcgagctggtttactgcgcttacccaacacggtaaagaagacttaaaattcccgcgtggccagggcgtcccgatcaacactaactcttccccggatgatcagattggttattaccgcagagcaactcgtcggattcgcggcggcgacggtaaaatgaaagatttgtctccgctctggtacttttactatctcggcaccggtccggaagctggactgccctacggggcaaacaaggacgggatcatttgggtggctaccgaaggtgccctgaatactccaaaagatcatatcggcacccgtaaccctgctaataacgctgcgatcgttctgcaactgcctcagggtacaactctgccaaaaggcttctatgcagaagggtcgcgtggtggcagccaggcgagtagccgtagcagctcccgctctcgcaactcgtcccgtaactccactccgggctcttctcgcggcacgtccccggctcgtatggcaggtaacggtggtgacgctgctctggcgctgctactgctggacaggctgaaccagctggagtcgaagatgagtggtaaaggccaacagcagcagggccagaccgttaccaaaaagagcgcagctgaagcatctaaaaaaccgcgacagaaacgtaccgcgactaaagcgtacaatgtaacacaggccttcggtcgtcgaggtccggagcaaactcaaggaaactttggcgatcaggaattaatccgccaggggaccgactacaaacactggccgcaaattgcccagttcgccccatccgctagtgcattcttcggtatgagccgcatcggcatggaagtaacgccaagtggtacgtggctgacctacaccggtgctatcaagcttgatgacaaggacccgaactttaaagaccaggttattctgcttaacaaacatattgatgcctataaaactttcccgccgaccgaacccaaaaaggacaaaaagaaaaaagctgatgaaacccaggctctaccgcagcgtcagaaaaaacagcaaactgtgactctgctgccagctgcggacctggatgatttttccaagcagctgcaacagtctatgagctctgcggactctacgcaggcttaa

SEQ ID NO: 52 - DNA, 2016 bp, Artificial Sequence
  Description of Artificial Sequence: Synthetic polynucleotide
atgcaccatcatcaccatcatggtggttctggttcgccgatacttggttattggaagattaaaggactggttcagcccacacgcctcctgctagaatacttagaggaaaaatatgaagagcacctgtacgaacgtgatgagggggacaaatggcgaaacaagaaatttgaattgggcttagaatttccaaatttgccgtattatatcgatggcgacgtaaaactgacccaatcaatggccattattcgctacatcgcagataaacataacatgctgggtggctgccctaaagaacgggctgagatctccatgctggaaggtgcggtgctcgacattcgctacggcgtcagtagaattgcgtatagcaaggatttcgaaactttaaaagtggatttcctgagcaaacttccggagatgctgaaaatgtttgaggataggctttgtcataagacgtatctcaatggtgatcatgttacccacccggactttatgctgtacgacgcccttgatgtcgttctgtatatggatcccatgtgcctggacgccttcccgaaattagtgtgttttaaaaaacgtatcgaagcgattccacagatcgataaatacttgaagtcttctaaatatattgcttggcctctgcaaggctggcaggcaacgttcggtgggggagatcatccgccaaaatcagatctggtgccgcgtgggagccctggcatacaccgcgacggtggttctggtgagaacctgtactttcaaagctcagataatgggcctcaaaaccagcgcaacgctccacgtataaccttcggtggcccgtctgactccacaggcagcaaccagaatggtgagcgtagtggagccaggtctaagcagcgccgtccccagggtctgccgaacaacacggcgagctggtttactgcgcttacccaacacggtaaagaagacttaaaattcccgcgtggccagggcgtcccgatcaacactaactcttccccggatgatcagattggttattaccgcagagcaactcgtcggattcgcggcggcgacggtaaaatgaaagatttgtctccgcgttggtacttttactatctcggcaccggtccggaagctggactgccctacggggcaaacaaggacgggatcatttgggtggctaccgaaggtgccctgaatactccaaaagatcatatcggcacccgtaaccctgctaataacgctgcgatcgttctgcaactgcctcagggtacaactctgccaaaaggcttctatgcagaagggtcgcgtggtggcagccaggcgagtagccgtagcagctcccgctctcgcaactcgtcccgtaactccactccgggctcttctcgcggcacgtccccggctcgtatggcaggtaacggtggtgacgctgctctggcgctgctactgctggacaggctgaaccagctggagtcgaagatgagtggtaaaggccaacagcagcagggccagaccgttaccaaaaagagcgcagctgaagcatctaaaaaaccgcgacagaaacgtaccgcgactaaagcgtacaatgtaacacaggccttcggtcgtcgaggtccggagcaaactcaaggaaactttggcgatcaggaattaatccgccaggggaccgactacaaacactggccgcaaattgcccagttcgccccatccgctagtgcattcttcggtatgagccgcatcggcatggaagtaacgccaagtggtacgtggctgacctacaccggtgctatcaagcttgatcctaaggacccgaactttaaagaccaggttattctgcttaacaaacatattgatgcctataaaactttcccgccgaccgaacccaaaaaggacaaaaagaaaaaagctgatgaaacccaggctctaccgcagcgtcagaaaaaacagcaaactgtgactctgctgccagctgcggacctggatgatttttccaagcagctgcaacagtctatgagctctgcggactctacgcaggcttaa

SEQ ID NO: 53 - DNA, 2016 bp, Artificial Sequence
  Description of Artificial Sequence: Synthetic polynucleotide
atgcaccatcatcaccatcatggtggttctggttcgccgatacttggttattggaagattaaaggactggttcagcccacacgcctcctgctagaatacttagaggaaaaatatgaagagcacctgtacgaacgtgatgagggggacaaatggcgaaacaagaaatttgaattgggcttagaatttccaaatttgccgtattatatcgatggcgacgtaaaactgacccaatcaatggccattattcgctacatcgcagataaacataacatgctgggtggctgccctaaagaacgggctgagatctccatgctggaaggtgcggtgctcgacattcgctacggcgtcagtagaattgcgtatagcaaggatttcgaaactttaaaagtggatttcctgagcaaacttccggagatgctgaaaatgtttgaggataggctttgtcataagacgtatctcaatggtgatcatgttacccacccggactttatgctgtacgacgcccttgatgtcgttctgtatatggatcccatgtgcctggacgccttcccgaaattagtgtgttttaaaaaacgtatcgaagcgattccacagatcgataaatacttgaagtcttctaaatatattgcttggcctctgcaaggctggcaggcaacgttcggtgggggagatcatccgccaaaatcagatctggtgccgcgtgggagccctggcatacaccgcgacggtggttctggtgagaacctgtactttcaaagctcagataatgggcctcaaaaccagcgcaacgctccacgtataaccttcggtggcccgtctgactccacaggcagcaaccagaatggtgagcgtagtggagccaggtctaagcagcgccgtccccagggtctgccgaacaacacggcgagctggtttactgcgcttacccaacacggtaaagaagacttaaaattcccgcgtggccagggcgtcccgatcaacactaactcttccccggatgatcagattggttattaccgcagagcaactcgtcggattcgcggcggcgacggtaaaatgaaagatttgtctccgcgttggtacttttactatctcggcaccggtccggaagctggactgccctacggggcaaacaaggacgggatcatttgggtggctaccgaaggtgccctgaatactccaaaagatcatatcggcacccgtaaccctgctaataacgctgcgatcgttctgcaactgcctcagggtacaactctgccaaaaggcttctatgcagaagggtcgcgtggtggcagccaggcgagtagccgtagcagctcccgctctcgcaactcgtcccgtaactccactccgggctcttctcgcggcacgtccccggctcgtatggcaggtaacggtggtgacgctgctctggcgctgctactgctggacaggctgaaccagctggagtcgaagatgagtggtaaaggccaacagcagcagggccagaccgttaccaaaaagagcgcagctgaagcatctaaaaaaccgcgacagaaacgtaccgcgactaaagcgtacaatgtaacacaggccttcggtcgtcgaggtccggagcaaactcaaggaaactttggcgatcaggaaatgatccgccaggggaccgactacaaacactggccgcaaattgcccagttcgccccatccgctagtgcattcttcggtatgagccgcatcggcatggaagtaacgccaagtggtacgtggctgacctacaccggtgctatcaagcttgatgacaaggacccgaactttaaagaccaggttattctgcttaacaaacatattgatgcctataaaactttcccgccgaccgaacccaaaaaggacaaaaagaaaaaagctgatgaaacccaggctctaccgcagcgtcagaaaaaacagcaaactgtgactctgctgccagctgcggacctggatgatttttccaagcagctgcaacagtctatgagctctgcggactctacgcaggcttaa

SEQ ID NO: 54 - DNA, 2016 bp, Artificial Sequence
  Description of Artificial Sequence: Synthetic polynucleotide
atgcaccatcatcaccatcatggtggttctggttcgccgatacttggttattggaagattaaaggactggttcagcccacacgcctcctgctagaatacttagaggaaaaatatgaagagcacctgtacgaacgtgatgagggggacaaatggcgaaacaagaaatttgaattgggcttagaatttccaaatttgccgtattatatcgatggcgacgtaaaactgacccaatcaatggccattattcgctacatcgcagataaacataacatgctgggtggctgccctaaagaacgggctgagatctccatgctggaaggtgcggtgctcgacattcgctacggcgtcagtagaattgcgtatagcaaggatttcgaaactttaaaagtggatttcctgagcaaacttccggagatgctgaaaatgtttgaggataggctttgtcataagacgtatctcaatggtgatcatgttacccacccggactttatgctgtacgacgcccttgatgtcgttctgtatatggatcccatgtgcctggacgccttcccgaaattagtgtgttttaaaaaacgtatcgaagcgattccacagatcgataaatacttgaagtcttctaaatatattgcttggcctctgcaaggctggcaggcaacgttcggtgggggagatcatccgccaaaatcagatctggtgccgcgtgggagccctggcatacaccgcgacggtggttctggtgagaacctgtactttcaaagctcagataatgggcctcaaaaccagcgcaacgctccacgtataaccttcggtggcccgtctgactccacaggcagcaaccagaatggtgagcgtagtggagccaggtctaagcagcgccgtccccagggtctgccgaacaacacggcgagctggtttactccgcttacccaatttggtaaagaagacttaaaattcccgcccggccagggcgtcccgatcaacactaactcttccccggatgatcagattggttattaccgcagagcaactcgtcggattcgcggcggcgacggtaaaatgaaagatttgcctccgaagtggtacttttactatctcggcaccggtccgcatgctgatctgccctacgggcaaaaacacccaggggttgtgtgggtggctagacctggtgccctgaatactccaaaagatcatatcggcacccgtaaccctgctaataacgctgcgatcccgctgcaactgcctccgggtacaaagctgccaaaaggcttctatgcagaagggtcgcgtggtggcagccaggcgagtagccgtagcagctcccgctctcgcaactcgtcccgtaactccactccgggctcttctcgcggcacgtccccggctcgtatggcaggtaacggtggtgacgctgctctggcgctgctactgctggacaggctgaaccagctggagtcgaagatgagtggtaaaggccaacagcagcagggccagaccgttaccaaaaagagcgcagctgaagcatctaaaaaaccgcgacagaaacgtaccgcgactaaagcgtacaatgtaacacaggccttcggtcgtcgaggtccggagcaaactcaaggaaactttggcgatcaggaattaatccgccaggggaccgactacaaacactggccgcaaattgcccagttcgccccatccgctagtgcattcttcggtatgagccgcatcggcatggaagtaacgccaagtggtacgtggctgacctacaccggtgctatcaagcttgatgacaaggacccgaactttaaagaccaggttattctgcttaacaaacatattgatgcctataaaactttcccgccgaccgaacccaaaaaggacaaaaagaaaaaagctgatgaaacccaggctctaccgcagcgtcagaaaaaacagcaaactgtgactctgctgccagctgcggacctggatgatttttccaagcagctgcaacagtctatgagctctgcggactctacgcaggcttaa

SEQ ID NO: 55 - DNA, 2016 bp, Artificial Sequence
  Description of Artificial Sequence: Synthetic polynucleotide
atgcaccatcatcaccatcatggtggttctggttcgccgatacttggttattggaagattaaaggactggttcagcccacacgcctcctgctagaatacttagaggaaaaatatgaagagcacctgtacgaacgtgatgagggggacaaatggcgaaacaagaaatttgaattgggcttagaatttccaaatttgccgtattatatcgatggcgacgtaaaactgacccaatcaatggccattattcgctacatcgcagataaacataacatgctgggtggctgccctaaagaacgggctgagatctccatgctggaaggtgcggtgctcgacattcgctacggcgtcagtagaattgcgtatagcaaggatttcgaaactttaaaagtggatttcctgagcaaacttccggagatgctgaaaatgtttgaggataggctttgtcataagacgtatctcaatggtgatcatgttacccacccggactttatgctgtacgacgcccttgatgtcgttctgtatatggatcccatgtgcctggacgccttcccgaaattagtgtgttttaaaaaacgtatcgaagcgattccacagatcgataaatacttgaagtcttctaaatatattgcttggcctctgcaaggctggcaggcaacgttcggtgggggagatcatccgccaaaatcagatctggtgccgcgtgggagccctggcatacaccgcgacggtggttctggtgagaacctgtactttcaaagctcagataatgggcctcaaaaccagcgcaacgctccacgtataaccttcggtggcccgtctgactccacaggcagcaaccagaatggtgagcgtagtggagccaggtctaagcagcgccgtccccagggtctgccgaacaacacggcgagctggtttactccgcttacccaatttggtaaagaagacttaaaattcccgcctggccagggcgtcccgatcaacactaactcttccccggatgatcagattggttattaccgcagagcaactcgtcggattcgcggcggcgacggtaaaatgaaagatttgccaccgaaatggtacttttactatctcggcaccggtccgcatgctgatctgccctacgggcaaaagcacccaggggtattttgggtggctcgacctggtgccctgaatactccaaaagatcatatcggcacccgtaaccctgctaataacgctgcgatcccgctgcaactgcctccgggtacaaagctgccaaaaggcttctatgcagaagggtcgcgtggtggcagccaggcgagtagccgtagcagctcccgctctcgcaactcgtcccgtaactccactccgggctcttctcgcggcacgtccccggctcgtatggcaggtaacggtggtgacgctgctctggcgctgctactgctggacaggctgaaccagctggagtcgaagatgagtggtaaaggccaacagcagcagggccagaccgttaccaaaaagagcgcagctgaagcatctaaaaaaccgcgacagaaacgtaccgcgactaaagcgtacaatgtaacacaggccttcggtcgtcgaggtccggagcaaactcaaggaaactttggcgatcaggaattaatccgccaggggaccgactacaaacactggccgcaaattgcccagttcgccccatccgctagtgcattcttcggtatgagccgcatcggcatggaagtaacgccaagtggtacgtggctgacctacaccggtgctatcaagcttgatgacaaggacccgaactttaaagaccaggttattctgcttaacaaacatattgatgcctataaaactttcccgccgaccgaacccaaaaaggacaaaaagaaaaaagctgatgaaacccaggctctaccgcagcgtcagaaaaaacagcaaactgtgactctgctgccagctgcggacctggatgatttttccaagcagctgcaacagtctatgagctctgcggactctacgcaggcttaa

SEQ ID NO: 56 - DNA, 2016 bp, Artificial Sequence
  Description of Artificial Sequence: Synthetic polynucleotide
atgcaccatcatcaccatcatggtggttctggttcgccgatacttggttattggaagattaaaggactggttcagcccacacgcctcctgctagaatacttagaggaaaaatatgaagagcacctgtacgaacgtgatgagggggacaaatggcgaaacaagaaatttgaattgggcttagaatttccaaatttgccgtattatatcgatggcgacgtaaaactgacccaatcaatggccattattcgctacatcgcagataaacataacatgctgggtggctgccctaaagaacgggctgagatctccatgctggaaggtgcggtgctcgacattcgctacggcgtcagtagaattgcgtatagcaaggatttcgaaactttaaaagtggatttcctgagcaaacttccggagatgctgaaaatgtttgaggataggctttgtcataagacgtatctcaatggtgatcatgttacccacccggactttatgctgtacgacgcccttgatgtcgttctgtatatggatcccatgtgcctggacgccttcccgaaattagtgtgttttaaaaaacgtatcgaagcgattccacagatcgataaatacttgaagtcttctaaatatattgcttggcctctgcaaggctggcaggcaacgttcggtgggggagatcatccgccaaaatcagatctggtgccgcgtgggagccctggcatacaccgcgacggtggttctggtgagaacctgtactttcaaagctcagataatgggcctcaaaaccagcgcaacgctccacgtataaccttcggtggcccgtctgactccacaggcagcaaccagaatggtgagcgtagtggagccaggtctaagcagcgccgtccccagggtctgccgaacaacacggcgagctggtttactgcgcttacccaacacggtaaagaagacttaaaattcccgcgtggccagggcgtcccgatcaacactaactcttccccggatgatcagattggttattaccgcagagcaactcgtcggattcgcggcggcgacggtaaaatgaaagatttgtctccgcgttggtacttttactatctcggcaccggtccggaagctggactgccctacggggcagaaaaggacgggatcatttgggtggctaccgaaggtgccctgaatactccaaaagatcatatcggcacccgtaaccctgctaataacgctgcgatcgttctgcaactgcctcagggtacaactctgccaaaaggcttctatgcagaagggtcgcgtggtggcagccaggcgagtagccgtagcagctcccgctctcgcaactcgtcccgtaactccactccgggctcttctcgcggcacgtccccggctcgtatggcaggtaacggtggtgacgctgctctggcgctgctactgctggacaggctgaaccagctggagtcgaagatgagtggtaaaggccaacagcagcagggccagaccgttaccaaaaagagcgcagctgaagcatctaaaaaaccgcgacagaaacgtaccgcgactaaagcgtacaatgtaacacaggccttcggtcgtcgaggtccggagcaaactcaaggaaactttggcgatcaggaattaatccgccaggggaccgactacaaacactggccgcaaattgcccagttcgccccatccgctagtgcattcttcggtatgagccgcatcggcatggaagtaacgccaagtggtacgtggctgacctacaccggtgctatcaagcttgatgacaaggacccgaactttaaagaccaggttattctgcttaacaaacatattgatgcctataaaactttcccgccgaccgaacccaaaaaggacaaaaagaaaaaagctgatgaaacccaggctctaccgcagcgtcagaaaaaacagcaaactgtgactctgctgccagctgcggacctggatgatttttccaagcagctgcaacagtctatgagctctgcggactctacgcaggcttaa

SEQ ID NO: 57 - DNA, 2016 bp, Artificial Sequence
  Description of Artificial Sequence: Synthetic polynucleotide
atgcaccatcatcaccatcatggtggttctggttcgccgatacttggttattggaagattaaaggactggttcagcccacacgcctcctgctagaatacttagaggaaaaatatgaagagcacctgtacgaacgtgatgagggggacaaatggcgaaacaagaaatttgaattgggcttagaatttccaaatttgccgtattatatcgatggcgacgtaaaactgacccaatcaatggccattattcgctacatcgcagataaacataacatgctgggtggctgccctaaagaacgggctgagatctccatgctggaaggtgcggtgctcgacattcgctacggcgtcagtagaattgcgtatagcaaggatttcgaaactttaaaagtggatttcctgagcaaacttccggagatgctgaaaatgtttgaggataggctttgtcataagacgtatctcaatggtgatcatgttacccacccggactttatgctgtacgacgcccttgatgtcgttctgtatatggatcccatgtgcctggacgccttcccgaaattagtgtgttttaaaaaacgtatcgaagcgattccacagatcgataaatacttgaagtcttctaaatatattgcttggcctctgcaaggctggcaggcaacgttcggtgggggagatcatccgccaaaatcagatctggtgccgcgtgggagccctggcatacaccgcgacggtggttctggtgagaacctgtactttcaaagctcagataatgggcctcaaaaccagcgcaacgctccacgtataaccttcggtggcccgtctgactccacaggcagcaaccagaatggtgagcgtagtggagccaggtctaagcagcgccgtccccagggtctgccgaacaacacggcgagctggtttactgcgcttacccaacacggtaaagaagacttaaaattcccgcgtggccagggcgtcccgatcaacactaactcttccccggatgatcagattggttattaccgcagagcaactcgtcggattcgcggcggcgacggtaaaatgaaagatttgtctccgcgttggtacttttactatctcggcaccggtccggaagctggactgccctacggggcaaacaaggacgggatcatttgggtggctaccgaaggtgccctgaatactccaaaagatcatatcggcacccgtaaccctgctaataacgctgcgatcgttctgcaactgcctcagggtacaactctgccaaaaggcttctatgcagaagggtcgcgtggtggcagccaggcgagtagccgtagcagctcccgctctcgcaactcgtcccgtaactccactccgggctcttctcgcggcacgtccccggctcgtatggcaggtaacggtggtgacgctgctctggcgctgctactgctggacaggctgaaccagctggagtcgaagatgagtggtaaaggccaacagcagcagggccagaccgttaccaaaaagagcgcagctgaagcatctaaaaaaccgcgacagaaacgtaccgcgactaaaggatacaatgtaacacaggccttcggtcgtcgaggtccggagcaaactcaaggaaactttggcgatcaggatttaaatcgcgaagggaccgactacaaacactggccgcaaattgcccagttcgccccatccgctagtgcattcttcggtatgagccgcatctcaacggaagaaacgccaagtggtacgtggctgacctacaccggtgctatcaagcttgataagaaggacccgaactttaaagaccaggttattctgcttaacaaacatattgatgcctataaaactttcccgccgaccgaacccaaaaaggacaaaaagaaaaaagctgatgaaacccaggctctaccgcagcgtcagaaaaaacagcaaactgtgactctgctgccagctgcggacctggatgatttttccaagcagctgcaacagtctatgagctctgcggactctacgcaggcttaa

SEQ ID NO: 58 - DNA, 2016 bp, Artificial Sequence
  Description of Artificial Sequence: Synthetic polynucleotide
atgcaccatcatcaccatcatggtggttctggttcgccgatacttggttattggaagattaaaggactggttcagcccacacgcctcctgctagaatacttagaggaaaaatatgaagagcacctgtacgaacgtgatgagggggacaaatggcgaaacaagaaatttgaattgggcttagaatttccaaatttgccgtattatatcgatggcgacgtaaaactgacccaatcaatggccattattcgctacatcgcagataaacataacatgctgggtggctgccctaaagaacgggctgagatctccatgctggaaggtgcggtgctcgacattcgctacggcgtcagtagaattgcgtatagcaaggatttcgaaactttaaaagtggatttcctgagcaaacttccggagatgctgaaaatgtttgaggataggctttgtcataagacgtatctcaatggtgatcatgttacccacccggactttatgctgtacgacgcccttgatgtcgttctgtatatggatcccatgtgcctggacgccttcccgaaattagtgtgttttaaaaaacgtatcgaagcgattccacagatcgataaatacttgaagtcttctaaatatattgcttggcctctgcaaggctggcaggcaacgttcggtgggggagatcatccgccaaaatcagatctggtgccgcgtgggagccctggcatacaccgcgacggtggttctggtgagaacctgtactttcaaagctcagataatgggcctcaaaaccagcgcaacgctccacgtataaccttcggtggcccgtctgactccacaggcagcaaccagaatggtgagcgtagtggagccaggtctaagcagcgccgtccccagggtctgccgaacaacacggcgagctggtttactgcgcttacccaacacggtaaagaagacttaaaattcccgcgtggccagggcgtcccgatcaacactaactcttccccggatgatcagattggttattaccgcagagcaactcgtcggattcgcggcggcgacggtaaaatgaaagatttgtctccgcgttggtacttttactatctcggcaccggtccggaagctggactgccctacggggcaaacaaggacgggatcatttgggtggctaccgaaggtgccctgaatactccaaaagatcatatcggcacccgtaaccctgctaataacgctgcgatcgttctgcaactgcctcagggtacaactctgccaaaaggcttctatgcagaagggtcgcgtggtggcagccaggcgagtagccgtagcagctcccgctctcgcaactcgtcccgtaactccactccgggctcttctcgcggcacgtccccggctcgtatggcaggtaacggtggtgacgctgctctggcgctgctactgctggacaggctgaaccagctggagtcgaagatgagtggtaaaggccaacagcagcagggccagaccgttaccaaaaagagcgcagctgaaatgtctaaaaaaccgcgacagaaacgtaccgcgactaaagggtttaatgtaacacagtgcttcggtccccgaggtccggagcaaactcaaggaaactttggcgatgcggatttaatcaaaaaagggaccgactacaaacactggccgcaaattgcccagttcgccccatccgctagtgcattcttcggtatgagccgcatcagttcaaaggaaacgccaagtggtacgtggctgacctacaccggtgctatcaagcttgataaagatgacccgaactttaaagaccaggttattctgcttaacaaacatattgatgcctataaaactttcccgccgaccgaacccaaaaaggacaaaaagaaaaaagctgatgaaacccaggctctaccgcagcgtcagaaaaaacagcaaactgtgactctgctgccagctgcggacctggatgatttttccaagcagctgcaacagtctatgagctctgcggactctacgcaggcttaa

SEQ ID NO: 59 - DNA, 2016 bp, Artificial Sequence
  Description of Artificial Sequence: Synthetic polynucleotide
atgcaccatcatcaccatcatggtggttctggttcgccgatacttggttattggaagattaaaggactggttcagcccacacgcctcctgctagaatacttagaggaaaaatatgaagagcacctgtacgaacgtgatgagggggacaaatggcgaaacaagaaatttgaattgggcttagaatttccaaatttgccgtattatatcgatggcgacgtaaaactgacccaatcaatggccattattcgctacatcgcagataaacataacatgctgggtggctgccctaaagaacgggctgagatctccatgctggaaggtgcggtgctcgacattcgctacggcgtcagtagaattgcgtatagcaaggatttcgaaactttaaaagtggatttcctgagcaaacttccggagatgctgaaaatgtttgaggataggctttgtcataagacgtatctcaatggtgatcatgttacccacccggactttatgctgtacgacgcccttgatgtcgttctgtatatggatcccatgtgcctggacgccttcccgaaattagtgtgttttaaaaaacgtatcgaagcgattccacagatcgataaatacttgaagtcttctaaatatattgcttggcctctgcaaggctggcaggcaacgttcggtgggggagatcatccgccaaaatcagatctggtgccgcgtgggagccctggcatacaccgcgacggtggttctggtgagaacctgtactttcaaagctcagataatgggcctcaaaaccagcgcaacgctccacgtataaccttcggtggcccgtctgactccacaggcagcaaccagaatggtgagcgtagtggagccaggtctaagcagcgccgtccccagggtctgccgaacaacacggcgagctggtttactgcgcttacccaacacggtaaagaagacttaaaattcccgaaaggccagggcgtcccgatcaacactaactctaaaccggatgatcagattggttattaccgcagacaagtgcgtcggtatcgcggcggcgacggtcaaatgaaagatttgaatccgcgttggtacttttactatctcggcaccggtccggaagctggactgccctacggggcaaacaaggacgggatcatttgggtggctaccgaaggtgccctgaatactccaaaagatcatatcggcacccgtaaccctgctaataacgctgcgatcgttctgcaactgcctcagggtacaactctgccaaaaggcttctatgcagaagggtcgcgtggtggcagccaggcgagtagccgtagcagctcccgctctcgcaactcgtcccgtaactccactccgggctcttctcgcggcacgtccccggctcgtatggcaggtaacggtggtgacgctgctctggcgctgctactgctggacaggctgaaccagctggagtcgaagatgagtggtaaaggccaacagcagcagggccagaccgttaccaaaaagagcgcagctgaagcatctaaaaaaccgcgacagaaacgtaccgcgactaaagcgtacaatgtaacacaggccttcggtcgtcgaggtccggagcaaactcaaggaaactttggcgatcaggaattaatccgccaggggaccgactacaaacactggccgcaaattgcccagttcgccccatccgctagtgcattcttcggtatgagccgcatcggcatggaagtaacgccaagtggtacgtggctgacctacaccggtgctatcaagcttgatgacaaggacccgaactttaaagaccaggttattctgcttaacaaacatattgatgcctataaaactttcccgccgaccgaacccaaaaaggacaaaaagaaaaaagctgatgaaacccaggctctaccgcagcgtcagaaaaaacagcaaactgtgactctgctgccagctgcggacctggatgatttttccaagcagctgcaacagtctatgagctctgcggactctacgcaggcttaa

SEQ ID NO: 60 - DNA, 2016 bp, Artificial Sequence
  Description of Artificial Sequence: Synthetic polynucleotide
atgcaccatcatcaccatcatggtggttctggttcgccgatacttggttattggaagattaaaggactggttcagcccacacgcctcctgctagaatacttagaggaaaaatatgaagagcacctgtacgaacgtgatgagggggacaaatggcgaaacaagaaatttgaattgggcttagaatttccaaatttgccgtattatatcgatggcgacgtaaaactgacccaatcaatggccattattcgctacatcgcagataaacataacatgctgggtggctgccctaaagaacgggctgagatctccatgctggaaggtgcggtgctcgacattcgctacggcgtcagtagaattgcgtatagcaaggatttcgaaactttaaaagtggatttcctgagcaaacttccggagatgctgaaaatgtttgaggataggctttgtcataagacgtatctcaatggtgatcatgttacccacccggactttatgctgtacgacgcccttgatgtcgttctgtatatggatcccatgtgcctggacgccttcccgaaattagtgtgttttaaaaaacgtatcgaagcgattccacagatcgataaatacttgaagtcttctaaatatattgcttggcctctgcaaggctggcaggcaacgttcggtgggggagatcatccgccaaaatcagatctggtgccgcgtgggagccctggcatacaccgcgacggtggttctggtgagaacctgtactttcaaagctcagataatgggcctcaaaaccagcgcaacgctccacgtataaccttcggtggcccgtctgactccacaggcagcaaccagaatggtgagcgtagtggagccaggtctaagcagcgccgtccccagggtctgccgaacaacacggcgagctggtttactgcgcttacccaacacggtaaagaagacttaaaattcccgcgtggccagggcgtcccgatcaacactaactcttccccggatgatcagattggttattaccgcagagcaactcgtcggattcgcggcggcgacggtaaaatgaaagatttgtctccgcgttggtacttttactatctcggcaccggtccggaagctggactgccctacggggcaaacaaggacgggatcatttgggtggctaccgaaggtgccctgaatactccaaaagatcatatcggcacccgtaaccctgctaataacgctgcgatcgttctgcaactgcctcagggtacaactctgccaaaaggcttctatgcagaagggtcgcgtggtggcagccaggcgagtagccgtagcagcgagcgctctcgcaactcgtcccgtaactccactccgggctctgagcgcggcacgtccccggctcgtatggcaggtaacggtggtgacgctgctctggcgctgctactgctggacaggctgaaccagctggagtcgaagatgagtggtaaaggccaacagcagcagggccagaccgttaccaaaaagagcgcagctgaagcatctaaaaaaccgcgacagaaacgtaccgcgactaaagcgtacaatgtaacacaggccttcggtcgtcgaggtccggagcaaactcaaggaaactttggcgatcaggaattaatccgccaggggaccgactacaaacactggccgcaaattgcccagttcgccccatccgctagtgcattcttcggtatgagccgcatcggcatggaagtaacgccaagtggtacgtggctgacctacaccggtgctatcaagcttgatgacaaggacccgaactttaaagaccaggttattctgcttaacaaacatattgatgcctataaaactttcccgccgaccgaacccaaaaaggacaaaaagaaaaaagctgatgaaacccaggctctaccgcagcgtcagaaaaaacagcaaactgtgactctgctgccagctgcggacctggatgatttttccaagcagctgcaacagtctatgagctctgcggactctacgcaggcttaa

SEQ ID NO: 61 - DNA, 2016 bp, Artificial Sequence
  Description of Artificial Sequence: Synthetic polynucleotide
atgcaccatcatcaccatcatggtggttctggttcgccgatacttggttattggaagattaaaggactggttcagcccacacgcctcctgctagaatacttagaggaaaaatatgaagagcacctgtacgaacgtgatgagggggacaaatggcgaaacaagaaatttgaattgggcttagaatttccaaatttgccgtattatatcgatggcgacgtaaaactgacccaatcaatggccattattcgctacatcgcagataaacataacatgctgggtggctgccctaaagaacgggctgagatctccatgctggaaggtgcggtgctcgacattcgctacggcgtcagtagaattgcgtatagcaaggatttcgaaactttaaaagtggatttcctgagcaaacttccggagatgctgaaaatgtttgaggataggctttgtcataagacgtatctcaatggtgatcatgttacccacccggactttatgctgtacgacgcccttgatgtcgttctgtatatggatcccatgtgcctggacgccttcccgaaattagtgtgttttaaaaaacgtatcgaagcgattccacagatcgataaatacttgaagtcttctaaatatattgcttggcctctgcaaggctggcaggcaacgttcggtgggggagatcatccgccaaaatcagatctggtgccgcgtgggagccctggcatacaccgcgacggtggttctggtgagaacctgtactttcaaagctcagataatgggcctcaaaaccagcgcaacgctccacgtataaccttcggtggcccgtctgactccacaggcagcaaccagaatggtgagcgtagtggagccaggtctaagcagcgccgtccccagggtctgccgaacaacacggcgagctggtttactgcgcttacccaacacggtaaagaagacttaaaattcccgcgtggccagggcgtcccgatcaacactaactcttccccggatgatcagattggttattaccgcagagcaactcgtcggattcgcggcggcgacggtaaaatgaaagatttgtctccgcgttggtacttttactatctcggcaccggtccggaagctggactgccctacggggcaaacaaggacgggatcatttgggtggctaccgaaggtgccctgaatactccaaaagatcatatcggcacccgtaaccctgctaataacgctgcgatcgttctgcaactgcctcagggtacaactctgccaaaaggcttctatgcagaagggtcgcgtggtggcagccaggcgagtagccgtagcagctcccgctctcgcaactcgtcccgtaactccactccgggctcttctcgcggcacgtccccggctcgtatggcaggtaacggtggtgacgctgctctggcgctgctactgctggacaggctgaaccagctggagtcgaagatgagtggtaaaggccaacagcagcagggccagaccgttaccaaaaagagcgcagctgaagcatctaaaaaaccgcgacagaaacgtaccgcgactaaacaatacaatgtaacacaggccttcggtcgtcgaggtccggagcaaactcaaggaaactttggcgatcaggaattaatccgccaggggaccgactacaaacactggccgcaaattgcccagttcgccccatccgctagtgcattcttcggtatgagccgcatcggcatggaagtaacgccaagtggtacgtggctgacctacaccggtgctatcaagcttgatgacaaggacccgaactttaaagaccaggttattctgcttaacaaacatattgatgcctataaaactttcccgccgaccgaacccaaaaaggacaaaaagaaaaaagctgatgaaacccaggctctaccgcagcgtcagaaaaaacagcaaactgtgactctgctgccagctgcggacctggatgatttttccaagcagctgcaacagtctatgagctctgcggactctacgcaggcttaa

SEQ ID NO: 62 - DNA, 2016 bp, Artificial Sequence
  Description of Artificial Sequence: Synthetic polynucleotide
atgcaccatcatcaccatcatggtggttctggttcgccgatacttggttattggaagattaaaggactggttcagcccacacgcctcctgctagaatacttagaggaaaaatatgaagagcacctgtacgaacgtgatgagggggacaaatggcgaaacaagaaatttgaattgggcttagaatttccaaatttgccgtattatatcgatggcgacgtaaaactgacccaatcaatggccattattcgctacatcgcagataaacataacatgctgggtggctgccctaaagaacgggctgagatctccatgctggaaggtgcggtgctcgacattcgctacggcgtcagtagaattgcgtatagcaaggatttcgaaactttaaaagtggatttcctgagcaaacttccggagatgctgaaaatgtttgaggataggctttgtcataagacgtatctcaatggtgatcatgttacccacccggactttatgctgtacgacgcccttgatgtcgttctgtatatggatcccatgtgcctggacgccttcccgaaattagtgtgttttaaaaaacgtatcgaagcgattccacagatcgataaatacttgaagtcttctaaatatattgcttggcctctgcaaggctggcaggcaacgttcggtgggggagatcatccgccaaaatcagatctggtgccgcgtgggagccctggcatacaccgcgacggtggttctggtgagaacctgtactttcaaagctcagataatgggcctcaaaaccagcgcaacgctccacgtataaccttcggtggcccgtctgactccacaggcagcaaccagaatggtgagcgtagtggagccaggtctaagcagcgccgtccccagggtctgccgaacaacacggcgagctggtttactgcgcttacccaacacggtaaagaagacttaaaattcccgcgtggccagggcgtcccgatcaacactaactcttccccggatgatcagattggttattaccgcagaatcactcgtcggattcgcggcggcgacggtaaaatgaaagatttgtctccgcgttggtacttttactatctcggcaccggtccggaagctggactgccctacggggcaaacaaggacgggatcatttgggtggctaccgaaggtgccctgaatactccaaaagatcatatcggcacccgtaaccctgctaataacgctgcgatcgttctgcaactgcctcagggtacaactctgccaaaaggcttctatgcagaagggtcgcgtggtggcagccaggcgagtagccgtagcagctcccgctctcgcaactcgtcccgtaactccactccgggctcttctcgcggcacgtccccggctcgtatggcaggtaacggtggtgacgctgctctggcgctgctactgctggacaggctgaaccagctggagtcgaagatgagtggtaaaggccaacagcagcagggccagaccgttaccaaaaagagcgcagctgaagcatctaaaaaaccgcgacagaaacgtaccgcgactaaagcgtacaatgtaacacaggccttcggtcgtcgaggtccggagcaaactcaaggaaactttggcgatcaggaattaatccgccaggggaccgactacaaacactggccgcaaattgcccagttcgccccatccgctagtgcattcttcggtatgagccgcatcggcatggaagtaacgccaagtggtacgtggctgacctacaccggtgctatcaagcttgatgacaaggacccgaactttaaagaccaggttattctgcttaacaaacatattgatgcctataaaactttcccgccgaccgaacccaaaaaggacaaaaagaaaaaagctgatgaaacccaggctctaccgcagcgtcagaaaaaacagcaaactgtgactctgctgccagctgcggacctggatgatttttccaagcagctgcaacagtctatgagctctgcggactctacgcaggcttaa

SEQ ID NO: 63 - DNA, 2016 bp, Artificial Sequence
  Description of Artificial Sequence: Synthetic polynucleotide
atgcaccatcatcaccatcatggtggttctggttcgccgatacttggttattggaagattaaaggactggttcagcccacacgcctcctgctagaatacttagaggaaaaatatgaagagcacctgtacgaacgtgatgagggggacaaatggcgaaacaagaaatttgaattgggcttagaatttccaaatttgccgtattatatcgatggcgacgtaaaactgacccaatcaatggccattattcgctacatcgcagataaacataacatgctgggtggctgccctaaagaacgggctgagatctccatgctggaaggtgcggtgctcgacattcgctacggcgtcagtagaattgcgtatagcaaggatttcgaaactttaaaagtggatttcctgagcaaacttccggagatgctgaaaatgtttgaggataggctttgtcataagacgtatctcaatggtgatcatgttacccacccggactttatgctgtacgacgcccttgatgtcgttctgtatatggatcccatgtgcctggacgccttcccgaaattagtgtgttttaaaaaacgtatcgaagcgattccacagatcgataaatacttgaagtcttctaaatatattgcttggcctctgcaaggctggcaggcaacgttcggtgggggagatcatccgccaaaatcagatctggtgccgcgtgggagccctggcatacaccgcgacggtggttctggtgagaacctgtactttcaaagctcagataatgggcctcaaaaccagcgcaacgctccacgtataaccttcggtggcccgtctgactccacaggcagcaaccagaatggtgagcgtagtggagccaggtctaagcagcgccgtccccagggtctgccgaacaacacggcgagctggtttactgcgcttacccaacacggtaaagaagacttaaaattcccgcgtggccagggcgtcccgatcaacactaactcttccccggatgatcagattggttattaccgcagagcaactcgtcggattcgcggcggcgacggtaaaatgaaagatttgtctccgcgttggtacttttactatctcggcaccggtccggaagctggactgccctacggggcaaacaaggacgggatcatttgggtggctaccgaaggtgccctgaatactccaaaagatcatatcggcacccgtaaccctgctaatcatgctgcgatcgttctgcaactgcctcagggtacaactctgccaaaaggcttctatgcagaagggtcgcgtggtggcagccaggcgagtagccgtagcagctcccgctctcgcaactcgtcccgtaactccactccgggctcttctcgcggcacgtccccggctcgtatggcaggtaacggtggtgacgctgctctggcgctgctactgctggacaggctgaaccagctggagtcgaagatgagtggtaaaggccaacagcagcagggccagaccgttaccaaaaagagcgcagctgaagcatctaaaaaaccgcgacagaaacgtaccgcgactaaagcgtacaatgtaacacaggccttcggtcgtcgaggtccggagcaaactcaaggaaactttggcgatcaggaattaatccgccaggggaccgactacaaacactggccgcaaattgcccagttcgccccatccgctagtgcattcttcggtatgagccgcatcggcatggaagtaacgccaagtggtacgtggctgacctacaccggtgctatcaagcttgatgacaaggacccgaactttaaagaccaggttattctgcttaacaaacatattgatgcctataaaactttcccgccgaccgaacccaaaaaggacaaaaagaaaaaagctgatgaaacccaggctctaccgcagcgtcagaaaaaacagcaaactgtgactctgctgccagctgcggacctggatgatttttccaagcagctgcaacagtctatgagctctgcggactctacgcaggcttaa

SEQ ID NO: 64 - DNA, 2016 bp, Artificial Sequence
  Description of Artificial Sequence: Synthetic polynucleotide
atgcaccatcatcaccatcatggtggttctggttcgccgatacttggttattggaagattaaaggactggttcagcccacacgcctcctgctagaatacttagaggaaaaatatgaagagcacctgtacgaacgtgatgagggggacaaatggcgaaacaagaaatttgaattgggcttagaatttccaaatttgccgtattatatcgatggcgacgtaaaactgacccaatcaatggccattattcgctacatcgcagataaacataacatgctgggtggctgccctaaagaacgggctgagatctccatgctggaaggtgcggtgctcgacattcgctacggcgtcagtagaattgcgtatagcaaggatttcgaaactttaaaagtggatttcctgagcaaacttccggagatgctgaaaatgtttgaggataggctttgtcataagacgtatctcaatggtgatcatgttacccacccggactttatgctgtacgacgcccttgatgtcgttctgtatatggatcccatgtgcctggacgccttcccgaaattagtgtgttttaaaaaacgtatcgaagcgattccacagatcgataaatacttgaagtcttctaaatatattgcttggcctctgcaaggctggcaggcaacgttcggtgggggagatcatccgccaaaatcagatctggtgccgcgtgggagccctggcatacaccgcgacggtggttctggtgagaacctgtactttcaaagctcagataatgggcctcaaaaccagcgcaacgctccacgtataaccttcggtggcccgtctgactccacaggcagcaaccagaatggtgagcgtagtggagccaggtctaagcagcgccgtccccagggtctgccgaacaacacggcgagctggtttactgcgcttacccaacacggtaaagaagacttaaaattcccgcgtggccagggcgtcccgatcaacactaactcttccccggatgatcagattggttattaccgcagagcaactcgtcggattcgcggcggcgacggtaaaatgaaagatttgtctccgaattggtacttttactatctcggcaccggtccggaagctggactgccctacggggcaaacaaggacgggatcatttgggtggctaccgaaggtgccctgaatactccaaaagatcatatcggcacccgtaaccctgctaataacgctgcgatcgttctgcaactgcctcagggtacaactctgccaaaaggcttctatgcagaagggtcgcgtggtggcagccaggcgagtagccgtagcagctcccgctctcgcaactcgtcccgtaactccactccgggctcttctcgcggcacgtccccggctcgtatggcaggtaacggtggtgacgctgctctggcgctgctactgctggacaggctgaaccagctggagtcgaagatgagtggtaaaggccaacagcagcagggccagaccgttaccaaaaagagcgcagctgaagcatctaaaaaaccgcgacagaaacgtaccgcgactaaagcgtacaatgtaacacaggccttcggtcgtcgaggtccggagcaaactcaaggaaactttggcgatcaggaattaatccgccaggggaccgactacaaacactggccgcaaattgcccagttcgccccatccgctagtgcattcttcggtatgagccgcatcggcatggaagtaacgccaagtggtacgtggctgacctacaccggtgctatcaagcttgatgacaaggacccgaactttaaagaccaggttattctgcttaacaaacatattgatgcctataaaactttcccgccgaccgaacccaaaaaggacaaaaagaaaaaagctgatgaaacccaggctctaccgcagcgtcagaaaaaacagcaaactgtgactctgctgccagctgcggacctggatgatttttccaagcagctgcaacagtctatgagctctgcggactctacgcaggcttaa

SEQ ID NO: 65 - DNA, 2016 bp, Artificial Sequence
  Description of Artificial Sequence: Synthetic polynucleotide
atgcaccatcatcaccatcatggtggttctggttcgccgatacttggttattggaagattaaaggactggttcagcccacacgcctcctgctagaatacttagaggaaaaatatgaagagcacctgtacgaacgtgatgagggggacaaatggcgaaacaagaaatttgaattgggcttagaatttccaaatttgccgtattatatcgatggcgacgtaaaactgacccaatcaatggccattattcgctacatcgcagataaacataacatgctgggtggctgccctaaagaacgggctgagatctccatgctggaaggtgcggtgctcgacattcgctacggcgtcagtagaattgcgtatagcaaggatttcgaaactttaaaagtggatttcctgagcaaacttccggagatgctgaaaatgtttgaggataggctttgtcataagacgtatctcaatggtgatcatgttacccacccggactttatgctgtacgacgcccttgatgtcgttctgtatatggatcccatgtgcctggacgccttcccgaaattagtgtgttttaaaaaacgtatcgaagcgattccacagatcgataaatacttgaagtcttctaaatatattgcttggcctctgcaaggctggcaggcaacgttcggtgggggagatcatccgccaaaatcagatctggtgccgcgtgggagccctggcatacaccgcgacggtggttctggtgagaacctgtactttcaaagctcagataatgggcctcaaaaccagcgcaacgctccacgtataaccttcggtggcccgtctgactccacaggcagcaaccagaatggtgagcgtagtggagccaggtctaagcagcgccgtccccagggtctgccgaacaacacggcgagctggtttactgcgcttacccaacacggtaaagaagacttaaaattcccgcgtggccagggcgtcccgatcaacactaactcttccccggatgatcagattggttattaccgcagagcaactcgtcggattcgcggcggcgacggtaaaatgaaagatttgtctccgcgttggtacttttactatctcggcagtggtccggaagctggactgccctacggggcaaacaaggacgggatcatttgggtggctaccgaaggtgccctgaatactccaaaagatcatatcggcacccgtaaccctgctaataacgctgcgatcgttctgcaactgcctcagggtacaactctgccaaaaggcttctatgcagaagggtcgcgtggtggcagccaggcgagtagccgtagcagctcccgctctcgcaactcgtcccgtaactccactccgggctcttctcgcggcacgtccccggctcgtatggcaggtaacggtggtgacgctgctctggcgctgctactgctggacaggctgaaccagctggagtcgaagatgagtggtaaaggccaacagcagcagggccagaccgttaccaaaaagagcgcagctgaagcatctaaaaaaccgcgacagaaacgtaccgcgactaaagcgtacaatgtaacacaggccttcggtcgtcgaggtccggagcaaactcaaggaaactttggcgatcaggaattaatccgccaggggaccgactacaaacactggccgcaaattgcccagttcgccccatccgctagtgcattcttcggtatgagccgcatcggcatggaagtaacgccaagtggtacgtggctgacctacaccggtgctatcaagcttgatgacaaggacccgaactttaaagaccaggttattctgcttaacaaacatattgatgcctataaaactttcccgccgaccgaacccaaaaaggacaaaaagaaaaaagctgatgaaacccaggctctaccgcagcgtcagaaaaaacagcaaactgtgactctgctgccagctgcggacctggatgatttttccaagcagctgcaacagtctatgagctctgcggactctacgcaggcttaa

SEQ ID NO: 66 - DNA, 2016 bp, Artificial Sequence
  Description of Artificial Sequence: Synthetic polynucleotide
atgcaccatcatcaccatcatggtggttctggttcgccgatacttggttattggaagattaaaggactggttcagcccacacgcctcctgctagaatacttagaggaaaaatatgaagagcacctgtacgaacgtgatgagggggacaaatggcgaaacaagaaatttgaattgggcttagaatttccaaatttgccgtattatatcgatggcgacgtaaaactgacccaatcaatggccattattcgctacatcgcagataaacataacatgctgggtggctgccctaaagaacgggctgagatctccatgctggaaggtgcggtgctcgacattcgctacggcgtcagtagaattgcgtatagcaaggatttcgaaactttaaaagtggatttcctgagcaaacttccggagatgctgaaaatgtttgaggataggctttgtcataagacgtatctcaatggtgatcatgttacccacccggactttatgctgtacgacgcccttgatgtcgttctgtatatggatcccatgtgcctggacgccttcccgaaattagtgtgttttaaaaaacgtatcgaagcgattccacagatcgataaatacttgaagtcttctaaatatattgcttggcctctgcaaggctggcaggcaacgttcggtgggggagatcatccgccaaaatcagatctggtgccgcgtgggagccctggcatacaccgcgacggtggttctggtgagaacctgtactttcaaagctcagataatgggcctcaaaaccagcgcaacgctccacgtataaccttcggtggcccgtctgactccacaggcagcaaccagaatggtgagcgtagtggagccaggtctaagcagcgccgtccccagggtctgccgaacaacacggcgagctggtttactgcgcttacccaacacggtaaagaagacttaaaattcccgcgtggccagggcgtcccgatcaacactaactcttccccggatgatcagattggttattaccgcagagcaactcgtcggattcgcggcggcgacggtaaaatgaaagatttgtctccgcgttggtacttttactatctcggcaccggtccggaagctggactgccctacggggcaaacaaggacgggatcatttgggtggctaccgaaggtgccctgaatactccaaaagatcatatcggcacccgtaaccctgctaataacgctgcgatcgccctgcaactgcctcagggtacaactctgccaaaaggcttctatgcagaagggtcgcgtggtggcagccaggcgagtagccgtagcagctcccgctctcgcaactcgtcccgtaactccactccgggctcttctcgcggcacgtccccggctcgtatggcaggtaacggtggtgacgctgctctggcgctgctactgctggacaggctgaaccagctggagtcgaagatgagtggtaaaggccaacagcagcagggccagaccgttaccaaaaagagcgcagctgaagcatctaaaaaaccgcgacagaaacgtaccgcgactaaagcgtacaatgtaacacaggccttcggtcgtcgaggtccggagcaaactcaaggaaactttggcgatcaggaattaatccgccaggggaccgactacaaacactggccgcaaattgcccagttcgccccatccgctagtgcattcttcggtatgagccgcatcggcatggaagtaacgccaagtggtacgtggctgacctacaccggtgctatcaagcttgatgacaaggacccgaactttaaagaccaggttattctgcttaacaaacatattgatgcctataaaactttcccgccgaccgaacccaaaaaggacaaaaagaaaaaagctgatgaaacccaggctctaccgcagcgtcagaaaaaacagcaaactgtgactctgctgccagctgcggacctggatgatttttccaagcagctgcaacagtctatgagctctgcggactctacgcaggcttaa

SEQ ID NO: 67 - DNA, 2016 bp, Artificial Sequence
  Description of Artificial Sequence: Synthetic polynucleotide
atgcaccatcatcaccatcatggtggttctggttcgccgatacttggttattggaagattaaaggactggttcagcccacacgcctcctgctagaatacttagaggaaaaatatgaagagcacctgtacgaacgtgatgagggggacaaatggcgaaacaagaaatttgaattgggcttagaatttccaaatttgccgtattatatcgatggcgacgtaaaactgacccaatcaatggccattattcgctacatcgcagataaacataacatgctgggtggctgccctaaagaacgggctgagatctccatgctggaaggtgcggtgctcgacattcgctacggcgtcagtagaattgcgtatagcaaggatttcgaaactttaaaagtggatttcctgagcaaacttccggagatgctgaaaatgtttgaggataggctttgtcataagacgtatctcaatggtgatcatgttacccacccggactttatgctgtacgacgcccttgatgtcgttctgtatatggatcccatgtgcctggacgccttcccgaaattagtgtgttttaaaaaacgtatcgaagcgattccacagatcgataaatacttgaagtcttctaaatatattgcttggcctctgcaaggctggcaggcaacgttcggtgggggagatcatccgccaaaatcagatctggtgccgcgtgggagccctggcatacaccgcgacggtggttctggtgagaacctgtactttcaaagctcagataatgggcctcaaaaccagcgcaacgctccacgtataaccttcggtggcccgtctgactccacaggcagcaaccagaatggtgagcgtagtggagccaggtctaagcagcgccgtccccagggtctgccgaacaacacggcgagctggtttactgcgcttacccaacacggtaaagaagacttaaaattcccgcgtggccagggcgtcccgatcaacactaactcttccccggatgatcagattggttattaccgcagagcaactcgtcggattcgcggcggcgacggtaaaatgaaagatttgtctccgcgttggtacttttactatctcggcaccggtccggaagctggactgccctacggggcaaacaaggacgggatcatttgggtggctaccgaaggtgccctgaatactccaaaagatcatatcggcacccgtaaccctgctaataacgctgcgatcgttctgcaactgcctcagggtacaactctgccaaaaggcttctatgcagaagggtcgcgtggtggcagccaggcgagtagccgtagcagctcccgctctcgcaactcgtcccgtaactccactccgggctcttctcgcggcacgtccccggctcgtatggcaggtaacggtggtgacgctgctctggcgctgctactgctggacaggctgaaccagctggagtcgaagatgagtggtaaaggccaacagcagcagggccagaccgttaccaaaaagagcgcagctgaagcatctaaaaaaccgcgacagaaacgtaccgcgactaaagaatacaatgtaacacaggccttcggtcgtcgaggtccggagcaaactcaaggaaactttggcgatcaggatttaatcaaattggggaccgactacaaacactggccgcaaattgcccagttcgccccatccgctagtgcattcttcggtatgagccgcatcggcacggaagaaacgccaagtggtacgtggctgacctacaccggtgctatcaagcttgataaaaaggacccgaactttaaagaccaggttattctgcttaacaaacatattgatgcctataaaactttcccgccgaccgaacccaaaaaggacaaaaagaaaaaagctgatgaaacccaggctctaccgcagcgtcagaaaaaacagcaaactgtgactctgctgccagctgcggacctggatgatttttccaagcagctgcaacagtctatgagctctgcggactctacgcaggcttaa

SEQ ID NO: 68 - DNA, 2016 bp, Artificial Sequence
  Description of Artificial Sequence: Synthetic polynucleotide
atgcaccatcatcaccatcatggtggttctggttcgccgatacttggttattggaagattaaaggactggttcagcccacacgcctcctgctagaatacttagaggaaaaatatgaagagcacctgtacgaacgtgatgagggggacaaatggcgaaacaagaaatttgaattgggcttagaatttccaaatttgccgtattatatcgatggcgacgtaaaactgacccaatcaatggccattattcgctacatcgcagataaacataacatgctgggtggctgccctaaagaacgggctgagatctccatgctggaaggtgcggtgctcgacattcgctacggcgtcagtagaattgcgtatagcaaggatttcgaaactttaaaagtggatttcctgagcaaacttccggagatgctgaaaatgtttgaggataggctttgtcataagacgtatctcaatggtgatcatgttacccacccggactttatgctgtacgacgcccttgatgtcgttctgtatatggatcccatgtgcctggacgccttcccgaaattagtgtgttttaaaaaacgtatcgaagcgattccacagatcgataaatacttgaagtcttctaaatatattgcttggcctctgcaaggctggcaggcaacgttcggtgggggagatcatccgccaaaatcagatctggtgccgcgtgggagccctggcatacaccgcgacggtggttctggtgagaacctgtactttcaaagctcagataatgggcctcaaaaccagcgcaacgctccacgtataaccttcggtggcccgtctgactccacaggcagcaaccagaatggtgagcgtagtggagccaggtctaagcagcgccgtccccagggtctgccgaacaacacggcgagctggtttactgggcttacccaacacggtaaagaagacttaaaattcccgccaggccagggcgtcccgatcaacactaactcttccccggatgatcagattggttattaccgcagagcaactcgtcggattcgcggcggcgacggtaaaatgaaagatttgcctccgcgttggtacttttactatctcggcaccggtccggaagctgatctgccctacggggcagttaaggacgggatcgtgtgggtggctgaagaaggtgccctgaatactccaaaagatcatatcggcacccgtaaccctgctaataacgctgcgatcccgctgcaactgcctccgggtacaactctgccaaaaggcttctatgcagaagggtcgcgtggtggcagccaggcgagtagccgtagcagctcccgctctcgcaactcgtcccgtaactccactccgggctcttctcgcggcacgtccccggctcgtatggcaggtaacggtggtgacgctgctctggcgctgctactgctggacaggctgaaccagctggagtcgaagatgagtggtaaaggccaacagcagcagggccagaccgttaccaaaaagagcgcagctgaagcatctaaaaaaccgcgacagaaacgtaccgcgactaaagcgtacaatgtaacacaggccttcggtcgtcgaggtccggagcaaactcaaggaaactttggcgatcaggaattaatccgccaggggaccgactacaaacactggccgcaaattgcccagttcgccccatccgctagtgcattcttcggtatgagccgcatcggcatggaagtaacgccaagtggtacgtggctgacctacaccggtgctatcaagcttgatgacaaggacccgaactttaaagaccaggttattctgcttaacaaacatattgatgcctataaaactttcccgccgaccgaacccaaaaaggacaaaaagaaaaaagctgatgaaacccaggctctaccgcagcgtcagaaaaaacagcaaactgtgactctgctgccagctgcggacctggatgatttttccaagcagctgcaacagtctatgagctctgcggactctacgcaggcttaa

SEQ ID NO: 69 - DNA, 2016 bp, Artificial Sequence
  Description of Artificial Sequence: Synthetic polynucleotide
atgcaccatcatcaccatcatggtggttctggttcgccgatacttggttattggaagattaaaggactggttcagcccacacgcctcctgctagaatacttagaggaaaaatatgaagagcacctgtacgaacgtgatgagggggacaaatggcgaaacaagaaatttgaattgggcttagaatttccaaatttgccgtattatatcgatggcgacgtaaaactgacccaatcaatggccattattcgctacatcgcagataaacataacatgctgggtggctgccctaaagaacgggctgagatctccatgctggaaggtgcggtgctcgacattcgctacggcgtcagtagaattgcgtatagcaaggatttcgaaactttaaaagtggatttcctgagcaaacttccggagatgctgaaaatgtttgaggataggctttgtcataagacgtatctcaatggtgatcatgttacccacccggactttatgctgtacgacgcccttgatgtcgttctgtatatggatcccatgtgcctggacgccttcccgaaattagtgtgttttaaaaaacgtatcgaagcgattccacagatcgataaatacttgaagtcttctaaatatattgcttggcctctgcaaggctggcaggcaacgttcggtgggggagatcatccgccaaaatcagatctggtgccgcgtgggagccctggcatacaccgcgacggtggttctggtgagaacctgtactttcaaagctcagataatgggcctcaaaaccagcgcaacgctccacgtataaccttcggtggcccgtctgactccacaggcagcaaccagaatggtgagcgtagtggagccaggtctaagcagcgccgtccccagggtctgccgaacaacacggcgagctggtttactgcgcttacccaacacggtaaagaagacttaaaattcccgcgtggccagggcgtcccgatcaacactaactcttccccggatgatcagattggttattaccgcagagcaactcgtcggattcgcggcggcgacggtaaaatgaaagatttgtctccgcgttggtacttttactatctcggcaccggtccggaagctggactgccctacggggcaaacaaggacgggatcatttgggtggctaccgaaggtgccctgaatactccaaaagatcatatcggcacccgtaaccctgctaataacgctgcgatcgttctgcaactgcctcagggtacaactctgccaaaaggcttctatgcagaagggtcgcgtggtggcagccaggcgagtagccgtagcagctcccgctctcgcaactcgtcccgtaactccactccgggctcttctcgcggcacgtccccggctcgtatggcaggtaacggtggtgacgctgctctggcgctgctactgctggacaggctgaaccagctggagtcgaagatgagtggtaaaggccaacagcagcagggccagaccgttaccaaaaagagcgcagctgaagcatctaaaaaaccgcgacagaaacgtaccgcgactaaagcgtacaatgtaacacaggccttcggtcgtcgaggtccggagcaaactcaaggaaactttggcgatgatgaattaatccgccaggggaccgactacaaacactggccgcaaattgcccagttcgccccatccgctagtgcattcttcggtatgagccgcatcggcatggaagtaacgccaagtggtacgtggctgacctacaccggtgctatcaagcttgatgacaaggacccgaactttaaagaccaggttattctgcttaacaaacatattgatgcctataaaactttcccgccgaccgaacccaaaaaggacaaaaagaaaaaagctgatgaaacccaggctctaccgcagcgtcagaaaaaacagcaaactgtgactctgctgccagctgcggacctggatgatttttccaagcagctgcaacagtctatgagctctgcggactctacgcaggcttaa

SEQ ID NO: 70 - DNA, 2016 bp, Artificial Sequence
  Description of Artificial Sequence: Synthetic polynucleotide
atgcaccatcatcaccatcatggtggttctggttcgccgatacttggttattggaagattaaaggactggttcagcccacacgcctcctgctagaatacttagaggaaaaatatgaagagcacctgtacgaacgtgatgagggggacaaatggcgaaacaagaaatttgaattgggcttagaatttccaaatttgccgtattatatcgatggcgacgtaaaactgacccaatcaatggccattattcgctacatcgcagataaacataacatgctgggtggctgccctaaagaacgggctgagatctccatgctggaaggtgcggtgctcgacattcgctacggcgtcagtagaattgcgtatagcaaggatttcgaaactttaaaagtggatttcctgagcaaacttccggagatgctgaaaatgtttgaggataggctttgtcataagacgtatctcaatggtgatcatgttacccacccggactttatgctgtacgacgcccttgatgtcgttctgtatatggatcccatgtgcctggacgccttcccgaaattagtgtgttttaaaaaacgtatcgaagcgattccacagatcgataaatacttgaagtcttctaaatatattgcttggcctctgcaaggctggcaggcaacgttcggtgggggagatcatccgccaaaatcagatctggtgccgcgtgggagccctggcatacaccgcgacggtggttctggtgagaacctgtactttcaaagctcagataatgggcctcaaaaccagcgcaacgctccacgtataaccttcggtggcccgtctgactccacaggcagcaaccagaatggtgagcgtagtggagccaggtctaagcagcgccgtccccagggtctgccgaacaacacggcgagctggtttactccgcttacccaacacggtaaagaagacttaaaattcccgccgggccagggcgtcccgatcaacactaactcttccccggatgatcagattggttattaccgcagagcaactcgtcggattcgcggcggcgacggtaaaatgaaagatttgcctccgcgttggtacttttactatctcggcaccggtccggaagctgatctgccctacgggcaagtaaaggacgggatcgtgtgggtggctgaagaaggtgccctgaatactccaaaagatcatatcggcacccgtaaccctgctaataacgctgcgatcccactgcaactgcctcccggtacaactctgccaaaaggcttctatgcagaagggtcgcgtggtggcagccaggcgagtagccgtagcagctcccgctctcgcaactcgtcccgtaactccactccgggctcttctcgcggcacgtccccggctcgtatggcaggtaacggtggtgacgctgctctggcgctgctactgctggacaggctgaaccagctggagtcgaagatgagtggtaaaggccaacagcagcagggccagaccgttaccaaaaagagcgcagctgaagcatctaaaaaaccgcgacagaaacgtaccgcgactaaagcgtacaatgtaacacaggccttcggtcgtcgaggtccggagcaaactcaaggaaactttggcgatcaggaattaatccgccaggggaccgactacaaacactggccgcaaattgcccagttcgccccatccgctagtgcattcttcggtatgagccgcatcggcatggaagtaacgccaagtggtacgtggctgacctacaccggtgctatcaagcttgatgacaaggacccgaactttaaagaccaggttattctgcttaacaaacatattgatgcctataaaactttcccgccgaccgaacccaaaaaggacaaaaagaaaaaagctgatgaaacccaggctctaccgcagcgtcagaaaaaacagcaaactgtgactctgctgccagctgcggacctggatgatttttccaagcagctgcaacagtctatgagctctgcggactctacgcaggcttaa

SEQ ID NO: 71 - DNA, 2016 bp, Artificial Sequence
  Description of Artificial Sequence: Synthetic polynucleotide
atgcaccatcatcaccatcatggtggttctggttcgccgatacttggttattggaagattaaaggactggttcagcccacacgcctcctgctagaatacttagaggaaaaatatgaagagcacctgtacgaacgtgatgagggggacaaatggcgaaacaagaaatttgaattgggcttagaatttccaaatttgccgtattatatcgatggcgacgtaaaactgacccaatcaatggccattattcgctacatcgcagataaacataacatgctgggtggctgccctaaagaacgggctgagatctccatgctggaaggtgcggtgctcgacattcgctacggcgtcagtagaattgcgtatagcaaggatttcgaaactttaaaagtggatttcctgagcaaacttccggagatgctgaaaatgtttgaggataggctttgtcataagacgtatctcaatggtgatcatgttacccacccggactttatgctgtacgacgcccttgatgtcgttctgtatatggatcccatgtgcctggacgccttcccgaaattagtgtgttttaaaaaacgtatcgaagcgattccacagatcgataaatacttgaagtcttctaaatatattgcttggcctctgcaaggctggcaggcaacgttcggtgggggagatcatccgccaaaatcagatctggtgccgcgtgggagccctggcatacaccgcgacggtggttctggtgagaacctgtactttcaaagctcagataatgggcctcaaaaccagcgcaacgctccacgtataaccttcggtggcccgtctgactccacaggcagcaaccagaatggtgagcgtagtggagccaggtctaagcagcgccgtccccagggtctgccgaacaacacggcgagctggtttactgcgcttacccaacacggtaaagaagacttaaaattcccgcgtggccagggcgtcccgatcaacactaactcttccccggatgatcagattggttattaccgcagagcaactcgtcggattcgcggcggcgacggtaaaatgaaagatttgtctccgcgttggtacttttactatctcggcaccggtccggaagctggactgccctacggggcaaacaaggacgggatcatttgggtggctaccgaaggtgccctgaatactccaaaagatcatatcggcacccgtaaccctgctaataacgctgcgatcgttctgcaactgcctcagggtacaactctgccaaaaggcttctatgcagaagggtcgcgtggtggcagccaggcgagtagccgtagcagctcccgctctcgcaactcgtcccgtaactccactccgggctcttctcgcggcacgtccccggctcgtatggcaggtaacggtggtgacgctgctctggcgctgctactgctggacaggctgaaccagctggagtcgaagatgagtggtaaaggccaacagcagcagggccagaccgttaccaaaaagagcgcagctgaagcatctaaaaaaccgcgacagaaacgtaccgcgactaaagcgtacaatgtaacacaggccttcggtcgtcgaggtccgaatcaaactcaaggaaactttggcgatcaggaattaatccgccaggggaccgactacaaacactggccgcaaattgcccagttcgccccatccgctagtgcattcttcggtatgagccgcatcggcatggaagtaacgccaagtggtacgtggctgacctacaccggtgctatcaagcttgatgacaaggacccgaactttaaagaccaggttattctgcttaacaaacatattgatgcctataaaactttcccgccgaccgaacccaaaaaggacaaaaagaaaaaagctgatgaaacccaggctctaccgcagcgtcagaaaaaacagcaaactgtgactctgctgccagctgcggacctggatgatttttccaagcagctgcaacagtctatgagctctgcggactctacgcaggcttaa

SEQ ID NO: 72 - DNA, 2016 bp, Artificial Sequence
  Description of Artificial Sequence: Synthetic polynucleotide
atgcaccatcatcaccatcatggtggttctggttcgccgatacttggttattggaagattaaaggactggttcagcccacacgcctcctgctagaatacttagaggaaaaatatgaagagcacctgtacgaacgtgatgagggggacaaatggcgaaacaagaaatttgaattgggcttagaatttccaaatttgccgtattatatcgatggcgacgtaaaactgacccaatcaatggccattattcgctacatcgcagataaacataacatgctgggtggctgccctaaagaacgggctgagatctccatgctggaaggtgcggtgctcgacattcgctacggcgtcagtagaattgcgtatagcaaggatttcgaaactttaaaagtggatttcctgagcaaacttccggagatgctgaaaatgtttgaggataggctttgtcataagacgtatctcaatggtgatcatgttacccacccggactttatgctgtacgacgcccttgatgtcgttctgtatatggatcccatgtgcctggacgccttcccgaaattagtgtgttttaaaaaacgtatcgaagcgattccacagatcgataaatacttgaagtcttctaaatatattgcttggcctctgcaaggctggcaggcaacgttcggtgggggagatcatccgccaaaatcagatctggtgccgcgtgggagccctggcatacaccgcgacggtggttctggtgagaacctgtactttcaaagctcagataatgggcctcaaaaccagcgcaacgctccacgtataaccttcggtggcccgtctgactccacaggcagcaaccagaatggtgagcgtagtggagccaggtctaagcagcgccgtccccagggtctgccgaacaacacggcgagctggtttactgcgcttacccaacacggtaaagaagacttaaaattcccgcgtggccagggcgtcccgatcaacactaactcttccccggatgatcagattggttattaccgcagagcaactcgtcggattcgcggcggcgacggtaaaatgaaagatttgtctccgcgttggtacttttactatctcggcaccggtccggaagctggactgccctacggggcaaacaaggacgggatcatttgggtggctaccgaaggtgccctgaatactccaaaaagccatatcggcacccgtaaccctgctaataacgctgcgatcgttctgcaactgcctcagggtacaactctgccaaaaggcttctatgcagaagggtcgcgtggtggcagccaggcgagtagccgtagcagctcccgctctcgcaactcgtcccgtaactccactccgggctcttctcgcggcacgtccccggctcgtatggcaggtaacggtggtgacgctgctctggcgctgctactgctggacaggctgaaccagctggagtcgaagatgagtggtaaaggccaacagcagcagggccagaccgttaccaaaaagagcgcagctgaagcatctaaaaaaccgcgacagaaacgtaccgcgactaaagcgtacaatgtaacacaggccttcggtcgtcgaggtccggagcaaactcaaggaaactttggcgatcaggaattaatccgccaggggaccgactacaaacactggccgcaaattgcccagttcgccccatccgctagtgcattcttcggtatgagccgcatcggcatggaagtaacgccaagtggtacgtggctgacctacaccggtgctatcaagcttgatgacaaggacccgaactttaaagaccaggttattctgcttaacaaacatattgatgcctataaaactttcccgccgaccgaacccaaaaaggacaaaaagaaaaaagctgatgaaacccaggctctaccgcagcgtcagaaaaaacagcaaactgtgactctgctgccagctgcggacctggatgatttttccaagcagctgcaacagtctatgagctctgcggactctacgcaggcttaa

SEQ ID NO: 73 - DNA, 2016 bp, Artificial Sequence
  Description of Artificial Sequence: Synthetic polynucleotide
atgcaccatcatcaccatcatggtggttctggttcgccgatacttggttattggaagattaaaggactggttcagcccacacgcctcctgctagaatacttagaggaaaaatatgaagagcacctgtacgaacgtgatgagggggacaaatggcgaaacaagaaatttgaattgggcttagaatttccaaatttgccgtattatatcgatggcgacgtaaaactgacccaatcaatggccattattcgctacatcgcagataaacataacatgctgggtggctgccctaaagaacgggctgagatctccatgctggaaggtgcggtgctcgacattcgctacggcgtcagtagaattgcgtatagcaaggatttcgaaactttaaaagtggatttcctgagcaaacttccggagatgctgaaaatgtttgaggataggctttgtcataagacgtatctcaatggtgatcatgttacccacccggactttatgctgtacgacgcccttgatgtcgttctgtatatggatcccatgtgcctggacgccttcccgaaattagtgtgttttaaaaaacgtatcgaagcgattccacagatcgataaatacttgaagtcttctaaatatattgcttggcctctgcaaggctggcaggcaacgttcggtgggggagatcatccgccaaaatcagatctggtgccgcgtgggagccctggcatacaccgcgacggtggttctggtgagaacctgtactttcaaagctcagataatgggcctcaaaaccagcgcaacgctccacgtataaccttcggtggcccgtctgactccacaggcagcaaccagaatggtgagcgtagtggagccaggtctaagcagcgccgtccccagggtctgccgaacaacacggcgagctggtttactgcgcttacccaacacggtaaagaagacttaaaattcccgcgtggccagggcgtcccgatcaacactaactcttccccggatgatcagattggttattaccgcagagcaactcgtcggattcgcggcggcgacggtaaaatgaaagatttgtctccgcgttggtacttttactatctcggcaccggtccggaagctggactgccctacggggcaaacaagcaagggatcatttgggtggctaccgaaggtgccctgaatactccaaaagatcatatcggcacccgtaaccctgctaataacgctgcgatcgttctgcaactgcctcagggtacaactctgccaaaaggcttctatgcagaagggtcgcgtggtggcagccaggcgagtagccgtagcagctcccgctctcgcaactcgtcccgtaactccactccgggctcttctcgcggcacgtccccggctcgtatggcaggtaacggtggtgacgctgctctggcgctgctactgctggacaggctgaaccagctggagtcgaagatgagtggtaaaggccaacagcagcagggccagaccgttaccaaaaagagcgcagctgaagcatctaaaaaaccgcgacagaaacgtaccgcgactaaagcgtacaatgtaacacaggccttcggtcgtcgaggtccggagcaaactcaaggaaactttggcgatcaggaattaatccgccaggggaccgactacaaacactggccgcaaattgcccagttcgccccatccgctagtgcattcttcggtatgagccgcatcggcatggaagtaacgccaagtggtacgtggctgacctacaccggtgctatcaagcttgatgacaaggacccgaactttaaagaccaggttattctgcttaacaaacatattgatgcctataaaactttcccgccgaccgaacccaaaaaggacaaaaagaaaaaagctgatgaaacccaggctctaccgcagcgtcagaaaaaacagcaaactgtgactctgctgccagctgcggacctggatgatttttccaagcagctgcaacagtctatgagctctgcggactctacgcaggcttaa

SEQ ID NO: 74 - DNA, 2016 bp, Artificial Sequence
  Description of Artificial Sequence: Synthetic polynucleotide
atgcaccatcatcaccatcatggtggttctggttcgccgatacttggttattggaagattaaaggactggttcagcccacacgcctcctgctagaatacttagaggaaaaatatgaagagcacctgtacgaacgtgatgagggggacaaatggcgaaacaagaaatttgaattgggcttagaatttccaaatttgccgtattatatcgatggcgacgtaaaactgacccaatcaatggccattattcgctacatcgcagataaacataacatgctgggtggctgccctaaagaacgggctgagatctccatgctggaaggtgcggtgctcgacattcgctacggcgtcagtagaattgcgtatagcaaggatttcgaaactttaaaagtggatttcctgagcaaacttccggagatgctgaaaatgtttgaggataggctttgtcataagacgtatctcaatggtgatcatgttacccacccggactttatgctgtacgacgcccttgatgtcgttctgtatatggatcccatgtgcctggacgccttcccgaaattagtgtgttttaaaaaacgtatcgaagcgattccacagatcgataaatacttgaagtcttctaaatatattgcttggcctctgcaaggctggcaggcaacgttcggtgggggagatcatccgccaaaatcagatctggtgccgcgtgggagccctggcatacaccgcgacggtggttctggtgagaacctgtactttcaaagctcagataatgggcctcaaaaccagcgcaacgctccacgtataaccttcggtggcccgtctgactccacaggcagcaaccagaatggtgagcgtagtggagccaggtctaagcagcgccgtccccagggtctgccgaacaacacggcgagctggtttactgcgcttacccaacacggtaaagaagacttaaaattcccgcgtggccagggcgtcccgatcaacactaactcttccccggatgatcagattggttattaccgcagagcaactcgtcggattcgcggcggcgacggtaaaatgaaagatttgtctccgcgttggtacttttactatctcggcaccggtccggaagctggactgccctacggggcaacgaaggacgggatcatttgggtggctaccgaaggtgccctgaatactccaaaagatcatatcggcacccgtaaccctgctaataacgctgcgatcgttctgcaactgcctcagggtacaactctgccaaaaggcttctatgcagaagggtcgcgtggtggcagccaggcgagtagccgtagcagctcccgctctcgcaactcgtcccgtaactccactccgggctcttctcgcggcacgtccccggctcgtatggcaggtaacggtggtgacgctgctctggcgctgctactgctggacaggctgaaccagctggagtcgaagatgagtggtaaaggccaacagcagcagggccagaccgttaccaaaaagagcgcagctgaagcatctaaaaaaccgcgacagaaacgtaccgcgactaaagcgtacaatgtaacacaggccttcggtcgtcgaggtccggagcaaactcaaggaaactttggcgatcaggaattaatccgccaggggaccgactacaaacactggccgcaaattgcccagttcgccccatccgctagtgcattcttcggtatgagccgcatcggcatggaagtaacgccaagtggtacgtggctgacctacaccggtgctatcaagcttgatgacaaggacccgaactttaaagaccaggttattctgcttaacaaacatattgatgcctataaaactttcccgccgaccgaacccaaaaaggacaaaaagaaaaaagctgatgaaacccaggctctaccgcagcgtcagaaaaaacagcaaactgtgactctgctgccagctgcggacctggatgatttttccaagcagctgcaacagtctatgagctctgcggactctacgcaggcttaa

SEQ ID NO: 75 - DNA, 2016 bp, Artificial Sequence
  Description of Artificial Sequence: Synthetic polynucleotide
atgcaccatcatcaccatcatggtggttctggttcgccgatacttggttattggaagattaaaggactggttcagcccacacgcctcctgctagaatacttagaggaaaaatatgaagagcacctgtacgaacgtgatgagggggacaaatggcgaaacaagaaatttgaattgggcttagaatttccaaatttgccgtattatatcgatggcgacgtaaaactgacccaatcaatggccattattcgctacatcgcagataaacataacatgctgggtggctgccctaaagaacgggctgagatctccatgctggaaggtgcggtgctcgacattcgctacggcgtcagtagaattgcgtatagcaaggatttcgaaactttaaaagtggatttcctgagcaaacttccggagatgctgaaaatgtttgaggataggctttgtcataagacgtatctcaatggtgatcatgttacccacccggactttatgctgtacgacgcccttgatgtcgttctgtatatggatcccatgtgcctggacgccttcccgaaattagtgtgttttaaaaaacgtatcgaagcgattccacagatcgataaatacttgaagtcttctaaatatattgcttggcctctgcaaggctggcaggcaacgttcggtgggggagatcatccgccaaaatcagatctggtgccgcgtgggagccctggcatacaccgcgacggtggttctggtgagaacctgtactttcaaagctcagataatgggcctcaaaaccagcgcaacgctccacgtataaccttcggtggcccgtctgactccacaggcagcaaccagaatggtgagcgtagtggagccaggtctaagcagcgccgtccccagggtctgccgaacaacacggcgagctggtttactgcgcttacccaacacggtaaagaagacttaaaattcccgcgtggccagggcgtcccgatcaacactaactcttccccggatgatcagattggtcaataccgcagagcaactcgtcggattcgcggcggcgacggtaaaatgaaagatttgtctccgcgttggtacttttactatctcggcaccggtccggaagctggactgccctacggggcaaacaaggacgggatcatttgggtggctaccgaaggtgccctgaatactccaaaagatcatatcggcacccgtaaccctgctaataacgctgcgatcgttctgcaactgcctcagggtacaactctgccaaaaggcttctatgcagaagggtcgcgtggtggcagccaggcgagtagccgtagcagctcccgctctcgcaactcgtcccgtaactccactccgggctcttctcgcggcacgtccccggctcgtatggcaggtaacggtggtgacgctgctctggcgctgctactgctggacaggctgaaccagctggagtcgaagatgagtggtaaaggccaacagcagcagggccagaccgttaccaaaaagagcgcagctgaagcatctaaaaaaccgcgacagaaacgtaccgcgactaaagcgtacaatgtaacacaggccttcggtcgtcgaggtccggagcaaactcaaggaaactttggcgatcaggaattaatccgccaggggaccgactacaaacactggccgcaaattgcccagttcgccccatccgctagtgcattcttcggtatgagccgcatcggcatggaagtaacgccaagtggtacgtggctgacctacaccggtgctatcaagcttgatgacaaggacccgaactttaaagaccaggttattctgcttaacaaacatattgatgcctataaaactttcccgccgaccgaacccaaaaaggacaaaaagaaaaaagctgatgaaacccaggctctaccgcagcgtcagaaaaaacagcaaactgtgactctgctgccagctgcggacctggatgatttttccaagcagctgcaacagtctatgagctctgcggactctacgcaggcttaa

SEQ ID NO: 76 - DNA, 2016 bp, Artificial Sequence
  Description of Artificial Sequence: Synthetic polynucleotide
atgcaccatcatcaccatcatggtggttctggttcgccgatacttggttattggaagattaaaggactggttcagcccacacgcctcctgctagaatacttagaggaaaaatatgaagagcacctgtacgaacgtgatgagggggacaaatggcgaaacaagaaatttgaattgggcttagaatttccaaatttgccgtattatatcgatggcgacgtaaaactgacccaatcaatggccattattcgctacatcgcagataaacataacatgctgggtggctgccctaaagaacgggctgagatctccatgctggaaggtgcggtgctcgacattcgctacggcgtcagtagaattgcgtatagcaaggatttcgaaactttaaaagtggatttcctgagcaaacttccggagatgctgaaaatgtttgaggataggctttgtcataagacgtatctcaatggtgatcatgttacccacccggactttatgctgtacgacgcccttgatgtcgttctgtatatggatcccatgtgcctggacgccttcccgaaattagtgtgttttaaaaaacgtatcgaagcgattccacagatcgataaatacttgaagtcttctaaatatattgcttggcctctgcaaggctggcaggcaacgttcggtgggggagatcatccgccaaaatcagatctggtgccgcgtgggagccctggcatacaccgcgacggtggttctggtgagaacctgtactttcaaagctcagataatgggcctcaaaaccagcgcaacgctccacgtataaccttcggtggcccgtctgactccacaggcagcaaccagaatggtgagcgtagtggagccaggtctaagcagcgccgtccccagggtctgccgaacaacacggcgagctggtttactgcgcttacccaacacggtaaagaagacttaaaattcccgcgtggccagggcgtcccgatcaacactaactcttccccggatgatcagattggttattaccgcagagcaactcgtcggattcgcggcggcgacggtaaaatgaaagatttgtctccgcgttggtacttttactatctcggcaccggtccggaagctggactgccctacggggcaaacaaggacgggatcatttgggtggctaccgaaggtgccctgaatactccaaaagatcatatcggcacccgtaaccctgctaataacgctgcgatctgcctgcaactgcctcagggtacaactctgccaaaaggcttctatgcagaagggtcgcgtggtggcagccaggcgagtagccgtagcagctcccgctctcgcaactcgtcccgtaactccactccgggctcttctcgcggcacgtccccggctcgtatggcaggtaacggtggtgacgctgctctggcgctgctactgctggacaggctgaaccagctggagtcgaagatgagtggtaaaggccaacagcagcagggccagaccgttaccaaaaagagcgcagctgaagcatctaaaaaaccgcgacagaaacgtaccgcgactaaagcgtacaatgtaacacaggccttcggtcgtcgaggtccggagcaaactcaaggaaactttggcgatcaggaattaatccgccaggggaccgactacaaacactggccgcaaattgcccagttcgccccatccgctagtgcattcttcggtatgagccgcatcggcatggaagtaacgccaagtggtacgtggctgacctacaccggtgctatcaagcttgatgacaaggacccgaactttaaagaccaggttattctgcttaacaaacatattgatgcctataaaactttcccgccgaccgaacccaaaaaggacaaaaagaaaaaagctgatgaaacccaggctctaccgcagcgtcagaaaaaacagcaaactgtgactctgctgccagctgcggacctggatgatttttccaagcagctgcaacagtctatgagctctgcggactctacgcaggcttaa

SEQ ID NO: 77 - DNA, 2016 bp, Artificial Sequence
  Description of Artificial Sequence: Synthetic polynucleotide
atgcaccatcatcaccatcatggtggttctggttcgccgatacttggttattggaagattaaaggactggttcagcccacacgcctcctgctagaatacttagaggaaaaatatgaagagcacctgtacgaacgtgatgagggggacaaatggcgaaacaagaaatttgaattgggcttagaatttccaaatttgccgtattatatcgatggcgacgtaaaactgacccaatcaatggccattattcgctacatcgcagataaacataacatgctgggtggctgccctaaagaacgggctgagatctccatgctggaaggtgcggtgctcgacattcgctacggcgtcagtagaattgcgtatagcaaggatttcgaaactttaaaagtggatttcctgagcaaacttccggagatgctgaaaatgtttgaggataggctttgtcataagacgtatctcaatggtgatcatgttacccacccggactttatgctgtacgacgcccttgatgtcgttctgtatatggatcccatgtgcctggacgccttcccgaaattagtgtgttttaaaaaacgtatcgaagcgattccacagatcgataaatacttgaagtcttctaaatatattgcttggcctctgcaaggctggcaggcaacgttcggtgggggagatcatccgccaaaatcagatctggtgccgcgtgggagccctggcatacaccgcgacggtggttctggtgagaacctgtactttcaaagctcagataatgggcctcaaaaccagcgcaacgctccacgtataaccttcggtggcccgtctgactccacaggcagcaaccagaatggtgagcgtagtggagccaggtctaagcagcgccgtccccagggtctgccgaacaacacggcgagctggtttactgcgcttacccaacacggtaaagaagacttaaaattcccgcgtggccagggcgtcccgatcaacactaactcttccccggatgatcagattggttattaccgcagagcaactcgtcggattcgcggcggcgacggtaaaatgaaagatttgtctccgcgttggtacttttactatctcggcaccggtccggaagctggactgccctacggggcaaacaaggacgggatcatttgggtggctaccgaaggtgccctgaatactccaaaagatcatatcggcacccgtaaccctgctaataacgctgcgatcgttctgcaactgcctcagggtacaactctgccaaaaggcttctatgcagaagggtcgcgtggtggcagccaggcgagtagccgtagcagctcccgctctcgcaactcgtcccgtaactccactccgggctcttctcgcggcacgtccccggctcgtatggcaggtaacggtggtgacgctgctctggcgctgctactgctggacaggctgaaccagctggagtcgaagatgagtggtaaaggccaacagcagcagggccagaccgttaccaaaaagagcgcagctgaaatgtctaaaaaaccgcgacagaaacgtaccgcgactaaaggatgtaatgtaacacagtgcttcggtccacgaggtccggagcaaactcaaggaaactttggcgatgccgaattaatcaaaaaagggaccgactacaaacactggccgcaaattgcccagttcgccccatccgctagtgcattcttcggtatgagccgcatctcaagtaaggaaacgccaagtggtacgtggctgacctacaccggtgctatcaagcttgataaagatgacccgaactttaaagaccaggttattctgcttaacaaacatattgatgcctataaaactttcccgccgaccgaacccaaaaaggacaaaaagaaaaaagctgatgaaacccaggctctaccgcagcgtcagaaaaaacagcaaactgtgactctgctgccagctgcggacctggatgatttttccaagcagctgcaacagtctatgagctctgcggactctacgcaggcttaa

SEQ ID NO: 78 - DNA, 2016 bp, Artificial Sequence
  Description of Artificial Sequence: Synthetic polynucleotide
atgcaccatcatcaccatcatggtggttctggttcgccgatacttggttattggaagattaaaggactggttcagcccacacgcctcctgctagaatacttagaggaaaaatatgaagagcacctgtacgaacgtgatgagggggacaaatggcgaaacaagaaatttgaattgggcttagaatttccaaatttgccgtattatatcgatggcgacgtaaaactgacccaatcaatggccattattcgctacatcgcagataaacataacatgctgggtggctgccctaaagaacgggctgagatctccatgctggaaggtgcggtgctcgacattcgctacggcgtcagtagaattgcgtatagcaaggatttcgaaactttaaaagtggatttcctgagcaaacttccggagatgctgaaaatgtttgaggataggctttgtcataagacgtatctcaatggtgatcatgttacccacccggactttatgctgtacgacgcccttgatgtcgttctgtatatggatcccatgtgcctggacgccttcccgaaattagtgtgttttaaaaaacgtatcgaagcgattccacagatcgataaatacttgaagtcttctaaatatattgcttggcctctgcaaggctggcaggcaacgttcggtgggggagatcatccgccaaaatcagatctggtgccgcgtgggagccctggcatacaccgcgacggtggttctggtgagaacctgtactttcaaagctcagataatgggcctcaaaaccagcgcaacgctccacgtataaccttcggtggcccgtctgactccacaggcagcaaccagaatggtgagcgtagtggagccaggtctaagcagcgccgtccccagggtctgccgaacaacacggcgagctggtttactgcgcttacccaacacggtaaagaagacttaaaattcccgcgtggccagggcgtcccgatcaacactaactcttccccggatgatcagattggttattaccgcagagcaactcgtcggattcgcggcggcgacggtaaaatgaaagatttgtctccgcgttggtacttttactatctcggcaccggtccggaagctggactgccctacggggcaaacaaggacgggatcatttgggtggctaccgaaggtgccctgaatactccaaaagatcatatcggcacccgtaaccctgctaataacgctgcgatcgttctgcaactgcctcagggtacaactctgccaaaaggcttctatgcagaagggtcgcgtggtggcagccaggcgagtagccgtagcagctcccgctctcgcaactcgtcccgtaactccactccgggctcttctcgcggcacgtccccggctcgtatggcaggtaacggtggtgacgctgctctggcgctgctactgctggacaggctgaaccagctggagtcgaagatgagtggtaaaggccaacagcagcagggccagaccgttaccaaaaagagcgcagctgaaatgtctaaaaaaccgcgatggaaacgtaccgcgactaaagggtacaatgtaacacaggccttcggtaaacgaggtccgaaagatactcaaggaaactttggcgatgccgaattaatcaagcaggggaccgactacaaacactggccgcaaattgcccagttcgtgccatccgctgcggcattcttctttatgagccgcatcagtatgaaagaaacgccagatggtgtttggctgacctacaccggtacgatcaagcttgataaggatgacccgaactttgatgaccaggttaaactgcttaacaaacatattgatgcctataaaactttcccgccgaccgaacccaaaaaggacaaaaagaaaaaagctgatgaaacccaggctctaccgcagcgtcagaaaaaacagcaaactgtgactctgctgccagctgcggacctggatgatttttccaagcagctgcaacagtctatgagctctgcggactctacgcaggcttaa

SEQ ID NO: 79 - DNA, 2016 bp, Artificial Sequence
  Description of Artificial Sequence: Synthetic polynucleotide
atgcaccatcatcaccatcatggtggttctggttcgccgatacttggttattggaagattaaaggactggttcagcccacacgcctcctgctagaatacttagaggaaaaatatgaagagcacctgtacgaacgtgatgagggggacaaatggcgaaacaagaaatttgaattgggcttagaatttccaaatttgccgtattatatcgatggcgacgtaaaactgacccaatcaatggccattattcgctacatcgcagataaacataacatgctgggtggctgccctaaagaacgggctgagatctccatgctggaaggtgcggtgctcgacattcgctacggcgtcagtagaattgcgtatagcaaggatttcgaaactttaaaagtggatttcctgagcaaacttccggagatgctgaaaatgtttgaggataggctttgtcataagacgtatctcaatggtgatcatgttacccacccggactttatgctgtacgacgcccttgatgtcgttctgtatatggatcccatgtgcctggacgccttcccgaaattagtgtgttttaaaaaacgtatcgaagcgattccacagatcgataaatacttgaagtcttctaaatatattgcttggcctctgcaaggctggcaggcaacgttcggtgggggagatcatccgccaaaatcagatctggtgccgcgtgggagccctggcatacaccgcgacggtggttctggtgagaacctgtactttcaaagctcagataatgggcctcaaaaccagcgcaacgctccacgtataaccttcggtggcccgtctgactccacaggcagcaaccagaatggtgagcgtagtggagccaggtctaagcagcgccgtccccagggtctgccgaacaacacggcgagctggtttactgcgcttacccaacacggtaaagaagacttaaaattcccgcgtggccagggcgtcccgatcaacactaactcttccccggatgatcagattggttattaccgcagagcaactcgtcggattcgcggcggcgacggtaaaatgaaagatttgtctccgcgttggtacttttactatctcggcaccggtccggaagctggactgccctacggggcaaacaaggacgggatcatttgggtggctaccgaaggtgccctgaatactccaaaagatcatatcggcacccgtaaccctgctaataacgctgcgatcgttctgcaactgcctcagggtacaactctgccaaaaggcttctatgcagaagggtcgcgtggtggcagccaggcgagtagccgtagcagctcccgctctcgcaactcgtcccgtaactccactccgggctcttctcgcggcacgtccccggctcgtatggcaggtaacggtggtgacgctgctctggcgctgctactgctggacaggctgaaccagctggagtcgaagatgagtggtaaaggccaacagcagcagggccagaccgttaccaaaaagagcgcagctgaagcatctaaaaaaccgcgatgcaaacgtaccgcgactaaagcgtacaatgtaacacaggccttcggtcgtcgaggtccggagcaaactcaaggaaactttggcgatcaggaattaatccgccaggggaccgactacaaacactggccgcaaattgcccagttcgccccatccgctagtgcattcttcggtatgagccgcatcggcatggaagtaacgccaagtggtacgtggctgacctacaccggtgctatcaagcttgatgacaaggacccgaactttaaagaccaggttattctgcttaacaaacatattgatgcctataaaactttcccgccgaccgaacccaaaaaggacaaaaagaaaaaagctgatgaaacccaggctctaccgcagcgtcagaaaaaacagcaaactgtgactctgctgccagctgcggacctggatgatttttccaagcagctgcaacagtctatgagctctgcggactctacgcaggcttaa

SEQ ID NO: 80 - DNA, 2016 bp, Artificial Sequence
  Description of Artificial Sequence: Synthetic polynucleotide
atgcaccatcatcaccatcatggtggttctggttcgccgatacttggttattggaagattaaaggactggttcagcccacacgcctcctgctagaatacttagaggaaaaatatgaagagcacctgtacgaacgtgatgagggggacaaatggcgaaacaagaaatttgaattgggcttagaatttccaaatttgccgtattatatcgatggcgacgtaaaactgacccaatcaatggccattattcgctacatcgcagataaacataacatgctgggtggctgccctaaagaacgggctgagatctccatgctggaaggtgcggtgctcgacattcgctacggcgtcagtagaattgcgtatagcaaggatttcgaaactttaaaagtggatttcctgagcaaacttccggagatgctgaaaatgtttgaggataggctttgtcataagacgtatctcaatggtgatcatgttacccacccggactttatgctgtacgacgcccttgatgtcgttctgtatatggatcccatgtgcctggacgccttcccgaaattagtgtgttttaaaaaacgtatcgaagcgattccacagatcgataaatacttgaagtcttctaaatatattgcttggcctctgcaaggctggcaggcaacgttcggtgggggagatcatccgccaaaatcagatctggtgccgcgtgggagccctggcatacaccgcgacggtggttctggtgagaacctgtactttcaaagctcagataatgggcctcaaaaccagcgcaacgctccacgtataaccttcggtggcccgtctgactccacaggcagcaaccagaatggtgagcgtagtggagccaggtctaagcagcgccgtccccagggtctgccgaacaacacggcgagctggtttactgcgcttacccaacacggtaaagaagacttaaaattcccgcgtggccagggcgtcccgatcaacactaactcttccccggatgatcagattggttattaccgcagagcaactcgtcggattcgcggcggcgacggtaaaatgaaagatttgtctccgcgttggtacttttactatctcggcaccggtccggaagctggactgccctacggggcaaacaaggacgggatcatttgggtggctaccgaaggtgccctgaatactccaaaagatcatatcggcacccgtaaccctgctaataacgctgcgatcgttctgcaactgcctcagggtacaactctgccaaaaggcttctatgcagaagggtcgcgtggtggcagccaggcgagtagccgtagcagctcccgctctcgcaactcgtcccgtaactccactccgggctcttctcgcggcacgtccccggctcgtatggcaggtaacggtggtgacgctgctctggcgctgctactgctggacaggctgaaccagctggagtcgaagatgagtggtaaaggccaacagcagcagggccagaccgttaccaaaaagagcgcagctgaagcatctaaaaaaccgcgacagaaacgtaccgcgactaaagagtacaatgtaacacaggccttcggtcgtcgaggtccggagcaaactcaaggaaactttggcgatcaggatttaatcaaacttgggaccgactacaaacactggccgcaaattgcccagttcgccccatccgctagtgcattcttcggtatgagccgcatcggcatgcgggaaacgccaagtggtacgtggctgacctacaccggtgctatcaagcttgataagaaggacccgaactttaaagaccaggttattctgcttaacaaacatattgatgcctataaaactttcccgccgaccgaacccaaaaaggacaaaaagaaaaaagctgatgaaacccaggctctaccgcagcgtcagaaaaaacagcaaactgtgactctgctgccagctgcggacctggatgatttttccaagcagctgcaacagtctatgagctctgcggactctacgcaggcttaa

SEQ ID NO: 81 - DNA, 2016 bp, Artificial Sequence
  Description of Artificial Sequence: Synthetic polynucleotide
atgcaccatcatcaccatcatggtggttctggttcgccgatacttggttattggaagattaaaggactggttcagcccacacgcctcctgctagaatacttagaggaaaaatatgaagagcacctgtacgaacgtgatgagggggacaaatggcgaaacaagaaatttgaattgggcttagaatttccaaatttgccgtattatatcgatggcgacgtaaaactgacccaatcaatggccattattcgctacatcgcagataaacataacatgctgggtggctgccctaaagaacgggctgagatctccatgctggaaggtgcggtgctcgacattcgctacggcgtcagtagaattgcgtatagcaaggatttcgaaactttaaaagtggatttcctgagcaaacttccggagatgctgaaaatgtttgaggataggctttgtcataagacgtatctcaatggtgatcatgttacccacccggactttatgctgtacgacgcccttgatgtcgttctgtatatggatcccatgtgcctggacgccttcccgaaattagtgtgttttaaaaaacgtatcgaagcgattccacagatcgataaatacttgaagtcttctaaatatattgcttggcctctgcaaggctggcaggcaacgttcggtgggggagatcatccgccaaaatcagatctggtgccgcgtgggagccctggcatacaccgcgacggtggttctggtgagaacctgtactttcaaagctcagataatgggcctcaaaaccagcgcaacgctccacgtataaccttcggtggcccgtctgactccacaggcagcaaccagaatggtgagcgtagtggagccaggtctaagcagcgccgtccccagggtctgccgaacaacacggcgagctggtttactggccttacccaacacggtaaagaagacttaaaattcccgccaggccagggcgtcccgatcaacactaactcttccccggatgatcagattggttattaccgcagagcaactcgtcggattcgcggcggcgacggtaaaatgaaagatttgcctccgcgttggtacttttactatctcggcaccggtccggaagctgatctgccctacggggcagtgaagccggggatcttttgggtggctgcggaaggtgccctgaatactccaaaagatcatatcggcacccgtaaccctgctaataacgctgcgatccctctgcaactgcctccgggtacaactctgccaaaaggcttctatgcagaagggtcgcgtggtggcagccaggcgagtagccgtagcagctcccgctctcgcaactcgtcccgtaactccactccgggctcttctcgcggcacgtccccggctcgtatggcaggtaacggtggtgacgctgctctggcgctgctactgctggacaggctgaaccagctggagtcgaagatgagtggtaaaggccaacagcagcagggccagaccgttaccaaaaagagcgcagctgaagcatctaaaaaaccgcgacagaaacgtaccgcgactaaagcgtacaatgtaacacaggccttcggtcgtcgaggtccggagcaaactcaaggaaactttggcgatcaggaattaatccgccaggggaccgactacaaacactggccgcaaattgcccagttcgccccatccgctagtgcattcttcggtatgagccgcatcggcatggaagtaacgccaagtggtacgtggctgacctacaccggtgctatcaagcttgatgacaaggacccgaactttaaagaccaggttattctgcttaacaaacatattgatgcctataaaactttcccgccgaccgaacccaaaaaggacaaaaagaaaaaagctgatgaaacccaggctctaccgcagcgtcagaaaaaacagcaaactgtgactctgctgccagctgcggacctggatgatttttccaagcagctgcaacagtctatgagctctgcggactctacgcaggcttaa

SEQ ID NO: 82 - DNA, 2016 bp, Artificial Sequence
  Description of Artificial Sequence: Synthetic polynucleotide
atgcaccatcatcaccatcatggtggttctggttcgccgatacttggttattggaagattaaaggactggttcagcccacacgcctcctgctagaatacttagaggaaaaatatgaagagcacctgtacgaacgtgatgagggggacaaatggcgaaacaagaaatttgaattgggcttagaatttccaaatttgccgtattatatcgatggcgacgtaaaactgacccaatcaatggccattattcgctacatcgcagataaacataacatgctgggtggctgccctaaagaacgggctgagatctccatgctggaaggtgcggtgctcgacattcgctacggcgtcagtagaattgcgtatagcaaggatttcgaaactttaaaagtggatttcctgagcaaacttccggagatgctgaaaatgtttgaggataggctttgtcataagacgtatctcaatggtgatcatgttacccacccggactttatgctgtacgacgcccttgatgtcgttctgtatatggatcccatgtgcctggacgccttcccgaaattagtgtgttttaaaaaacgtatcgaagcgattccacagatcgataaatacttgaagtcttctaaatatattgcttggcctctgcaaggctggcaggcaacgttcggtgggggagatcatccgccaaaatcagatctggtgccgcgtgggagccctggcatacaccgcgacggtggttctggtgagaacctgtactttcaaagctcagataatgggcctcaaaaccagcgcaacgctccacgtataaccttcggtggcccgtctgactccacaggcagcaaccagaatggtgagcgtagtggagccaggtctaagcagcgccgtccccagggtctgccgaacaacacggcgagctggtttactgcgcttacccaacacggtaaagaagacttaaaattcccgcgtggccagggcgtcccgatcaacactaactcttccccggatgatcagattggttattaccgcagagcaactcgtcggattcgcggcggcgacggtaaaatgaaagatttgtctccgcgttggtacttttactatctcggcaccggtccggaagctggactgccctacggggcaaacaaggacgggatcatttgggtggctaccgaaggtgccctgaatactccaaaagatcatatcggcacccgtaaccctgctaataacgctgcgatcgttctgcaactgcctcagggtacaactctgccaaaaggcttctatgcagaagggtcgcgtggtggcagccaggcgagtagccgtagcagctcccgctctcgcaactcgtcccgtaactccactccgggctcttctcgcggcacgtccccggctcgtatggcaggtaacggtggtgacgctgctctggcgctgctactgctggacaggctgaaccagctggagtcgaagatgagtggtaaaggccaacagcagcagggccagaccgttaccaaaaagagcgcagctgaagcatctaaaaaaccgcgacagaaacgtaccgcgactaaagcgtacaatgtaacacaggccttcggtcgtcgaggtccggagcaaactcaaggaaactttggcgatcaggaattaatccgccaggggaccgactacaaacactggccgcaaattgcccagttcgccccatccgctagtgcattcttcggtatgagccgcatcggcatggaagtaacgccaaatggtacgtggctgacctacaccggtgctatcaagcttgatgacaaggacccgaactttaaagaccaggttattctgcttaacaaacatattgatgcctataaaactttcccgccgaccgaacccaaaaaggacaaaaagaaaaaagctgatgaaacccaggctctaccgcagcgtcagaaaaaacagcaaactgtgactctgctgccagctgcggacctggatgatttttccaagcagctgcaacagtctatgagctctgcggactctacgcaggcttaa

SEQ ID NO: 83 - DNA, 2016 bp, Artificial Sequence
  Description of Artificial Sequence: Synthetic polynucleotide
atgcaccatcatcaccatcatggtggttctggttcgccgatacttggttattggaagattaaaggactggttcagcccacacgcctcctgctagaatacttagaggaaaaatatgaagagcacctgtacgaacgtgatgagggggacaaatggcgaaacaagaaatttgaattgggcttagaatttccaaatttgccgtattatatcgatggcgacgtaaaactgacccaatcaatggccattattcgctacatcgcagataaacataacatgctgggtggctgccctaaagaacgggctgagatctccatgctggaaggtgcggtgctcgacattcgctacggcgtcagtagaattgcgtatagcaaggatttcgaaactttaaaagtggatttcctgagcaaacttccggagatgctgaaaatgtttgaggataggctttgtcataagacgtatctcaatggtgatcatgttacccacccggactttatgctgtacgacgcccttgatgtcgttctgtatatggatcccatgtgcctggacgccttcccgaaattagtgtgttttaaaaaacgtatcgaagcgattccacagatcgataaatacttgaagtcttctaaatatattgcttggcctctgcaaggctggcaggcaacgttcggtgggggagatcatccgccaaaatcagatctggtgccgcgtgggagccctggcatacaccgcgacggtggttctggtgagaacctgtactttcaaagctcagataatgggcctcaaaaccagcgcaacgctccacgtataaccttcggtggcccgtctgactccacaggcagcaaccagaatggtgagcgtagtggagccaggtctaagcagcgccgtccccagggtctgccgaacaacacggcgagctggtttactgcgcttacccaacacggtaaagaagacttaaaattcccgcgtggccagggcgtcccgatcaacactaactcttccccggatgatcagattggttattaccgcagagcaactcgtcggattcgcggcggcgacggtaaaatgaaagatttgtctccgcgttggtacttttactatctcggcaccggtccggaagctggactgccctacggggcaaacaaggacgggatcatttgggtggctaccgaaggtgccctgaatactccaaaagatcatatcggcacccgtaaccctgctaataacgctgcgatcgttctgcaactgcctcagggtacaactctgccaaaaggcttctatgcagaagggtcgcgtggtggcagccaggcgagtagccgtagcagctcccgctctcgcaactcgtcccgtaactccactccgggctcttctcgcggcacgtccccggctcgtatggcaggtaacggtggtgacgctgctctggcgctgctactgctggacaggctgaaccagctggagtcgaagatgagtggtaaaggccaacagcagcagggccagaccgttaccaaaaagagcgcagctgaagcatctaaaaaaccgcgacagaaacgtaccgcgactaaagcgtacaatgtaacacaggccttcggtcgtcgaggtccggagcaaactcaaggaaactttggcgatcaggaattaatccgccaggggaccgactacaaaaaatggccgcaaattgcccagttcgccccatccgctagtgcattcttcggtatgagccgcatcggcatggaagtaacgccaagtggtacgtggctgacctacaccggtgctatcaagcttgatgacaaggacccgaactttaaagaccaggttattctgcttaacaaacatattgatgcctataaaactttcccgccgaccgaacccaaaaaggacaaaaagaaaaaagctgatgaaacccaggctctaccgcagcgtcagaaaaaacagcaaactgtgactctgctgccagctgcggacctggatgatttttccaagcagctgcaacagtctatgagctctgcggactctacgcaggcttaa

SEQ ID NO: 84 - DNA, 2016 bp, Artificial Sequence
  Description of Artificial Sequence: Synthetic polynucleotide
atgcaccatcatcaccatcatggtggttctggttcgccgatacttggttattggaagattaaaggactggttcagcccacacgcctcctgctagaatacttagaggaaaaatatgaagagcacctgtacgaacgtgatgagggggacaaatggcgaaacaagaaatttgaattgggcttagaatttccaaatttgccgtattatatcgatggcgacgtaaaactgacccaatcaatggccattattcgctacatcgcagataaacataacatgctgggtggctgccctaaagaacgggctgagatctccatgctggaaggtgcggtgctcgacattcgctacggcgtcagtagaattgcgtatagcaaggatttcgaaactttaaaagtggatttcctgagcaaacttccggagatgctgaaaatgtttgaggataggctttgtcataagacgtatctcaatggtgatcatgttacccacccggactttatgctgtacgacgcccttgatgtcgttctgtatatggatcccatgtgcctggacgccttcccgaaattagtgtgttttaaaaaacgtatcgaagcgattccacagatcgataaatacttgaagtcttctaaatatattgcttggcctctgcaaggctggcaggcaacgttcggtgggggagatcatccgccaaaatcagatctggtgccgcgtgggagccctggcatacaccgcgacggtggttctggtgagaacctgtactttcaaagctcagataatgggcctcaaaaccagcgcaacgctccacgtataaccttcggtggcccgtctgactccacaggcagcaaccagaatggtgagcgtagtggagccaggtctaagcagcgccgtccccagggtctgccgaacaacacggcgagctggtttactgcgcttacccaacacggtaaagaagacttaaaattcccgcgtggccagggcgtcccgatcaacactaactcttccccggatgatcagattggttattaccgcagagcaactcgtcggattcgcggcggcgacggtaaaatgaaagatttgtctccgcgttggtacttttactatctcggcaccggtccggaagctggactgccctacggggcaaacaaggacgggatcatttgggtggctaccgaaggtgccctgaatactccaaaagatcatatcggcacccgtaaccctgctaataacgctgcgatcgttctgcaactgcctcagggtacaactctgccaaaaggcttctatgcagaagggtcgcgtggtggcagccaggcgagtagccgtagcagctcccgctctcgcaactcgtcccgtaactccactccgggctcttctcgcggcacgtccccggctcgtatggcaggtaacggtggtgacgctgctctggcgctgctactgctggacaggctgaaccagctggagtcgaagatgagtggtaaaggccaacagcagcagggccagaccgttaccaaaaagagcgcagctgaagcatctaaaaaaccgcgacagaaacgtaccgcgactaaagattacaatgtaacacaggccttcggtcgtcgaggtccggagcaaactcaaggaaactttggcgatcaggatttaatcaaattggggaccgactacaaacactggccgcaaattgcccagttcgccccatccgctagtgcattcttcggtatgagccgcatcggcacggaagaaacgccaagtggtacgtggctgacctacaccggtgctatcaagcttgataaaaaggacccgaactttaaagaccaggttattctgcttaacaaacatattgatgcctataaaactttcccgccgaccgaacccaaaaaggacaaaaagaaaaaagctgatgaaacccaggctctaccgcagcgtcagaaaaaacagcaaactgtgactctgctgccagctgcggacctggatgatttttccaagcagctgcaacagtctatgagctctgcggactctacgcaggcttaa

SEQ ID NO: 85 - DNA, 2016 bp, Artificial Sequence
  Description of Artificial Sequence: Synthetic polynucleotide
atgcaccatcatcaccatcatggtggttctggttcgccgatacttggttattggaagattaaaggactggttcagcccacacgcctcctgctagaatacttagaggaaaaatatgaagagcacctgtacgaacgtgatgagggggacaaatggcgaaacaagaaatttgaattgggcttagaatttccaaatttgccgtattatatcgatggcgacgtaaaactgacccaatcaatggccattattcgctacatcgcagataaacataacatgctgggtggctgccctaaagaacgggctgagatctccatgctggaaggtgcggtgctcgacattcgctacggcgtcagtagaattgcgtatagcaaggatttcgaaactttaaaagtggatttcctgagcaaacttccggagatgctgaaaatgtttgaggataggctttgtcataagacgtatctcaatggtgatcatgttacccacccggactttatgctgtacgacgcccttgatgtcgttctgtatatggatcccatgtgcctggacgccttcccgaaattagtgtgttttaaaaaacgtatcgaagcgattccacagatcgataaatacttgaagtcttctaaatatattgcttggcctctgcaaggctggcaggcaacgttcggtgggggagatcatccgccaaaatcagatctggtgccgcgtgggagccctggcatacaccgcgacggtggttctggtgagaacctgtactttcaaagctcagataatgggcctcaaaaccagcgcaacgctccacgtataaccttcggtggcccgtctgactccacaggcagcaaccagaatggtgagcgtagtggagccaggtctaagcagcgccgtccccagggtctgccgaacaacacggcgagctggtttactgcgcttacccaacacggtaaagaagacttaaaattcccgcgtggccagggcgtcccgatcaacactaactcttccccggatgatcagattggttattaccgcagagcaactcgtcggattcgcggcggcgacggtaaaatgaaagatttgccaccgcgttggtacttttactatctcggcaccggtccggaagctggactgccctacggggcaaacaaggacgggatcatttgggtggctaccgaaggtgccctgaatactccaaaagatcatatcggcacccgtaaccctgctaataacgctgcgatcgttctgcaactgcctcagggtacaactctgccaaaaggcttctatgcagaagggtcgcgtggtggcagccaggcgagtagccgtagcagctcccgctctcgcaactcgtcccgtaactccactccgggctcttctcgcggcacgtccccggctcgtatggcaggtaacggtggtgacgctgctctggcgctgctactgctggacaggctgaaccagctggagtcgaagatgagtggtaaaggccaacagcagcagggccagaccgttaccaaaaagagcgcagctgaagcatctaaaaaaccgcgacagaaacgtaccgcgactaaagcgtacaatgtaacacaggccttcggtcgtcgaggtccggagcaaactcaaggaaactttggcgatcaggaattaatccgccaggggaccgactacaaacactggccgcaaattgcccagttcgccccatccgctagtgcattcttcggtatgagccgcatcggcatggaagtaacgccaagtggtacgtggctgacctacaccggtgctatcaagcttgatgacaaggacccgaactttaaagaccaggttattctgcttaacaaacatattgatgcctataaaactttcccgccgaccgaacccaaaaaggacaaaaagaaaaaagctgatgaaacccaggctctaccgcagcgtcagaaaaaacagcaaactgtgactctgctgccagctgcggacctggatgatttttccaagcagctgcaacagtctatgagctctgcggactctacgcaggcttaa

SEQ ID NO: 86 - DNA, 2016 bp, Artificial Sequence
  Description of Artificial Sequence: Synthetic polynucleotide
atgcaccatcatcaccatcatggtggttctggttcgccgatacttggttattggaagattaaaggactggttcagcccacacgcctcctgctagaatacttagaggaaaaatatgaagagcacctgtacgaacgtgatgagggggacaaatggcgaaacaagaaatttgaattgggcttagaatttccaaatttgccgtattatatcgatggcgacgtaaaactgacccaatcaatggccattattcgctacatcgcagataaacataacatgctgggtggctgccctaaagaacgggctgagatctccatgctggaaggtgcggtgctcgacattcgctacggcgtcagtagaattgcgtatagcaaggatttcgaaactttaaaagtggatttcctgagcaaacttccggagatgctgaaaatgtttgaggataggctttgtcataagacgtatctcaatggtgatcatgttacccacccggactttatgctgtacgacgcccttgatgtcgttctgtatatggatcccatgtgcctggacgccttcccgaaattagtgtgttttaaaaaacgtatcgaagcgattccacagatcgataaatacttgaagtcttctaaatatattgcttggcctctgcaaggctggcaggcaacgttcggtgggggagatcatccgccaaaatcagatctggtgccgcgtgggagccctggcatacaccgcgacggtggttctggtgagaacctgtactttcaaagctcagataatgggcctcaaaaccagcgcaacgctccacgtataaccttcggtggcccgtctgactccacaggcagcaaccagaatggtgagcgtagtggagccaggtctaagcagcgccgtccccagggtctgccgaacaacacggcgagctggtttactgcgcttacccaacacggtaaagaagacttaaaattcccgcgtggccagggctggccgatcaacactaactcttccccggatgatcagattggttattaccgcagagcaactcgtcggattcgcggcggcgacggtaaaatgaaagatttgtctccgcgttggtacttttactatctcggcaccggtccggaagctggactgccctacggggcaaacaaggacgggatcatttgggtggctaccgaaggtgccctgaatactccaaaagatcatatcggcacccgtaaccctgctaataacgctgcgatcgttctgcaactgcctcagggtacaactctgccaaaaggcttctatgcagaagggtcgcgtggtggcagccaggcgagtagccgtagcagctcccgctctcgcaactcgtcccgtaactccactccgggctcttctcgcggcacgtccccggctcgtatggcaggtaacggtggtgacgctgctctggcgctgctactgctggacaggctgaaccagctggagtcgaagatgagtggtaaaggccaacagcagcagggccagaccgttaccaaaaagagcgcagctgaagcatctaaaaaaccgcgacagaaacgtaccgcgactaaagcgtacaatgtaacacaggccttcggtcgtcgaggtccggagcaaactcaaggaaactttggcgatcaggaattaatccgccaggggaccgactacaaacactggccgcaaattgcccagttcgccccatccgctagtgcattcttcggtatgagccgcatcggcatggaagtaacgccaagtggtacgtggctgacctacaccggtgctatcaagcttgatgacaaggacccgaactttaaagaccaggttattctgcttaacaaacatattgatgcctataaaactttcccgccgaccgaacccaaaaaggacaaaaagaaaaaagctgatgaaacccaggctctaccgcagcgtcagaaaaaacagcaaactgtgactctgctgccagctgcggacctggatgatttttccaagcagctgcaacagtctatgagctctgcggactctacgcaggcttaa

SEQ ID NO: 87 - DNA, 2016 bp, Artificial Sequence
  Description of Artificial Sequence: Synthetic polynucleotide
atgcaccatcatcaccatcatggtggttctggttcgccgatacttggttattggaagattaaaggactggttcagcccacacgcctcctgctagaatacttagaggaaaaatatgaagagcacctgtacgaacgtgatgagggggacaaatggcgaaacaagaaatttgaattgggcttagaatttccaaatttgccgtattatatcgatggcgacgtaaaactgacccaatcaatggccattattcgctacatcgcagataaacataacatgctgggtggctgccctaaagaacgggctgagatctccatgctggaaggtgcggtgctcgacattcgctacggcgtcagtagaattgcgtatagcaaggatttcgaaactttaaaagtggatttcctgagcaaacttccggagatgctgaaaatgtttgaggataggctttgtcataagacgtatctcaatggtgatcatgttacccacccggactttatgctgtacgacgcccttgatgtcgttctgtatatggatcccatgtgcctggacgccttcccgaaattagtgtgttttaaaaaacgtatcgaagcgattccacagatcgataaatacttgaagtcttctaaatatattgcttggcctctgcaaggctggcaggcaacgttcggtgggggagatcatccgccaaaatcagatctggtgccgcgtgggagccctggcatacaccgcgacggtggttctggtgagaacctgtactttcaaagctcagataatgggcctcaaaaccagcgcaacgctccacgtataaccttcggtggcccgtctgactccacaggcagcaaccagaatggtgagcgtagtggagccaggtctaagcagcgccgtccccagggtctgccgaacaacacggcgagctggtttactgcgcttacccaacacggtaaagaagacttaaaattcccgcgtggccagggcgtcccgatcaacactaactcttccccggatgatcagattggttattaccgcagagcaactcgtcggattcgcggcggcgacggtaaaatgaaagatttgtctccgcgttggtacttttactatctcggcaccggtccggaagctggactgccctacggggcaaacaaggacgggatcatttgggtggctaccgaaggtgccctgaatactccaaaagatcatatcggcacccgtaaccctgctaataacgctgcgatcgttctgcaactgcctcagggtacaactctgccaaaaggcttctatgcagaagggtcgcgtggtggcagccaggcgagtagccgtagcagctcccgctctcgcaactcgtcccgtaactccactccgggctcttctcgcggcacgtccccggctcgtatggcaggtaacggtggtgacgctgctctggcgctgctactgctggacaggctgaaccagctggagtcgaagatgagtggtaaaggccaacagcagcagggccagaccgttaccaaaaagagcgcagctgaagcatctaaaaaaccgcgacagaaacgtaccgcgactaaagcgtacaatgtaacacaggccttcggtcgtcgaggtccggagcaaactcaaggaaactttggcgatcaggaattaatccgccaggggaccgactacaaacactggccgcaaattgcccagttcgccccatccgctagtgcattcttcggtatgagccgcatcggcatggaagtaacgccaagtggtacgtggctgacctacaccggtacgatcaagcttgatgacaaggacccgaactttaaagaccaggttattctgcttaacaaacatattgatgcctataaaactttcccgccgaccgaacccaaaaaggacaaaaagaaaaaagctgatgaaacccaggctctaccgcagcgtcagaaaaaacagcaaactgtgactctgctgccagctgcggacctggatgatttttccaagcagctgcaacagtctatgagctctgcggactctacgcaggcttaa

SEQ ID NO: 88 - DNA, 2016 bp, Artificial Sequence
  Description of Artificial Sequence: Synthetic polynucleotide
atgcaccatcatcaccatcatggtggttctggttcgccgatacttggttattggaagattaaaggactggttcagcccacacgcctcctgctagaatacttagaggaaaaatatgaagagcacctgtacgaacgtgatgagggggacaaatggcgaaacaagaaatttgaattgggcttagaatttccaaatttgccgtattatatcgatggcgacgtaaaactgacccaatcaatggccattattcgctacatcgcagataaacataacatgctgggtggctgccctaaagaacgggctgagatctccatgctggaaggtgcggtgctcgacattcgctacggcgtcagtagaattgcgtatagcaaggatttcgaaactttaaaagtggatttcctgagcaaacttccggagatgctgaaaatgtttgaggataggctttgtcataagacgtatctcaatggtgatcatgttacccacccggactttatgctgtacgacgcccttgatgtcgttctgtatatggatcccatgtgcctggacgccttcccgaaattagtgtgttttaaaaaacgtatcgaagcgattccacagatcgataaatacttgaagtcttctaaatatattgcttggcctctgcaaggctggcaggcaacgttcggtgggggagatcatccgccaaaatcagatctggtgccgcgtgggagccctggcatacaccgcgacggtggttctggtgagaacctgtactttcaaagctcagataatgggcctcaaaaccagcgcaacgctccacgtataaccttcggtggcccgtctgactccacaggcagcaaccagaatggtgagcgtagtggagccaggtctaagcagcgccgtccccagggtctgccgaacaacacggcgagctggtttactgcgcttacccaacacggtaaagaagacttaaaattcccgcgtggccagggcgtcccgatcaacactaactcttccccggatgatcagattggttattaccgcagagcaactcgtcggattcgcggcggcgacggtaaaatgaaagatttgtctccgcgttggtacttttactatctcggcaccggtccggaagctggactgccctacggggcaaacaaggacgggatcatttgggtggctaccgaaggtgccctgaatactccaaaagatcatatcggcacccgtaaccctgctaataacgctgcgatcgttctgcaactgcctcagggtacaactctgccaaaaggcttctatgcagaagggtcgcgtggtggcagccaggcgagtagccgtagcagctcccgctctcgcaactcgtcccgtaactccactccgggctcttctcgcggcacgtccccggctcgtatggcaggtaacggtggtgacgctgctctggcgctgctactgctggacaggctgaaccagctggagtcgaagatgagtggtaaaggccaacagcagcagggccagaccgttaccaaaaagagcgcagctgaagcatctaaaaaaccgcgacagaaacgtaccgcgactaaagcgtacaatgtaacacaggccttcggtcgtcgaggtccggagcaaactcaaggaaactttggcgatcaggaattaatccgccaggggaccgactacaaacactggccgcaaattgcccagttcgccccatccgctagtgcattcttcggtatgagccgcatcggcatggaagtagcgccaagtggtacgtggctgacctacaccggtgctatcaagcttgatgacaaggacccgaactttaaagaccaggttattctgcttaacaaacatattgatgcctataaaactttcccgccgaccgaacccaaaaaggacaaaaagaaaaaagctgatgaaacccaggctctaccgcagcgtcagaaaaaacagcaaactgtgactctgctgccagctgcggacctggatgatttttccaagcagctgcaacagtctatgagctctgcggactctacgcaggcttaa

SEQ ID NO: 89 - DNA, 2016 bp, Artificial Sequence
  Description of Artificial Sequence: Synthetic polynucleotide
atgcaccatcatcaccatcatggtggttctggttcgccgatacttggttattggaagattaaaggactggttcagcccacacgcctcctgctagaatacttagaggaaaaatatgaagagcacctgtacgaacgtgatgagggggacaaatggcgaaacaagaaatttgaattgggcttagaatttccaaatttgccgtattatatcgatggcgacgtaaaactgacccaatcaatggccattattcgctacatcgcagataaacataacatgctgggtggctgccctaaagaacgggctgagatctccatgctggaaggtgcggtgctcgacattcgctacggcgtcagtagaattgcgtatagcaaggatttcgaaactttaaaagtggatttcctgagcaaacttccggagatgctgaaaatgtttgaggataggctttgtcataagacgtatctcaatggtgatcatgttacccacccggactttatgctgtacgacgcccttgatgtcgttctgtatatggatcccatgtgcctggacgccttcccgaaattagtgtgttttaaaaaacgtatcgaagcgattccacagatcgataaatacttgaagtcttctaaatatattgcttggcctctgcaaggctggcaggcaacgttcggtgggggagatcatccgccaaaatcagatctggtgccgcgtgggagccctggcatacaccgcgacggtggttctggtgagaacctgtactttcaaagctcagataatgggcctcaaaaccagcgcaacgctccacgtataaccttcggtggcccgtctgactccacaggcagcaaccagaatggtgagcgtagtggagccaggtctaagcagcgccgtccccagggtctgccgaacaacacggcgagctggtttactgcgcttacccaacacggtaaagaagacttaaaattcccgcgtggccagggcgtcccgatcaacactaactcttccccggatgatcagattggttattaccgcagagcaactcgtcggattcgcggcggcgacggtaaaatgaaagatttgtctccgcgttggtacttttactatctcggcaccggtccggaagctggactgccctacggggcaaacaaggacgggatcatttgggtggctaccgaaggtgccctgaatactccaaaagatcatatcggcacccgtaaccctgctaataacgaggcgatcgttctgcaactgcctcagggtacaactctgccaaaaggcttctatgcagaagggtcgcgtggtggcagccaggcgagtagccgtagcagctcccgctctcgcaactcgtcccgtaactccactccgggctcttctcgcggcacgtccccggctcgtatggcaggtaacggtggtgacgctgctctggcgctgctactgctggacaggctgaaccagctggagtcgaagatgagtggtaaaggccaacagcagcagggccagaccgttaccaaaaagagcgcagctgaagcatctaaaaaaccgcgacagaaacgtaccgcgactaaagcgtacaatgtaacacaggccttcggtcgtcgaggtccggagcaaactcaaggaaactttggcgatcaggaattaatccgccaggggaccgactacaaacactggccgcaaattgcccagttcgccccatccgctagtgcattcttcggtatgagccgcatcggcatggaagtaacgccaagtggtacgtggctgacctacaccggtgctatcaagcttgatgacaaggacccgaactttaaagaccaggttattctgcttaacaaacatattgatgcctataaaactttcccgccgaccgaacccaaaaaggacaaaaagaaaaaagctgatgaaacccaggctctaccgcagcgtcagaaaaaacagcaaactgtgactctgctgccagctgcggacctggatgatttttccaagcagctgcaacagtctatgagctctgcggactctacgcaggcttaa

SEQ ID NO: 90 - DNA, 2016 bp, Artificial Sequence
  Description of Artificial Sequence: Synthetic polynucleotide
atgcaccatcatcaccatcatggtggttctggttcgccgatacttggttattggaagattaaaggactggttcagcccacacgcctcctgctagaatacttagaggaaaaatatgaagagcacctgtacgaacgtgatgagggggacaaatggcgaaacaagaaatttgaattgggcttagaatttccaaatttgccgtattatatcgatggcgacgtaaaactgacccaatcaatggccattattcgctacatcgcagataaacataacatgctgggtggctgccctaaagaacgggctgagatctccatgctggaaggtgcggtgctcgacattcgctacggcgtcagtagaattgcgtatagcaaggatttcgaaactttaaaagtggatttcctgagcaaacttccggagatgctgaaaatgtttgaggataggctttgtcataagacgtatctcaatggtgatcatgttacccacccggactttatgctgtacgacgcccttgatgtcgttctgtatatggatcccatgtgcctggacgccttcccgaaattagtgtgttttaaaaaacgtatcgaagcgattccacagatcgataaatacttgaagtcttctaaatatattgcttggcctctgcaaggctggcaggcaacgttcggtgggggagatcatccgccaaaatcagatctggtgccgcgtgggagccctggcatacaccgcgacggtggttctggtgagaacctgtactttcaaagctcagataatgggcctcaaaaccagcgcaacgctccacgtataaccttcggtggcccgtctgactccacaggcagcaaccagaatggtgagcgtagtggagccaggtctaagcagcgccgtccccagggtctgccgaacaacacggcgagctggtttactgcgcttacccaacacggtaaagaagacttaaaattcccgcgtggccagggcgtcccgatcaacactaactcttccccggatgatcagattggttattaccgcagagcaactcgtcggattcgcggcggcgacggtaaaatgaaagatttgtctccgcgttggtacttttactatctcggcaccggtccggaagctggactgccctacggggcaaacaaggacgggatcatttgggtggctaccgaaggtgccctgaatactccaaaagatcatatcggcacccgtaaccctgctaataacgctgcgatcgttctgcaactgcctcagggtacaactctgccaaaaggcttctatgcagaagggtcgcgtggtggcagccaggcgagtagccgtagcagctcccgctctcgcaactcgtcccgtaactccactccgggctcttctcgcggcacgtccccggctcgtatggcaggtaacggtggtgacgctgctctggcgctgctactgctggacaggctgaaccagctggagtcgaagatgagtggtaaaggccaacagcagcagggccagaccgttaccaaaaagagcgcagctgaagcatctaaaaaaccgcgacagaaacgtaccgcgactaaagcgtacaatgtaacacaggccttcggtcgtcgaggtccggagcaaactcaaggaaactttggcgatcaggaattaatccgccaggggaccgactacaaacactggccgcaaattgcccagttcgccccatccgctagtgcattcttcggtatgagccgcatcggcatggaagtaaatccaagtggtacgtggctgacctacaccggtgctatcaagcttgatgacaaggacccgaactttaaagaccaggttattctgcttaacaaacatattgatgcctataaaactttcccgccgaccgaacccaaaaaggacaaaaagaaaaaagctgatgaaacccaggctctaccgcagcgtcagaaaaaacagcaaactgtgactctgctgccagctgcggacctggatgatttttccaagcagctgcaacagtctatgagctctgcggactctacgcaggcttaa

SEQ ID NO: 91 - DNA, 2016 bp, Artificial Sequence
  Description of Artificial Sequence: Synthetic polynucleotide
atgcaccatcatcaccatcatggtggttctggttcgccgatacttggttattggaagattaaaggactggttcagcccacacgcctcctgctagaatacttagaggaaaaatatgaagagcacctgtacgaacgtgatgagggggacaaatggcgaaacaagaaatttgaattgggcttagaatttccaaatttgccgtattatatcgatggcgacgtaaaactgacccaatcaatggccattattcgctacatcgcagataaacataacatgctgggtggctgccctaaagaacgggctgagatctccatgctggaaggtgcggtgctcgacattcgctacggcgtcagtagaattgcgtatagcaaggatttcgaaactttaaaagtggatttcctgagcaaacttccggagatgctgaaaatgtttgaggataggctttgtcataagacgtatctcaatggtgatcatgttacccacccggactttatgctgtacgacgcccttgatgtcgttctgtatatggatcccatgtgcctggacgccttcccgaaattagtgtgttttaaaaaacgtatcgaagcgattccacagatcgataaatacttgaagtcttctaaatatattgcttggcctctgcaaggctggcaggcaacgttcggtgggggagatcatccgccaaaatcagatctggtgccgcgtgggagccctggcatacaccgcgacggtggttctggtgagaacctgtactttcaaagctcagataatgggcctcaaaaccagcgcaacgctccacgtataaccttcggtggcccgtctgactccacaggcagcaaccagaatggtgagcgtagtggagccaggtctaagcagcgccgtccccagggtctgccgaacaacacggcgagctggtttactgcgcttacccaacacggtaaagaagacttaaaattcccgcgtggccagggcgtcccgatcaacactaactcttccccggatgatcagattggttattaccgcagagcaactcgtcggattcgcggcggcgacggtaaaatgaaagatttgtctccgcgttggtacttttactatctcggcaccggtccggaagctggactgccctacggggcaaacaaggacgggatcatttgggtggctaccccaggtgccctgaatactccaaaagatcatatcggcacccgtaaccctgctaataacgctgcgatcgttctgcaactgcctcagggtacaactctgccaaaaggcttctatgcagaagggtcgcgtggtggcagccaggcgagtagccgtagcagctcccgctctcgcaactcgtcccgtaactccactccgggctcttctcgcggcacgtccccggctcgtatggcaggtaacggtggtgacgctgctctggcgctgctactgctggacaggctgaaccagctggagtcgaagatgagtggtaaaggccaacagcagcagggccagaccgttaccaaaaagagcgcagctgaagcatctaaaaaaccgcgacagaaacgtaccgcgactaaagcgtacaatgtaacacaggccttcggtcgtcgaggtccggagcaaactcaaggaaactttggcgatcaggaattaatccgccaggggaccgactacaaacactggccgcaaattgcccagttcgccccatccgctagtgcattcttcggtatgagccgcatcggcatggaagtaacgccaagtggtacgtggctgacctacaccggtgctatcaagcttgatgacaaggacccgaactttaaagaccaggttattctgcttaacaaacatattgatgcctataaaactttcccgccgaccgaacccaaaaaggacaaaaagaaaaaagctgatgaaacccaggctctaccgcagcgtcagaaaaaacagcaaactgtgactctgctgccagctgcggacctggatgatttttccaagcagctgcaacagtctatgagctctgcggactctacgcaggcttaa

SEQ ID NO: 92 - DNA, 2016 bp, Artificial Sequence
  Description of Artificial Sequence: Synthetic polynucleotide
atgcaccatcatcaccatcatggtggttctggttcgccgatacttggttattggaagattaaaggactggttcagcccacacgcctcctgctagaatacttagaggaaaaatatgaagagcacctgtacgaacgtgatgagggggacaaatggcgaaacaagaaatttgaattgggcttagaatttccaaatttgccgtattatatcgatggcgacgtaaaactgacccaatcaatggccattattcgctacatcgcagataaacataacatgctgggtggctgccctaaagaacgggctgagatctccatgctggaaggtgcggtgctcgacattcgctacggcgtcagtagaattgcgtatagcaaggatttcgaaactttaaaagtggatttcctgagcaaacttccggagatgctgaaaatgtttgaggataggctttgtcataagacgtatctcaatggtgatcatgttacccacccggactttatgctgtacgacgcccttgatgtcgttctgtatatggatcccatgtgcctggacgccttcccgaaattagtgtgttttaaaaaacgtatcgaagcgattccacagatcgataaatacttgaagtcttctaaatatattgcttggcctctgcaaggctggcaggcaacgttcggtgggggagatcatccgccaaaatcagatctggtgccgcgtgggagccctggcatacaccgcgacggtggttctggtgagaacctgtactttcaaagctcagataatgggcctcaaaaccagcgcaacgctccacgtataaccttcggtggcccgtctgactccacaggcagcaaccagaatggtgagcgtagtggagccaggtctaagcagcgccgtccccagggtctgccgaacaacacggcgagctggtttactgcgcttacccaacacggtaaagaagacttaaaattcccgcgtggccagggcgtcccgatcaacactaactcttccccggatgatcagattggttattaccgcagagcaactcgtcggattcgcggcggcgacggtaaaatgaaagatttgtctccgcgttggtacttttactatctcggcaccggtccggaagctggactgccctacggggcaaacaaggacgggatcatttgggtggctaccgaaggtgccctgaatactccaaaagatcatatcggcacccgtaaccctgctaataacgctgcgatcgttctgcaactgcctcagggtacaactctgccaaaaggcttctatgcagaagggtcgcgtggtggcagccaggcgagtagccgtagcagctcccgctctcgcaactcgtcccgtaactccactccgggctcttctcgcggcacgtccccggctcgtatggcaggtaacggtggtgacgctgctctggcgctgctactgctggacaggctgaaccagctggagtcgaagatgagtggtaaaggccaacagcagcagggccagaccgttaccaaaaagagcgcagctgaagcatctaaaaaaccgcgacagaaacgtaccgcgactaaagcgtacaatgtaacacaggccttcggtcgtcgaggtccggagcaaactcaaggaaactttggcgatcaggaattaatccgccaggggaccgactacaaacactggccgcaaattgcccagttcgccccatccgctagtgcattcttcggtatgagccgcatcggcatggaaacgacgccaagtggtacgtggctgacctacaccggtgctatcaagcttgatgacaaggacccgaactttaaagaccaggttattctgcttaacaaacatattgatgcctataaaactttcccgccgaccgaacccaaaaaggacaaaaagaaaaaagctgatgaaacccaggctctaccgcagcgtcagaaaaaacagcaaactgtgactctgctgccagctgcggacctggatgatttttccaagcagctgcaacagtctatgagctctgcggactctacgcaggcttaa

SEQ ID NO: 93 - DNA, 2016 bp, Artificial Sequence
  Description of Artificial Sequence: Synthetic polynucleotide
atgcaccatcatcaccatcatggtggttctggttcgccgatacttggttattggaagattaaaggactggttcagcccacacgcctcctgctagaatacttagaggaaaaatatgaagagcacctgtacgaacgtgatgagggggacaaatggcgaaacaagaaatttgaattgggcttagaatttccaaatttgccgtattatatcgatggcgacgtaaaactgacccaatcaatggccattattcgctacatcgcagataaacataacatgctgggtggctgccctaaagaacgggctgagatctccatgctggaaggtgcggtgctcgacattcgctacggcgtcagtagaattgcgtatagcaaggatttcgaaactttaaaagtggatttcctgagcaaacttccggagatgctgaaaatgtttgaggataggctttgtcataagacgtatctcaatggtgatcatgttacccacccggactttatgctgtacgacgcccttgatgtcgttctgtatatggatcccatgtgcctggacgccttcccgaaattagtgtgttttaaaaaacgtatcgaagcgattccacagatcgataaatacttgaagtcttctaaatatattgcttggcctctgcaaggctggcaggcaacgttcggtgggggagatcatccgccaaaatcagatctggtgccgcgtgggagccctggcatacaccgcgacggtggttctggtgagaacctgtactttcaaagctcagataatgggcctcaaaaccagcgcaacgctccacgtataaccttcggtggcccgtctgactccacaggcagcaaccagaatggtgagcgtagtggagccaggtctaagcagcgccgtccccagggtctgccgaacaacacggcgagctggtttactgcgcttacccaaaaaggtaaagaagacttaaaattcccgcgtggccagggcgtcccgatcaacactaactcttccccggatgatcagattggttattaccgcagagcaactcgtcggattcgcggcggcgacggtaaaatgaaagatttgtctccgcgttggtacttttactatctcggcaccggtccggaagctggactgccctacggggcaaacaaggacgggatcatttgggtggctaccgaaggtgccctgaatactccaaaagatcatatcggcacccgtaaccctgctaataacgctgcgatcgttctgcaactgcctcagggtacaactctgccaaaaggcttctatgcagaagggtcgcgtggtggcagccaggcgagtagccgtagcagctcccgctctcgcaactcgtcccgtaactccactccgggctcttctcgcggcacgtccccggctcgtatggcaggtaacggtggtgacgctgctctggcgctgctactgctggacaggctgaaccagctggagtcgaagatgagtggtaaaggccaacagcagcagggccagaccgttaccaaaaagagcgcagctgaagcatctaaaaaaccgcgacagaaacgtaccgcgactaaagcgtacaatgtaacacaggccttcggtcgtcgaggtccggagcaaactcaaggaaactttggcgatcaggaattaatccgccaggggaccgactacaaacactggccgcaaattgcccagttcgccccatccgctagtgcattcttcggtatgagccgcatcggcatggaagtaacgccaagtggtacgtggctgacctacaccggtgctatcaagcttgatgacaaggacccgaactttaaagaccaggttattctgcttaacaaacatattgatgcctataaaactttcccgccgaccgaacccaaaaaggacaaaaagaaaaaagctgatgaaacccaggctctaccgcagcgtcagaaaaaacagcaaactgtgactctgctgccagctgcggacctggatgatttttccaagcagctgcaacagtctatgagctctgcggactctacgcaggcttaa

SEQ ID NO: 94 - DNA, 2016 bp, Artificial Sequence
  Description of Artificial Sequence: Synthetic polynucleotide
atgcaccatcatcaccatcatggtggttctggttcgccgatacttggttattggaagattaaaggactggttcagcccacacgcctcctgctagaatacttagaggaaaaatatgaagagcacctgtacgaacgtgatgagggggacaaatggcgaaacaagaaatttgaattgggcttagaatttccaaatttgccgtattatatcgatggcgacgtaaaactgacccaatcaatggccattattcgctacatcgcagataaacataacatgctgggtggctgccctaaagaacgggctgagatctccatgctggaaggtgcggtgctcgacattcgctacggcgtcagtagaattgcgtatagcaaggatttcgaaactttaaaagtggatttcctgagcaaacttccggagatgctgaaaatgtttgaggataggctttgtcataagacgtatctcaatggtgatcatgttacccacccggactttatgctgtacgacgcccttgatgtcgttctgtatatggatcccatgtgcctggacgccttcccgaaattagtgtgttttaaaaaacgtatcgaagcgattccacagatcgataaatacttgaagtcttctaaatatattgcttggcctctgcaaggctggcaggcaacgttcggtgggggagatcatccgccaaaatcagatctggtgccgcgtgggagccctggcatacaccgcgacggtggttctggtgagaacctgtactttcaaagctcagataatgggcctcaaaaccagcgcaacgctccacgtataaccttcggtggcccgtctgactccacaggcagcaaccagaatggtgagcgtagtggagccaggtctaagcagcgccgtccccagggtctgccgaacaacacggcgagctggtttactgcgcttacccaacacggtaaagaagacttaaaattcccgcgtggccagggcgtcccgatcaacactaactcttccccggatgatcagattggttattaccgcagagcaactcgtcggattcgcggcggcgacggtaaaatgaaagatttgtctccgcgttggtacttttactatctcggcaccggtccggaagctggactgccctacggggcaaacaaggacgggatcatttgggtggctaccgaaggtgccctgaatactccaaaagatcatatcggcacccgtaaccctgctaataacgctgcgatcgttctgcaactgcctcagggtacaactctgccaaaaggcttctatgcagaagggtcgcgtggtggcagccaggcgagtagccgtagcagctcccgctctcgcaactcgtcccgtaactccactccgggctcttctcgcggcacgtccccggctcgtatggcaggtaacggtggtgacgctgctctggcgctgctactgctggacaggctgaaccagctggagtcgaagatgagtggtaaaggccaacagcagcagggccagaccgttaccaaaaagagcgcagctgaagcatctaaaaaaccgcgacagaaacgtaccgcgactaaagcgtacaatgtaacacaggccttcggtcgtcgaggtccgcatcaaactcaaggaaactttggcgatcaggaattaatccgccaggggaccgactacaaacactggccgcaaattgcccagttcgccccatccgctagtgcattcttcggtatgagccgcatcggcatggaagtaacgccaagtggtacgtggctgacctacaccggtgctatcaagcttgatgacaaggacccgaactttaaagaccaggttattctgcttaacaaacatattgatgcctataaaactttcccgccgaccgaacccaaaaaggacaaaaagaaaaaagctgatgaaacccaggctctaccgcagcgtcagaaaaaacagcaaactgtgactctgctgccagctgcggacctggatgatttttccaagcagctgcaacagtctatgagctctgcggactctacgcaggcttaa

SEQ ID NO: 95 - DNA, 2016 bp, Artificial Sequence
  Description of Artificial Sequence: Synthetic polynucleotide
atgcaccatcatcaccatcatggtggttctggttcgccgatacttggttattggaagattaaaggactggttcagcccacacgcctcctgctagaatacttagaggaaaaatatgaagagcacctgtacgaacgtgatgagggggacaaatggcgaaacaagaaatttgaattgggcttagaatttccaaatttgccgtattatatcgatggcgacgtaaaactgacccaatcaatggccattattcgctacatcgcagataaacataacatgctgggtggctgccctaaagaacgggctgagatctccatgctggaaggtgcggtgctcgacattcgctacggcgtcagtagaattgcgtatagcaaggatttcgaaactttaaaagtggatttcctgagcaaacttccggagatgctgaaaatgtttgaggataggctttgtcataagacgtatctcaatggtgatcatgttacccacccggactttatgctgtacgacgcccttgatgtcgttctgtatatggatcccatgtgcctggacgccttcccgaaattagtgtgttttaaaaaacgtatcgaagcgattccacagatcgataaatacttgaagtcttctaaatatattgcttggcctctgcaaggctggcaggcaacgttcggtgggggagatcatccgccaaaatcagatctggtgccgcgtgggagccctggcatacaccgcgacggtggttctggtgagaacctgtactttcaaagctcagataatgggcctcaaaaccagcgcaacgctccacgtataaccttcggtggcccgtctgactccacaggcagcaaccagaatggtgagcgtagtggagccaggtctaagcagcgccgtccccagggtctgccgaacaacacggcgagctggtttactgcgcttacccaacacggtaaagaagacttaaaattcccggaaggccagggcgtcccgatcaacactaactcttccccggatgatcagattggttattaccgcagagcaactcgtcggattcgcggcggcgacggtaaaatgaaagatttgtctccgcgttggtacttttactatctcggcaccggtccggaagctggactgccctacggggcaaacaaggacgggatcatttgggtggctaccgaaggtgccctgaatactccaaaagatcatatcggcacccgtaaccctgctaataacgctgcgatcgttctgcaactgcctcagggtacaactctgccaaaaggcttctatgcagaagggtcgcgtggtggcagccaggcgagtagccgtagcagctcccgctctcgcaactcgtcccgtaactccactccgggctcttctcgcggcacgtccccggctcgtatggcaggtaacggtggtgacgctgctctggcgctgctactgctggacaggctgaaccagctggagtcgaagatgagtggtaaaggccaacagcagcagggccagaccgttaccaaaaagagcgcagctgaagcatctaaaaaaccgcgacagaaacgtaccgcgactaaagcgtacaatgtaacacaggccttcggtcgtcgaggtccggagcaaactcaaggaaactttggcgatcaggaattaatccgccaggggaccgactacaaacactggccgcaaattgcccagttcgccccatccgctagtgcattcttcggtatgagccgcatcggcatggaagtaacgccaagtggtacgtggctgacctacaccggtgctatcaagcttgatgacaaggacccgaactttaaagaccaggttattctgcttaacaaacatattgatgcctataaaactttcccgccgaccgaacccaaaaaggacaaaaagaaaaaagctgatgaaacccaggctctaccgcagcgtcagaaaaaacagcaaactgtgactctgctgccagctgcggacctggatgatttttccaagcagctgcaacagtctatgagctctgcggactctacgcaggcttaa

SEQ ID NO: 96 - DNA, 2016 bp, Artificial Sequence
  Description of Artificial Sequence: Synthetic polynucleotide
atgcaccatcatcaccatcatggtggttctggttcgccgatacttggttattggaagattaaaggactggttcagcccacacgcctcctgctagaatacttagaggaaaaatatgaagagcacctgtacgaacgtgatgagggggacaaatggcgaaacaagaaatttgaattgggcttagaatttccaaatttgccgtattatatcgatggcgacgtaaaactgacccaatcaatggccattattcgctacatcgcagataaacataacatgctgggtggctgccctaaagaacgggctgagatctccatgctggaaggtgcggtgctcgacattcgctacggcgtcagtagaattgcgtatagcaaggatttcgaaactttaaaagtggatttcctgagcaaacttccggagatgctgaaaatgtttgaggataggctttgtcataagacgtatctcaatggtgatcatgttacccacccggactttatgctgtacgacgcccttgatgtcgttctgtatatggatcccatgtgcctggacgccttcccgaaattagtgtgttttaaaaaacgtatcgaagcgattccacagatcgataaatacttgaagtcttctaaatatattgcttggcctctgcaaggctggcaggcaacgttcggtgggggagatcatccgccaaaatcagatctggtgccgcgtgggagccctggcatacaccgcgacggtggttctggtgagaacctgtactttcaaagctcagataatgggcctcaaaaccagcgcaacgctccacgtataaccttcggtggcccgtctgactccacaggcagcaaccagaatggtgagcgtagtggagccaggtctaagcagcgccgtccccagggtctgccgaacaacacggcgagctggtttactgcgcttacccaacacggtaaagaagacttaacgttcccgcgtggccagggcgtcccgatcaacactaactcttccccggatgatcagattggttattaccgcagagcaactcgtcggattcgcggcggcgacggtaaaatgaaagatttgtctccgcgttggtacttttactatctcggcaccggtccggaagctggactgccctacggggcaaacaaggacgggatcatttgggtggctaccgaaggtgccctgaatactccaaaagatcatatcggcacccgtaaccctgctaataacgctgcgatcgttctgcaactgcctcagggtacaactctgccaaaaggcttctatgcagaagggtcgcgtggtggcagccaggcgagtagccgtagcagctcccgctctcgcaactcgtcccgtaactccactccgggctcttctcgcggcacgtccccggctcgtatggcaggtaacggtggtgacgctgctctggcgctgctactgctggacaggctgaaccagctggagtcgaagatgagtggtaaaggccaacagcagcagggccagaccgttaccaaaaagagcgcagctgaagcatctaaaaaaccgcgacagaaacgtaccgcgactaaagcgtacaatgtaacacaggccttcggtcgtcgaggtccggagcaaactcaaggaaactttggcgatcaggaattaatccgccaggggaccgactacaaacactggccgcaaattgcccagttcgccccatccgctagtgcattcttcggtatgagccgcatcggcatggaagtaacgccaagtggtacgtggctgacctacaccggtgctatcaagcttgatgacaaggacccgaactttaaagaccaggttattctgcttaacaaacatattgatgcctataaaactttcccgccgaccgaacccaaaaaggacaaaaagaaaaaagctgatgaaacccaggctctaccgcagcgtcagaaaaaacagcaaactgtgactctgctgccagctgcggacctggatgatttttccaagcagctgcaacagtctatgagctctgcggactctacgcaggcttaa

SEQ ID NO: 97 - DNA, 2016 bp, Artificial Sequence
  Description of Artificial Sequence: Synthetic polynucleotide
atgcaccatcatcaccatcatggtggttctggttcgccgatacttggttattggaagattaaaggactggttcagcccacacgcctcctgctagaatacttagaggaaaaatatgaagagcacctgtacgaacgtgatgagggggacaaatggcgaaacaagaaatttgaattgggcttagaatttccaaatttgccgtattatatcgatggcgacgtaaaactgacccaatcaatggccattattcgctacatcgcagataaacataacatgctgggtggctgccctaaagaacgggctgagatctccatgctggaaggtgcggtgctcgacattcgctacggcgtcagtagaattgcgtatagcaaggatttcgaaactttaaaagtggatttcctgagcaaacttccggagatgctgaaaatgtttgaggataggctttgtcataagacgtatctcaatggtgatcatgttacccacccggactttatgctgtacgacgcccttgatgtcgttctgtatatggatcccatgtgcctggacgccttcccgaaattagtgtgttttaaaaaacgtatcgaagcgattccacagatcgataaatacttgaagtcttctaaatatattgcttggcctctgcaaggctggcaggcaacgttcggtgggggagatcatccgccaaaatcagatctggtgccgcgtgggagccctggcatacaccgcgacggtggttctggtgagaacctgtactttcaaagctcagataatgggcctcaaaaccagcgcaacgctccacgtataaccttcggtggcccgtctgactccacaggcagcaaccagaatggtgagcgtagtggagccaggtctaagcagcgccgtccccagggtctgccgaacaacacggcgagctggtttactgcgcttacccaacacggtaaagaagacttaaaattcccgcgtggccagggcgtcccgatcaacactaactcttccccggatgatcagattggttattaccgcagagcaactcgtcggattcgcggcggcgacggtaaaatgaaagatttgtctccgcgttggtacttttactatctcggcaccggtccggaagctggactgccctacggggcaaacaaggacgggatcatttgggtggctaccgaaggtgccctgaatactccaaaagatcatatcggcacccgtaaccctaataataacgctgcgatcgttctgcaactgcctcagggtacaactctgccaaaaggcttctatgcagaagggtcgcgtggtggcagccaggcgagtagccgtagcagctcccgctctcgcaactcgtcccgtaactccactccgggctcttctcgcggcacgtccccggctcgtatggcaggtaacggtggtgacgctgctctggcgctgctactgctggacaggctgaaccagctggagtcgaagatgagtggtaaaggccaacagcagcagggccagaccgttaccaaaaagagcgcagctgaagcatctaaaaaaccgcgacagaaacgtaccgcgactaaagcgtacaatgtaacacaggccttcggtcgtcgaggtccggagcaaactcaaggaaactttggcgatcaggaattaatccgccaggggaccgactacaaacactggccgcaaattgcccagttcgccccatccgctagtgcattcttcggtatgagccgcatcggcatggaagtaacgccaagtggtacgtggctgacctacaccggtgctatcaagcttgatgacaaggacccgaactttaaagaccaggttattctgcttaacaaacatattgatgcctataaaactttcccgccgaccgaacccaaaaaggacaaaaagaaaaaagctgatgaaacccaggctctaccgcagcgtcagaaaaaacagcaaactgtgactctgctgccagctgcggacctggatgatttttccaagcagctgcaacagtctatgagctctgcggactctacgcaggcttaa

SEQ ID NO: 98 - DNA, 2016 bp, Artificial Sequence
  Description of Artificial Sequence: Synthetic polynucleotide
atgcaccatcatcaccatcatggtggttctggttcgccgatacttggttattggaagattaaaggactggttcagcccacacgcctcctgctagaatacttagaggaaaaatatgaagagcacctgtacgaacgtgatgagggggacaaatggcgaaacaagaaatttgaattgggcttagaatttccaaatttgccgtattatatcgatggcgacgtaaaactgacccaatcaatggccattattcgctacatcgcagataaacataacatgctgggtggctgccctaaagaacgggctgagatctccatgctggaaggtgcggtgctcgacattcgctacggcgtcagtagaattgcgtatagcaaggatttcgaaactttaaaagtggatttcctgagcaaacttccggagatgctgaaaatgtttgaggataggctttgtcataagacgtatctcaatggtgatcatgttacccacccggactttatgctgtacgacgcccttgatgtcgttctgtatatggatcccatgtgcctggacgccttcccgaaattagtgtgttttaaaaaacgtatcgaagcgattccacagatcgataaatacttgaagtcttctaaatatattgcttggcctctgcaaggctggcaggcaacgttcggtgggggagatcatccgccaaaatcagatctggtgccgcgtgggagccctggcatacaccgcgacggtggttctggtgagaacctgtactttcaaagctcagataatgggcctcaaaaccagcgcaacgctccacgtataaccttcggtggcccgtctgactccacaggcagcaaccagaatggtgagcgtagtggagccaggtctaagcagcgccgtccccagggtctgccgaacaacacggcgagctggtttactgcgcttacccaacacggtaaagaagacttaaaattcccgcgtggccagggcgtcccgatcaacactaactcttccccggatgatcagattggttattaccgcagagcaactcgtcggattcgcggcggcgacggtaaaatgaaagatttgtctccgcgttggtacttttactatctcggcaccggtccggaagctggactgccctacggggcaaacaaggacgggatcatttgggtggctagtgaaggtgccctgaatactccaaaagatcatatcggcacccgtaaccctgctaataacgctgcgatcgttctgcaactgcctcagggtacaactctgccaaaaggcttctatgcagaagggtcgcgtggtggcagccaggcgagtagccgtagcagctcccgctctcgcaactcgtcccgtaactccactccgggctcttctcgcggcacgtccccggctcgtatggcaggtaacggtggtgacgctgctctggcgctgctactgctggacaggctgaaccagctggagtcgaagatgagtggtaaaggccaacagcagcagggccagaccgttaccaaaaagagcgcagctgaagcatctaaaaaaccgcgacagaaacgtaccgcgactaaagcgtacaatgtaacacaggccttcggtcgtcgaggtccggagcaaactcaaggaaactttggcgatcaggaattaatccgccaggggaccgactacaaacactggccgcaaattgcccagttcgccccatccgctagtgcattcttcggtatgagccgcatcggcatggaagtaacgccaagtggtacgtggctgacctacaccggtgctatcaagcttgatgacaaggacccgaactttaaagaccaggttattctgcttaacaaacatattgatgcctataaaactttcccgccgaccgaacccaaaaaggacaaaaagaaaaaagctgatgaaacccaggctctaccgcagcgtcagaaaaaacagcaaactgtgactctgctgccagctgcggacctggatgatttttccaagcagctgcaacagtctatgagctctgcggactctacgcaggcttaa

SEQ ID NO: 99 - DNA, 2016 bp, Artificial Sequence
  Description of Artificial Sequence: Synthetic polynucleotide
atgcaccatcatcaccatcatggtggttctggttcgccgatacttggttattggaagattaaaggactggttcagcccacacgcctcctgctagaatacttagaggaaaaatatgaagagcacctgtacgaacgtgatgagggggacaaatggcgaaacaagaaatttgaattgggcttagaatttccaaatttgccgtattatatcgatggcgacgtaaaactgacccaatcaatggccattattcgctacatcgcagataaacataacatgctgggtggctgccctaaagaacgggctgagatctccatgctggaaggtgcggtgctcgacattcgctacggcgtcagtagaattgcgtatagcaaggatttcgaaactttaaaagtggatttcctgagcaaacttccggagatgctgaaaatgtttgaggataggctttgtcataagacgtatctcaatggtgatcatgttacccacccggactttatgctgtacgacgcccttgatgtcgttctgtatatggatcccatgtgcctggacgccttcccgaaattagtgtgttttaaaaaacgtatcgaagcgattccacagatcgataaatacttgaagtcttctaaatatattgcttggcctctgcaaggctggcaggcaacgttcggtgggggagatcatccgccaaaatcagatctggtgccgcgtgggagccctggcatacaccgcgacggtggttctggtgagaacctgtactttcaaagctcagataatgggcctcaaaaccagcgcaacgctccacgtataaccttcggtggcccgtctgactccacaggcagcaaccagaatggtgagcgtagtggagccaggtctaagcagcgccgtccccagggtctgccgaacaacacggcgagctggtttactgcgcttacccaacacggtaaagaagacttaaaattcccgcgtggccagggcgtcccgatcaacactaactcttccccggatgatcagattggttattaccgcagagcaactcgtcggattcgcggcggcgacggtaaaatgaaagatttgtctccgcgttggtacttttactatctcggcaccggtccggaagctggactgccctacggggcaaacaaggacgggatcatttgggtggctaccgaaggtgccctgaatactccaaaagatcatatcggcacccgtaaccctgctaataacgctgcgatcgttctgcaactgcctcagggtacaactctgccaaaaggcttctatgcagaagggtcgcgtggtggcagccaggcgagtagccgtagcagctcccgctctcgcaactcgtcccgtaactccactccgggctcttctcgcggcacgtccccggctcgtatggcaggtaacggtggtgacgctgctctggcgctgctactgctggacaggctgaaccagctggagtcgaagatgagtggtaaaggccaacagcagcagggccagaccgttaccaaaaagagcgcagctgaagcatctaaaaaaccgcgacagaaacgtaccgcgactaaagcgtacaatgtaacacaggccttcggtcgtcgaggtccggagcaaactcaaggaaactttggcgatcaggaattaatccgccaggggaccgactacaaacactggccgcaaattgcccagttcgccccatccgctagtgcattcttcggtatgagccgcatcggcagtgaagtaacgccaagtggtacgtggctgacctacaccggtgctatcaagcttgatgacaaggacccgaactttaaagaccaggttattctgcttaacaaacatattgatgcctataaaactttcccgccgaccgaacccaaaaaggacaaaaagaaaaaagctgatgaaacccaggctctaccgcagcgtcagaaaaaacagcaaactgtgactctgctgccagctgcggacctggatgatttttccaagcagctgcaacagtctatgagctctgcggactctacgcaggcttaa

SEQ ID NO: 100 - DNA, 2016 bp, Artificial Sequence
  Description of Artificial Sequence: Synthetic polynucleotide
atgcaccatcatcaccatcatggtggttctggttcgccgatacttggttattggaagattaaaggactggttcagcccacacgcctcctgctagaatacttagaggaaaaatatgaagagcacctgtacgaacgtgatgagggggacaaatggcgaaacaagaaatttgaattgggcttagaatttccaaatttgccgtattatatcgatggcgacgtaaaactgacccaatcaatggccattattcgctacatcgcagataaacataacatgctgggtggctgccctaaagaacgggctgagatctccatgctggaaggtgcggtgctcgacattcgctacggcgtcagtagaattgcgtatagcaaggatttcgaaactttaaaagtggatttcctgagcaaacttccggagatgctgaaaatgtttgaggataggctttgtcataagacgtatctcaatggtgatcatgttacccacccggactttatgctgtacgacgcccttgatgtcgttctgtatatggatcccatgtgcctggacgccttcccgaaattagtgtgttttaaaaaacgtatcgaagcgattccacagatcgataaatacttgaagtcttctaaatatattgcttggcctctgcaaggctggcaggcaacgttcggtgggggagatcatccgccaaaatcagatctggtgccgcgtgggagccctggcatacaccgcgacggtggttctggtgagaacctgtactttcaaagctcagataatgggcctcaaaaccagcgcaacgctccacgtataaccttcggtggcccgtctgactccacaggcagcaaccagaatggtgagcgtagtggagccaggtctaagcagcgccgtccccagggtctgccgaacaacacggcgagctggtttactccgcttacccaatttggtaaagaagacttaaaattcccgccaggccagggcgtcccgatcaacactaactcttccccggatgatcagattggttattaccgcagagcaactcgtcggattcgcggcggcgacggtaaaatgaaagatttgcctccgaagtggtacttttactatctcggcaccggtccgcatgctgatctgccctacgggcacaaacatgacggggtagtgtgggtggctcgaccaggtgccctgaatactccaaaagatcatatcggcacccgtaaccctgctaataacgctgcgatcccgctgcaactgcctccaggtacaaaactgccaaaaggcttctatgcagaagggtcgcgtggtggcagccaggcgagtagccgtagcagctcccgctctcgcaactcgtcccgtaactccactccgggctcttctcgcggcacgtccccggctcgtatggcaggtaacggtggtgacgctgctctggcgctgctactgctggacaggctgaaccagctggagtcgaagatgagtggtaaaggccaacagcagcagggccagaccgttaccaaaaagagcgcagctgaagcatctaaaaaaccgcgacagaaacgtaccgcgactaaagcgtacaatgtaacacaggccttcggtcgtcgaggtccggagcaaactcaaggaaactttggcgatcaggaattaatccgccaggggaccgactacaaacactggccgcaaattgcccagttcgccccatccgctagtgcattcttcggtatgagccgcatcggcatggaagtaacgccaagtggtacgtggctgacctacaccggtgctatcaagcttgatgacaaggacccgaactttaaagaccaggttattctgcttaacaaacatattgatgcctataaaactttcccgccgaccgaacccaaaaaggacaaaaagaaaaaagctgatgaaacccaggctctaccgcagcgtcagaaaaaacagcaaactgtgactctgctgccagctgcggacctggatgatttttccaagcagctgcaacagtctatgagctctgcggactctacgcaggcttaa

SEQ ID NO: 101 - DNA, 2016 bp, Artificial Sequence
  Description of Artificial Sequence: Synthetic polynucleotide
atgcaccatcatcaccatcatggtggttctggttcgccgatacttggttattggaagattaaaggactggttcagcccacacgcctcctgctagaatacttagaggaaaaatatgaagagcacctgtacgaacgtgatgagggggacaaatggcgaaacaagaaatttgaattgggcttagaatttccaaatttgccgtattatatcgatggcgacgtaaaactgacccaatcaatggccattattcgctacatcgcagataaacataacatgctgggtggctgccctaaagaacgggctgagatctccatgctggaaggtgcggtgctcgacattcgctacggcgtcagtagaattgcgtatagcaaggatttcgaaactttaaaagtggatttcctgagcaaacttccggagatgctgaaaatgtttgaggataggctttgtcataagacgtatctcaatggtgatcatgttacccacccggactttatgctgtacgacgcccttgatgtcgttctgtatatggatcccatgtgcctggacgccttcccgaaattagtgtgttttaaaaaacgtatcgaagcgattccacagatcgataaatacttgaagtcttctaaatatattgcttggcctctgcaaggctggcaggcaacgttcggtgggggagatcatccgccaaaatcagatctggtgccgcgtgggagccctggcatacaccgcgacggtggttctggtgagaacctgtactttcaaagctcagataatgggcctcaaaaccagcgcaacgctccacgtataaccttcggtggcccgtctgactccacaggcagcaaccagaatggtgagcgtagtggagccaggtctaagcagcgccgtccccagggtctgccgaacaacacggcgagctggtttactgcgcttacccaacacggtaaagaagacttaaaattcccgcgtggccagggcgtcccgatcaacactaactcttccccggatgatcagattggttattaccgcagagcaactcgtcggattcgcggcggcgacggtaaaatgaaagatttgtctccgtcgtggtacttttactatctcggcaccggtccggaagctggactgccctacggggcaaacaaggacgggatcatttgggtggctaccgaaggtgccctgaatactccaaaagatcatatcggcacccgtaaccctgctaataacgctgcgatcgttctgcaactgcctcagggtacaactctgccaaaaggcttctatgcagaagggtcgcgtggtggcagccaggcgagtagccgtagcagctcccgctctcgcaactcgtcccgtaactccactccgggctcttctcgcggcacgtccccggctcgtatggcaggtaacggtggtgacgctgctctggcgctgctactgctggacaggctgaaccagctggagtcgaagatgagtggtaaaggccaacagcagcagggccagaccgttaccaaaaagagcgcagctgaagcatctaaaaaaccgcgacagaaacgtaccgcgactaaagcgtacaatgtaacacaggccttcggtcgtcgaggtccggagcaaactcaaggaaactttggcgatcaggaattaatccgccaggggaccgactacaaacactggccgcaaattgcccagttcgccccatccgctagtgcattcttcggtatgagccgcatcggcatggaagtaacgccaagtggtacgtggctgacctacaccggtgctatcaagcttgatgacaaggacccgaactttaaagaccaggttattctgcttaacaaacatattgatgcctataaaactttcccgccgaccgaacccaaaaaggacaaaaagaaaaaagctgatgaaacccaggctctaccgcagcgtcagaaaaaacagcaaactgtgactctgctgccagctgcggacctggatgatttttccaagcagctgcaacagtctatgagctctgcggactctacgcaggcttaa

SEQ ID NO: 102 - DNA, 2016 bp, Artificial Sequence
  Description of Artificial Sequence: Synthetic polynucleotide
atgcaccatcatcaccatcatggtggttctggttcgccgatacttggttattggaagattaaaggactggttcagcccacacgcctcctgctagaatacttagaggaaaaatatgaagagcacctgtacgaacgtgatgagggggacaaatggcgaaacaagaaatttgaattgggcttagaatttccaaatttgccgtattatatcgatggcgacgtaaaactgacccaatcaatggccattattcgctacatcgcagataaacataacatgctgggtggctgccctaaagaacgggctgagatctccatgctggaaggtgcggtgctcgacattcgctacggcgtcagtagaattgcgtatagcaaggatttcgaaactttaaaagtggatttcctgagcaaacttccggagatgctgaaaatgtttgaggataggctttgtcataagacgtatctcaatggtgatcatgttacccacccggactttatgctgtacgacgcccttgatgtcgttctgtatatggatcccatgtgcctggacgccttcccgaaattagtgtgttttaaaaaacgtatcgaagcgattccacagatcgataaatacttgaagtcttctaaatatattgcttggcctctgcaaggctggcaggcaacgttcggtgggggagatcatccgccaaaatcagatctggtgccgcgtgggagccctggcatacaccgcgacggtggttctggtgagaacctgtactttcaaagctcagataatgggcctcaaaaccagcgcaacgctccacgtataaccttcggtggcccgtctgactccacaggcagcaaccagaatggtgagcgtagtggagccaggtctaagcagcgccgtccccagggtctgccgaacaacacggcgagctggtttactgcgcttacccaacacggtaaagaagacttaaaattcccgcgtggccagggcgtcccgatcaacactaactcttccccggatgatcagattggttattaccgcagagcaactcgtcggattcgcggcggcgacggtaaaatgaaagatttgtctccgcgttggtacttttactatctcggcaccggtccggaagctggactgccctacggggcaaacaaggacgggatcatttgggtggctaccaatggtgccctgaatactccaaaagatcatatcggcacccgtaaccctgctaataacgctgcgatcgttctgcaactgcctcagggtacaactctgccaaaaggcttctatgcagaagggtcgcgtggtggcagccaggcgagtagccgtagcagctcccgctctcgcaactcgtcccgtaactccactccgggctcttctcgcggcacgtccccggctcgtatggcaggtaacggtggtgacgctgctctggcgctgctactgctggacaggctgaaccagctggagtcgaagatgagtggtaaaggccaacagcagcagggccagaccgttaccaaaaagagcgcagctgaagcatctaaaaaaccgcgacagaaacgtaccgcgactaaagcgtacaatgtaacacaggccttcggtcgtcgaggtccggagcaaactcaaggaaactttggcgatcaggaattaatccgccaggggaccgactacaaacactggccgcaaattgcccagttcgccccatccgctagtgcattcttcggtatgagccgcatcggcatggaagtaacgccaagtggtacgtggctgacctacaccggtgctatcaagcttgatgacaaggacccgaactttaaagaccaggttattctgcttaacaaacatattgatgcctataaaactttcccgccgaccgaacccaaaaaggacaaaaagaaaaaagctgatgaaacccaggctctaccgcagcgtcagaaaaaacagcaaactgtgactctgctgccagctgcggacctggatgatttttccaagcagctgcaacagtctatgagctctgcggactctacgcaggcttaa

SEQ ID NO: 103 - DNA, 2016 bp, Artificial Sequence
  Description of Artificial Sequence: Synthetic polynucleotide
atgcaccatcatcaccatcatggtggttctggttcgccgatacttggttattggaagattaaaggactggttcagcccacacgcctcctgctagaatacttagaggaaaaatatgaagagcacctgtacgaacgtgatgagggggacaaatggcgaaacaagaaatttgaattgggcttagaatttccaaatttgccgtattatatcgatggcgacgtaaaactgacccaatcaatggccattattcgctacatcgcagataaacataacatgctgggtggctgccctaaagaacgggctgagatctccatgctggaaggtgcggtgctcgacattcgctacggcgtcagtagaattgcgtatagcaaggatttcgaaactttaaaagtggatttcctgagcaaacttccggagatgctgaaaatgtttgaggataggctttgtcataagacgtatctcaatggtgatcatgttacccacccggactttatgctgtacgacgcccttgatgtcgttctgtatatggatcccatgtgcctggacgccttcccgaaattagtgtgttttaaaaaacgtatcgaagcgattccacagatcgataaatacttgaagtcttctaaatatattgcttggcctctgcaaggctggcaggcaacgttcggtgggggagatcatccgccaaaatcagatctggtgccgcgtgggagccctggcatacaccgcgacggtggttctggtgagaacctgtactttcaaagctcagataatgggcctcaaaaccagcgcaacgctccacgtataaccttcggtggcccgtctgactccacaggcagcaaccagaatggtgagcgtagtggagccaggtctaagcagcgccgtccccagggtctgccgaacaacacggcgagctggtttactgcgcttacccaacacggtaaagaagacttaaaattcccgcgtggccagggcgtcccgatcaacactaactcttccccggatgatcagattggttattaccgcagagcaactcgtcggattcgcggcggcgacggtaaaatgaaagatttgtctccgcgttggtacttttactatctcggcaccggtccggaagctggactgccctacggggcaaacaaggacgggatcatttgggtggctaaagaaggtgccctgaatactccaaaagatcatatcggcacccgtaaccctgctaataacgctgcgatcgttctgcaactgcctcagggtacaactctgccaaaaggcttctatgcagaagggtcgcgtggtggcagccaggcgagtagccgtagcagctcccgctctcgcaactcgtcccgtaactccactccgggctcttctcgcggcacgtccccggctcgtatggcaggtaacggtggtgacgctgctctggcgctgctactgctggacaggctgaaccagctggagtcgaagatgagtggtaaaggccaacagcagcagggccagaccgttaccaaaaagagcgcagctgaagcatctaaaaaaccgcgacagaaacgtaccgcgactaaagcgtacaatgtaacacaggccttcggtcgtcgaggtccggagcaaactcaaggaaactttggcgatcaggaattaatccgccaggggaccgactacaaacactggccgcaaattgcccagttcgccccatccgctagtgcattcttcggtatgagccgcatcggcatggaagtaacgccaagtggtacgtggctgacctacaccggtgctatcaagcttgatgacaaggacccgaactttaaagaccaggttattctgcttaacaaacatattgatgcctataaaactttcccgccgaccgaacccaaaaaggacaaaaagaaaaaagctgatgaaacccaggctctaccgcagcgtcagaaaaaacagcaaactgtgactctgctgccagctgcggacctggatgatttttccaagcagctgcaacagtctatgagctctgcggactctacgcaggcttaa

SEQ ID NO: 104 - DNA, 2016 bp, Artificial Sequence
  Description of Artificial Sequence: Synthetic polynucleotide
atgcaccatcatcaccatcatggtggttctggttcgccgatacttggttattggaagattaaaggactggttcagcccacacgcctcctgctagaatacttagaggaaaaatatgaagagcacctgtacgaacgtgatgagggggacaaatggcgaaacaagaaatttgaattgggcttagaatttccaaatttgccgtattatatcgatggcgacgtaaaactgacccaatcaatggccattattcgctacatcgcagataaacataacatgctgggtggctgccctaaagaacgggctgagatctccatgctggaaggtgcggtgctcgacattcgctacggcgtcagtagaattgcgtatagcaaggatttcgaaactttaaaagtggatttcctgagcaaacttccggagatgctgaaaatgtttgaggataggctttgtcataagacgtatctcaatggtgatcatgttacccacccggactttatgctgtacgacgcccttgatgtcgttctgtatatggatcccatgtgcctggacgccttcccgaaattagtgtgttttaaaaaacgtatcgaagcgattccacagatcgataaatacttgaagtcttctaaatatattgcttggcctctgcaaggctggcaggcaacgttcggtgggggagatcatccgccaaaatcagatctggtgccgcgtgggagccctggcatacaccgcgacggtggttctggtgagaacctgtactttcaaagctcagataatgggcctcaaaaccagcgcaacgctccacgtataaccttcggtggcccgtctgactccacaggcagcaaccagaatggtgagcgtagtggagccaggtctaagcagcgccgtccccagggtctgccgaacaacacggcgagctggtttactgcgcttacccaacacggtaaagaagacttaaaattcccgcgtggccagggcgtcccgatcaacactaactcttccccggatgatcagattggttattaccgcagagcaactcgtcggattcgcggcggcgacggtaaaatgaaagatttgtctccgcgttggtacttttactatctcggcaccggtccggaagctggactgccctacggggcaaacaaggacgggatcatttgggtggctaccgaaggtgccctgaatactccaaaagatcatatcggcacccgtaaccctgctaataacgctgcgatcgttctgcaactgcctcagggtacaactctgccaaaaggcttctatgcagaagggtcgcgtggtggcagccaggcgagtagccgtagcagctcccgctctcgcaactcgtcccgtaactccactccgggctcttctcgcggcacgtccccggctcgtatggcaggtaacggtggtgacgctgctctggcgctgctactgctggacaggctgaaccagctggagtcgaagatgagtggtaaaggccaacagcagcagggccagaccgttaccaaaaagagcgcagctgaagcatctaaaaaaccgcgacagaaacgtaccgcgactaaagcgtacaatgtaacacaggccttcggtcgtcgaggtccggagcaaactcaaggaaactttggcgatcaggaattaatccgccaggggaccgactacaaacactggccgcaaattgcccagttcgtgccatccgctagtgcattcttcggtatgagccgcatcggcatggaagtaacgccaagtggtacgtggctgacctacaccggtgctatcaagcttgatgacaaggacccgaactttaaagaccaggttattctgcttaacaaacatattgatgcctataaaactttcccgccgaccgaacccaaaaaggacaaaaagaaaaaagctgatgaaacccaggctctaccgcagcgtcagaaaaaacagcaaactgtgactctgctgccagctgcggacctggatgatttttccaagcagctgcaacagtctatgagctctgcggactctacgcaggcttaa

SEQ ID NO: 105 - DNA, 2016 bp, Artificial Sequence
  Description of Artificial Sequence: Synthetic polynucleotide
atgcaccatcatcaccatcatggtggttctggttcgccgatacttggttattggaagattaaaggactggttcagcccacacgcctcctgctagaatacttagaggaaaaatatgaagagcacctgtacgaacgtgatgagggggacaaatggcgaaacaagaaatttgaattgggcttagaatttccaaatttgccgtattatatcgatggcgacgtaaaactgacccaatcaatggccattattcgctacatcgcagataaacataacatgctgggtggctgccctaaagaacgggctgagatctccatgctggaaggtgcggtgctcgacattcgctacggcgtcagtagaattgcgtatagcaaggatttcgaaactttaaaagtggatttcctgagcaaacttccggagatgctgaaaatgtttgaggataggctttgtcataagacgtatctcaatggtgatcatgttacccacccggactttatgctgtacgacgcccttgatgtcgttctgtatatggatcccatgtgcctggacgccttcccgaaattagtgtgttttaaaaaacgtatcgaagcgattccacagatcgataaatacttgaagtcttctaaatatattgcttggcctctgcaaggctggcaggcaacgttcggtgggggagatcatccgccaaaatcagatctggtgccgcgtgggagccctggcatacaccgcgacggtggttctggtgagaacctgtactttcaaagctcagataatgggcctcaaaaccagcgcaacgctccacgtataaccttcggtggcccgtctgactccacaggcagcaaccagaatggtgagcgtagtggagccaggtctaagcagcgccgtccccagggtctgccgaacaacacggcgagctggtttactgcgcttacccaacacggtaaagaagacttaaaattcccgcgtggccagggcgtcccgatcaacactaactcttccccggatgatcagattggttattaccgcagagcaactcgtcggattcgcggcggcgacggtaaaatgaaagatttgtctccgcgttggtacttttactatctcggcaccggtccggaagctggactgccctacggggcaaacaaggacgggatcatttgggtggctaccgaaggtgccctgaatactccaaaagatcatatcggcacccgtaaccctgctaataacgctgcgatcgttctgcaactgcctcagggtacaactctgccaaaaggcttctatgcagaagggtcgcgtggtggcagccaggcgagtagccgtagcagctcccgctctcgcaactcgtcccgtaactccactccgggctcttctcgcggcacgtccccggctcgtatggcaggtaacggtggtgacgctgctctggcgctgctactgctggacaggctgaaccagctggagtcgaagatgagtggtaaaggccaacagcagcagggccagaccgttaccaaaaagagcgcagctgaagcatctaaaaaaccgcgacagaaacgtaccgcgactaaagggtacaatgtaacacaggccttcggtcgtcgaggtccggagcaaactcaaggaaactttggcgatcaggatttaaataaacttgggaccgactacaaacactggccgcaaattgcccagttcgccccatccgctagtgcattcttcggtatgagccgcatcggcatggaagaaacgccaagtggtacgtggctgacctacaccggtgctatcaagcttgataaaaaggacccgaactttaaagaccaggttattctgcttaacaaacatattgatgcctataaaactttcccgccgaccgaacccaaaaaggacaaaaagaaaaaagctgatgaaacccaggctctaccgcagcgtcagaaaaaacagcaaactgtgactctgctgccagctgcggacctggatgatttttccaagcagctgcaacagtctatgagctctgcggactctacgcaggcttaa

SEQ ID NO: 106 - DNA, 2016 bp, Artificial Sequence
  Description of Artificial Sequence: Synthetic polynucleotide
atgcaccatcatcaccatcatggtggttctggttcgccgatacttggttattggaagattaaaggactggttcagcccacacgcctcctgctagaatacttagaggaaaaatatgaagagcacctgtacgaacgtgatgagggggacaaatggcgaaacaagaaatttgaattgggcttagaatttccaaatttgccgtattatatcgatggcgacgtaaaactgacccaatcaatggccattattcgctacatcgcagataaacataacatgctgggtggctgccctaaagaacgggctgagatctccatgctggaaggtgcggtgctcgacattcgctacggcgtcagtagaattgcgtatagcaaggatttcgaaactttaaaagtggatttcctgagcaaacttccggagatgctgaaaatgtttgaggataggctttgtcataagacgtatctcaatggtgatcatgttacccacccggactttatgctgtacgacgcccttgatgtcgttctgtatatggatcccatgtgcctggacgccttcccgaaattagtgtgttttaaaaaacgtatcgaagcgattccacagatcgataaatacttgaagtcttctaaatatattgcttggcctctgcaaggctggcaggcaacgttcggtgggggagatcatccgccaaaatcagatctggtgccgcgtgggagccctggcatacaccgcgacggtggttctggtgagaacctgtactttcaaagctcagataatgggcctcaaaaccagcgcaacgctccacgtataaccttcggtggcccgtctgactccacaggcagcaaccagaatggtgagcgtagtggagccaggtctaagcagcgccgtccccagggtctgccgaacaacacggcgagctggtttactgcgcttacccaacacggtaaagaagacttaaaattcccgcgtggccagggcgtcccgatcaacactaactcttccccggatgatcagattggttattaccgcagagcaactcgtcggattcgcggcggcgacggtaaaatgaaagatttgtctccgcgttggtacttttactatctcggcaccggtccggaagctggactgccctacggggcaaacaaggacgggatcatttgggtggctaccgaaggtgccctgaatactccaaaagatcatatcggcacccgtaaccctgctaataacgctgcgatcgttctgcaactgcctcagggtacaactctgccaaaaggcttctatgcagaagggtcgcgtggtggcagccaggcgagtagccgtagcagctcccgctctcgcaactcgtcccgtaactccactccgggctcttctcgcggcacgtccccggctcgtatggcaggtaacggtggtgacgctgctctggcgctgctactgctggacaggctgaaccagctggagtcgaagatgagtggtaaaggccaacagcagcagggccagaccgttaccaaaaagagcgcagctgaagcatctaaaaaaccgcgacagaaacgtaccgcgactaaagcgtacaatgtaacacaggccttcggtcgtcgaggtccgcaacaaactcaaggaaactttggcgatcaggaattaatccgccaggggaccgactacaaacactggccgcaaattgcccagttcgccccatccgctagtgcattcttcggtatgagccgcatcggcatggaagtaacgccaagtggtacgtggctgacctacaccggtgctatcaagcttgatgacaaggacccgaactttaaagaccaggttattctgcttaacaaacatattgatgcctataaaactttcccgccgaccgaacccaaaaaggacaaaaagaaaaaagctgatgaaacccaggctctaccgcagcgtcagaaaaaacagcaaactgtgactctgctgccagctgcggacctggatgatttttccaagcagctgcaacagtctatgagctctgcggactctacgcaggcttaa

SEQ ID NO: 107 - DNA, 2016 bp, Artificial Sequence
  Description of Artificial Sequence: Synthetic polynucleotide
atgcaccatcatcaccatcatggtggttctggttcgccgatacttggttattggaagattaaaggactggttcagcccacacgcctcctgctagaatacttagaggaaaaatatgaagagcacctgtacgaacgtgatgagggggacaaatggcgaaacaagaaatttgaattgggcttagaatttccaaatttgccgtattatatcgatggcgacgtaaaactgacccaatcaatggccattattcgctacatcgcagataaacataacatgctgggtggctgccctaaagaacgggctgagatctccatgctggaaggtgcggtgctcgacattcgctacggcgtcagtagaattgcgtatagcaaggatttcgaaactttaaaagtggatttcctgagcaaacttccggagatgctgaaaatgtttgaggataggctttgtcataagacgtatctcaatggtgatcatgttacccacccggactttatgctgtacgacgcccttgatgtcgttctgtatatggatcccatgtgcctggacgccttcccgaaattagtgtgttttaaaaaacgtatcgaagcgattccacagatcgataaatacttgaagtcttctaaatatattgcttggcctctgcaaggctggcaggcaacgttcggtgggggagatcatccgccaaaatcagatctggtgccgcgtgggagccctggcatacaccgcgacggtggttctggtgagaacctgtactttcaaagctcagataatgggcctcaaaaccagcgcaacgctccacgtataaccttcggtggcccgtctgactccacaggcagcaaccagaatggtgagcgtagtggagccaggtctaagcagcgccgtccccagggtctgccgaacaacacggcgagctggtttactgcgcttacccaacacggtaaagaagacttaaaattcccgcgtggccagggcgtcccgatcaacactaactcttccccggatgatcagattggttattaccgcagagcaactcgtcggattcgcggcggcgacggtaaaatgaaagatttgtctccgcgttggtacttttactatctcggcaccggtccggaagctggactgccctacggggcaaacaaggacgggatcatttgggtggctaccgaaggtgccctgaatactccaaaagatcatatcggcacccgtaaccctgctaataacgctgcgatcgttctgcaactgcctcagggtacaactctgccaaaaggcttctatgcagaagggtcgcgtggtggcagccaggcgagtagccgtagcagcgagcgctctcgcaactcgtcccgtaactccactccgggcgaatctcgcggcacggagccggctcgtatggcaggtaacggtggtgacgctgctctggcgctgctactgctggacaggctgaaccagctggagtcgaagatgagtggtaaaggccaacagcagcagggccagaccgttaccaaaaagagcgcagctgaagcatctaaaaaaccgcgacagaaacgtaccgcgactaaagcgtacaatgtaacacaggccttcggtcgtcgaggtccggagcaaactcaaggaaactttggcgatcaggaattaatccgccaggggaccgactacaaacactggccgcaaattgcccagttcgccccatccgctagtgcattcttcggtatgagccgcatcggcatggaagtaacgccaagtggtacgtggctgacctacaccggtgctatcaagcttgatgacaaggacccgaactttaaagaccaggttattctgcttaacaaacatattgatgcctataaaactttcccgccgaccgaacccaaaaaggacaaaaagaaaaaagctgatgaaacccaggctctaccgcagcgtcagaaaaaacagcaaactgtgactctgctgccagctgcggacctggatgatttttccaagcagctgcaacagtctatgagctctgcggactctacgcaggcttaa

SEQ ID NO: 108 - DNA, 2016 bp, Artificial Sequence
  Description of Artificial Sequence: Synthetic polynucleotide
atgcaccatcatcaccatcatggtggttctggttcgccgatacttggttattggaagattaaaggactggttcagcccacacgcctcctgctagaatacttagaggaaaaatatgaagagcacctgtacgaacgtgatgagggggacaaatggcgaaacaagaaatttgaattgggcttagaatttccaaatttgccgtattatatcgatggcgacgtaaaactgacccaatcaatggccattattcgctacatcgcagataaacataacatgctgggtggctgccctaaagaacgggctgagatctccatgctggaaggtgcggtgctcgacattcgctacggcgtcagtagaattgcgtatagcaaggatttcgaaactttaaaagtggatttcctgagcaaacttccggagatgctgaaaatgtttgaggataggctttgtcataagacgtatctcaatggtgatcatgttacccacccggactttatgctgtacgacgcccttgatgtcgttctgtatatggatcccatgtgcctggacgccttcccgaaattagtgtgttttaaaaaacgtatcgaagcgattccacagatcgataaatacttgaagtcttctaaatatattgcttggcctctgcaaggctggcaggcaacgttcggtgggggagatcatccgccaaaatcagatctggtgccgcgtgggagccctggcatacaccgcgacggtggttctggtgagaacctgtactttcaaagctcagataatgggcctcaaaaccagcgcaacgctccacgtataaccttcggtggcccgtctgactccacaggcagcaaccagaatggtgagcgtagtggagccaggtctaagcagcgccgtccccagggtctgccgaacaacacggcgagctggtttactgcgcttacccaacacggtaaagaagacttaaaattcccgcgtggccagggcgtcccgatcaacactaactcttccccggatgatcagattggttattaccgcagagcaactcgtcggattcgcggcggcgacggtaaaatgaaagatttgtctccgcgttggtacttttactatctcggcaccggtccggaagctggactgccctacgggcataacaaggacgggatcatttgggtggctaccgaaggtgccctgaatactccaaaagatcatatcggcacccgtaaccctgctaataacgctgcgatcgttctgcaactgcctcagggtacaactctgccaaaaggcttctatgcagaagggtcgcgtggtggcagccaggcgagtagccgtagcagctcccgctctcgcaactcgtcccgtaactccactccgggctcttctcgcggcacgtccccggctcgtatggcaggtaacggtggtgacgctgctctggcgctgctactgctggacaggctgaaccagctggagtcgaagatgagtggtaaaggccaacagcagcagggccagaccgttaccaaaaagagcgcagctgaagcatctaaaaaaccgcgacagaaacgtaccgcgactaaagcgtacaatgtaacacaggccttcggtcgtcgaggtccggagcaaactcaaggaaactttggcgatcaggaattaatccgccaggggaccgactacaaacactggccgcaaattgcccagttcgccccatccgctagtgcattcttcggtatgagccgcatcggcatggaagtaacgccaagtggtacgtggctgacctacaccggtgctatcaagcttgatgacaaggacccgaactttaaagaccaggttattctgcttaacaaacatattgatgcctataaaactttcccgccgaccgaacccaaaaaggacaaaaagaaaaaagctgatgaaacccaggctctaccgcagcgtcagaaaaaacagcaaactgtgactctgctgccagctgcggacctggatgatttttccaagcagctgcaacagtctatgagctctgcggactctacgcaggcttaa

SEQ ID NO: 109 - DNA, 2016 bp, Artificial Sequence
  Description of Artificial Sequence: Synthetic polynucleotide
atgcaccatcatcaccatcatggtggttctggttcgccgatacttggttattggaagattaaaggactggttcagcccacacgcctcctgctagaatacttagaggaaaaatatgaagagcacctgtacgaacgtgatgagggggacaaatggcgaaacaagaaatttgaattgggcttagaatttccaaatttgccgtattatatcgatggcgacgtaaaactgacccaatcaatggccattattcgctacatcgcagataaacataacatgctgggtggctgccctaaagaacgggctgagatctccatgctggaaggtgcggtgctcgacattcgctacggcgtcagtagaattgcgtatagcaaggatttcgaaactttaaaagtggatttcctgagcaaacttccggagatgctgaaaatgtttgaggataggctttgtcataagacgtatctcaatggtgatcatgttacccacccggactttatgctgtacgacgcccttgatgtcgttctgtatatggatcccatgtgcctggacgccttcccgaaattagtgtgttttaaaaaacgtatcgaagcgattccacagatcgataaatacttgaagtcttctaaatatattgcttggcctctgcaaggctggcaggcaacgttcggtgggggagatcatccgccaaaatcagatctggtgccgcgtgggagccctggcatacaccgcgacggtggttctggtgagaacctgtactttcaaagctcagataatgggcctcaaaaccagcgcaacgctccacgtataaccttcggtggcccgtctgactccacaggcagcaaccagaatggtgagcgtagtggagccaggtctaagcagcgccgtccccagggtctgccgaacaacacggcgagctggtttactgcgcttacccaacacggtaaagaagacttaaaattcccgcgtggccagggcgtcccgatcaacactaactcttccccggatgatcagattggttattaccgcagagcaactcgtcggattcgcggcggcgacggtaaaatgaaagatttgtctccgcgttggtacttttactatctcggcaccggtccggaagctggactgccctacggggcaaacaaggacgggatcatttgggtggctaccgaaggtgccctgaatactccaaaagatcatatcggcacccgtaaccctgctaataacgctgcgatcgttctgcaactgcctcagggtacaaaactgccaaaaggcttctatgcagaagggtcgcgtggtggcagccaggcgagtagccgtagcagctcccgctctcgcaactcgtcccgtaactccactccgggctcttctcgcggcacgtccccggctcgtatggcaggtaacggtggtgacgctgctctggcgctgctactgctggacaggctgaaccagctggagtcgaagatgagtggtaaaggccaacagcagcagggccagaccgttaccaaaaagagcgcagctgaagcatctaaaaaaccgcgacagaaacgtaccgcgactaaagcgtacaatgtaacacaggccttcggtcgtcgaggtccggagcaaactcaaggaaactttggcgatcaggaattaatccgccaggggaccgactacaaacactggccgcaaattgcccagttcgccccatccgctagtgcattcttcggtatgagccgcatcggcatggaagtaacgccaagtggtacgtggctgacctacaccggtgctatcaagcttgatgacaaggacccgaactttaaagaccaggttattctgcttaacaaacatattgatgcctataaaactttcccgccgaccgaacccaaaaaggacaaaaagaaaaaagctgatgaaacccaggctctaccgcagcgtcagaaaaaacagcaaactgtgactctgctgccagctgcggacctggatgatttttccaagcagctgcaacagtctatgagctctgcggactctacgcaggcttaa

SEQ ID NO: 110 - DNA, 2016 bp, Artificial Sequence
  Description of Artificial Sequence: Synthetic polynucleotide
atgcaccatcatcaccatcatggtggttctggttcgccgatacttggttattggaagattaaaggactggttcagcccacacgcctcctgctagaatacttagaggaaaaatatgaagagcacctgtacgaacgtgatgagggggacaaatggcgaaacaagaaatttgaattgggcttagaatttccaaatttgccgtattatatcgatggcgacgtaaaactgacccaatcaatggccattattcgctacatcgcagataaacataacatgctgggtggctgccctaaagaacgggctgagatctccatgctggaaggtgcggtgctcgacattcgctacggcgtcagtagaattgcgtatagcaaggatttcgaaactttaaaagtggatttcctgagcaaacttccggagatgctgaaaatgtttgaggataggctttgtcataagacgtatctcaatggtgatcatgttacccacccggactttatgctgtacgacgcccttgatgtcgttctgtatatggatcccatgtgcctggacgccttcccgaaattagtgtgttttaaaaaacgtatcgaagcgattccacagatcgataaatacttgaagtcttctaaatatattgcttggcctctgcaaggctggcaggcaacgttcggtgggggagatcatccgccaaaatcagatctggtgccgcgtgggagccctggcatacaccgcgacggtggttctggtgagaacctgtactttcaaagctcagataatgggcctcaaaaccagcgcaacgctccacgtataaccttcggtggcccgtctgactccacaggcagcaaccagaatggtgagcgtagtggagccaggtctaagcagcgccgtccccagggtctgccgaacaacacggcgagctggtttactgcgcttacccaacacggtaaagaagacttaaaattcccgcgtggccagggcgtcccgatcaacactaactcttccccggatgatcagattggttattaccgcagagcaactcgtcggattcgcggcggcgacggtaaaatgaaagatttgtctccgcgttggtacttttactatctcggcaccggtccggaagctggactgccctacggggcaaacaaggacgggatcatttgggtggctaccgaaggtgccctgaatactccaaaagatcatatcggcacccgtaaccctgctaataacgctgcgatcgatctgcaactgcctcagggtacaactctgccaaaaggcttctatgcagaagggtcgcgtggtggcagccaggcgagtagccgtagcagctcccgctctcgcaactcgtcccgtaactccactccgggctcttctcgcggcacgtccccggctcgtatggcaggtaacggtggtgacgctgctctggcgctgctactgctggacaggctgaaccagctggagtcgaagatgagtggtaaaggccaacagcagcagggccagaccgttaccaaaaagagcgcagctgaagcatctaaaaaaccgcgacagaaacgtaccgcgactaaagcgtacaatgtaacacaggccttcggtcgtcgaggtccggagcaaactcaaggaaactttggcgatcaggaattaatccgccaggggaccgactacaaacactggccgcaaattgcccagttcgccccatccgctagtgcattcttcggtatgagccgcatcggcatggaagtaacgccaagtggtacgtggctgacctacaccggtgctatcaagcttgatgacaaggacccgaactttaaagaccaggttattctgcttaacaaacatattgatgcctataaaactttcccgccgaccgaacccaaaaaggacaaaaagaaaaaagctgatgaaacccaggctctaccgcagcgtcagaaaaaacagcaaactgtgactctgctgccagctgcggacctggatgatttttccaagcagctgcaacagtctatgagctctgcggactctacgcaggcttaa

SEQ ID NO: 111 - DNA, 2016 bp, Artificial Sequence
  Description of Artificial Sequence: Synthetic polynucleotide
atgcaccatcatcaccatcatggtggttctggttcgccgatacttggttattggaagattaaaggactggttcagcccacacgcctcctgctagaatacttagaggaaaaatatgaagagcacctgtacgaacgtgatgagggggacaaatggcgaaacaagaaatttgaattgggcttagaatttccaaatttgccgtattatatcgatggcgacgtaaaactgacccaatcaatggccattattcgctacatcgcagataaacataacatgctgggtggctgccctaaagaacgggctgagatctccatgctggaaggtgcggtgctcgacattcgctacggcgtcagtagaattgcgtatagcaaggatttcgaaactttaaaagtggatttcctgagcaaacttccggagatgctgaaaatgtttgaggataggctttgtcataagacgtatctcaatggtgatcatgttacccacccggactttatgctgtacgacgcccttgatgtcgttctgtatatggatcccatgtgcctggacgccttcccgaaattagtgtgttttaaaaaacgtatcgaagcgattccacagatcgataaatacttgaagtcttctaaatatattgcttggcctctgcaaggctggcaggcaacgttcggtgggggagatcatccgccaaaatcagatctggtgccgcgtgggagccctggcatacaccgcgacggtggttctggtgagaacctgtactttcaaagctcagataatgggcctcaaaaccagcgcaacgctccacgtataaccttcggtggcccgtctgactccacaggcagcaaccagaatggtgagcgtagtggagccaggtctaagcagcgccgtccccagggtctgccgaacaacacggcgagctggtttactgcgcttacccaacacggtaaagaagacttaaaattcccgcgtggccagggcgtcccgatcaacactaactcttccccggatgatcagattggttattaccgcagagcagtacgtcggattcgcggcggcgacggtaaaatgaaagatttgtctccgcgttggtacttttactatctcggcaccggtccggaagctggactgccctacggggcaaacaaggacgggatcatttgggtggctaccgaaggtgccctgaatactccaaaagatcatatcggcacccgtaaccctgctaataacgctgcgatcgttctgcaactgcctcagggtacaactctgccaaaaggcttctatgcagaagggtcgcgtggtggcagccaggcgagtagccgtagcagctcccgctctcgcaactcgtcccgtaactccactccgggctcttctcgcggcacgtccccggctcgtatggcaggtaacggtggtgacgctgctctggcgctgctactgctggacaggctgaaccagctggagtcgaagatgagtggtaaaggccaacagcagcagggccagaccgttaccaaaaagagcgcagctgaagcatctaaaaaaccgcgacagaaacgtaccgcgactaaagcgtacaatgtaacacaggccttcggtcgtcgaggtccggagcaaactcaaggaaactttggcgatcaggaattaatccgccaggggaccgactacaaacactggccgcaaattgcccagttcgccccatccgctagtgcattcttcggtatgagccgcatcggcatggaagtaacgccaagtggtacgtggctgacctacaccggtgctatcaagcttgatgacaaggacccgaactttaaagaccaggttattctgcttaacaaacatattgatgcctataaaactttcccgccgaccgaacccaaaaaggacaaaaagaaaaaagctgatgaaacccaggctctaccgcagcgtcagaaaaaacagcaaactgtgactctgctgccagctgcggacctggatgatttttccaagcagctgcaacagtctatgagctctgcggactctacgcaggcttaa

SEQ ID NO: 112 - DNA, 2016 bp, Artificial Sequence
  Description of Artificial Sequence: Synthetic polynucleotide
atgcaccatcatcaccatcatggtggttctggttcgccgatacttggttattggaagattaaaggactggttcagcccacacgcctcctgctagaatacttagaggaaaaatatgaagagcacctgtacgaacgtgatgagggggacaaatggcgaaacaagaaatttgaattgggcttagaatttccaaatttgccgtattatatcgatggcgacgtaaaactgacccaatcaatggccattattcgctacatcgcagataaacataacatgctgggtggctgccctaaagaacgggctgagatctccatgctggaaggtgcggtgctcgacattcgctacggcgtcagtagaattgcgtatagcaaggatttcgaaactttaaaagtggatttcctgagcaaacttccggagatgctgaaaatgtttgaggataggctttgtcataagacgtatctcaatggtgatcatgttacccacccggactttatgctgtacgacgcccttgatgtcgttctgtatatggatcccatgtgcctggacgccttcccgaaattagtgtgttttaaaaaacgtatcgaagcgattccacagatcgataaatacttgaagtcttctaaatatattgcttggcctctgcaaggctggcaggcaacgttcggtgggggagatcatccgccaaaatcagatctggtgccgcgtgggagccctggcatacaccgcgacggtggttctggtgagaacctgtactttcaaagctcagataatgggcctcaaaaccagcgcaacgctccacgtataaccttcggtggcccgtctgactccacaggcagcaaccagaatggtgagcgtagtggagccaggtctaagcagcgccgtccccagggtctgccgaacaacacggcgagctggtttactgcgcttacccaacacggtaaagaagacttaaaattcccgcgtggccagggcgtcccgatcaacactaactcttccccggatgatcagattggttattaccgcagagcaactcgtcggattcgcggcggcgacggtaaaatgaaagatttgtctccgcgttggtacttttactatctcggcaccggtccggaagctgatctgccctacggggcaaacaaggacgggatcgtatgggtggctaccgaaggtgccctgaatactccaaaagatcatatcggcacccgtaaccctgctaataacgctgcgatcgttctgcaactgcctcagggtacaactctgccaaaaggcttctatgcagaagggtcgcgtggtggcagccaggcgagtagccgtagcagctcccgctctcgcaactcgtcccgtaactccactccgggctcttctcgcggcacgtccccggctcgtatggcaggtaacggtggtgacgctgctctggcgctgctactgctggacaggctgaaccagctggagtcgaagatgagtggtaaaggccaacagcagcagggccagaccgttaccaaaaagagcgcagctgaagcatctaaaaaaccgcgacagaaacgtaccgcgactaaagcgtacaatgtaacacaggccttcggtcgtcgaggtccggagcaaactcaaggaaactttggcgatcaggaattaatccgccaggggaccgactacaaacactggccgcaaattgcccagttcgccccatccgctagtgcattcttcggtatgagccgcatcggcatggaagtaacgccaagtggtacgtggctgacctacaccggtgctatcaagcttgatgacaaggacccgaactttaaagaccaggttattctgcttaacaaacatattgatgcctataaaactttcccgccgaccgaacccaaaaaggacaaaaagaaaaaagctgatgaaacccaggctctaccgcagcgtcagaaaaaacagcaaactgtgactctgctgccagctgcggacctggatgatttttccaagcagctgcaacagtctatgagctctgcggactctacgcaggcttaa

SEQ ID NO: 113 - DNA, 2016 bp, Artificial Sequence
  Description of Artificial Sequence: Synthetic polynucleotide
atgcaccatcatcaccatcatggtggttctggttcgccgatacttggttattggaagattaaaggactggttcagcccacacgcctcctgctagaatacttagaggaaaaatatgaagagcacctgtacgaacgtgatgagggggacaaatggcgaaacaagaaatttgaattgggcttagaatttccaaatttgccgtattatatcgatggcgacgtaaaactgacccaatcaatggccattattcgctacatcgcagataaacataacatgctgggtggctgccctaaagaacgggctgagatctccatgctggaaggtgcggtgctcgacattcgctacggcgtcagtagaattgcgtatagcaaggatttcgaaactttaaaagtggatttcctgagcaaacttccggagatgctgaaaatgtttgaggataggctttgtcataagacgtatctcaatggtgatcatgttacccacccggactttatgctgtacgacgcccttgatgtcgttctgtatatggatcccatgtgcctggacgccttcccgaaattagtgtgttttaaaaaacgtatcgaagcgattccacagatcgataaatacttgaagtcttctaaatatattgcttggcctctgcaaggctggcaggcaacgttcggtgggggagatcatccgccaaaatcagatctggtgccgcgtgggagccctggcatacaccgcgacggtggttctggtgagaacctgtactttcaaagctcagataatgggcctcaaaaccagcgcaacgctccacgtataaccttcggtggcccgtctgactccacaggcagcaaccagaatggtgagcgtagtggagccaggtctaagcagcgccgtccccagggtctgccgaacaacacggcgagctggtttactccgcttacccaacacggtaaagaagacttaaaattcccgcgtggccagggcgtcccgatcaacactaactcttccccggatgatcagattggttattaccgcagagcaactcgtcggattcgcggcggcgacggtaaaatgaaagatttgtctccgcgttggtacttttactatctcggcaccggtccggaagctggactgccctacggggcaaacaaggacgggatcatttgggtggctaccgaaggtgccctgaatactccaaaagatcatatcggcacccgtaaccctgctaataacgctgcgatcgttctgcaactgcctcagggtacaactctgccaaaaggcttctatgcagaagggtcgcgtggtggcagccaggcgagtagccgtagcagctcccgctctcgcaactcgtcccgtaactccactccgggctcttctcgcggcacgtccccggctcgtatggcaggtaacggtggtgacgctgctctggcgctgctactgctggacaggctgaaccagctggagtcgaagatgagtggtaaaggccaacagcagcagggccagaccgttaccaaaaagagcgcagctgaagcatctaaaaaaccgcgacagaaacgtaccgcgactaaagcgtacaatgtaacacaggccttcggtcgtcgaggtccggagcaaactcaaggaaactttggcgatcaggaattaatccgccaggggaccgactacaaacactggccgcaaattgcccagttcgccccatccgctagtgcattcttcggtatgagccgcatcggcatggaagtaacgccaagtggtacgtggctgacctacaccggtgctatcaagcttgatgacaaggacccgaactttaaagaccaggttattctgcttaacaaacatattgatgcctataaaactttcccgccgaccgaacccaaaaaggacaaaaagaaaaaagctgatgaaacccaggctctaccgcagcgtcagaaaaaacagcaaactgtgactctgctgccagctgcggacctggatgatttttccaagcagctgcaacagtctatgagctctgcggactctacgcaggcttaa

SEQ ID NO: 114 - DNA, 2016 bp, Artificial Sequence
  Description of Artificial Sequence: Synthetic polynucleotide
atgcaccatcatcaccatcatggtggttctggttcgccgatacttggttattggaagattaaaggactggttcagcccacacgcctcctgctagaatacttagaggaaaaatatgaagagcacctgtacgaacgtgatgagggggacaaatggcgaaacaagaaatttgaattgggcttagaatttccaaatttgccgtattatatcgatggcgacgtaaaactgacccaatcaatggccattattcgctacatcgcagataaacataacatgctgggtggctgccctaaagaacgggctgagatctccatgctggaaggtgcggtgctcgacattcgctacggcgtcagtagaattgcgtatagcaaggatttcgaaactttaaaagtggatttcctgagcaaacttccggagatgctgaaaatgtttgaggataggctttgtcataagacgtatctcaatggtgatcatgttacccacccggactttatgctgtacgacgcccttgatgtcgttctgtatatggatcccatgtgcctggacgccttcccgaaattagtgtgttttaaaaaacgtatcgaagcgattccacagatcgataaatacttgaagtcttctaaatatattgcttggcctctgcaaggctggcaggcaacgttcggtgggggagatcatccgccaaaatcagatctggtgccgcgtgggagccctggcatacaccgcgacggtggttctggtgagaacctgtactttcaaagctcagataatgggcctcaaaaccagcgcaacgctccacgtataaccttcggtggcccgtctgactccacaggcagcaaccagaatggtgagcgtagtggagccaggtctaagcagcgccgtccccagggtctgccgaacaacacggcgagctggtttactgcgcttacccaacacggtaaagaagacttaaaattcccgcgtggccagggcgtcccgatcaacactaactcttccccggatgatcagattggttattaccgcagagcaactcgtcggattcgcggcggcgacggtaaaatgaaagatttgtctccgcgttggtacttttactatctcggcaccggtccggaagctggactgccctacggggcaaacaaggacgggatcatttgggtggctaccgaaggtgccctgaatactccaaaagatcatatcggcacccgtaaccctgctaataacgctgcgatcgttctgcaactgcctcagggtacaactctgccaaaaggcttctatgcagaagggtcgcgtggtggcagccaggcgagtagccgtagcagcgagcgctctcgcaactcgtcccgtaactccactccgggcgaagagcgcggcacgtccccggctcgtatggcaggtaacggtggtgacgctgctctggcgctgctactgctggacaggctgaaccagctggagtcgaagatgagtggtaaaggccaacagcagcagggccagaccgttaccaaaaagagcgcagctgaagcatctaaaaaaccgcgacagaaacgtaccgcgactaaagcgtacaatgtaacacaggccttcggtcgtcgaggtccggagcaaactcaaggaaactttggcgatcaggaattaatccgccaggggaccgactacaaacactggccgcaaattgcccagttcgccccatccgctagtgcattcttcggtatgagccgcatcggcatggaagtaacgccaagtggtacgtggctgacctacaccggtgctatcaagcttgatgacaaggacccgaactttaaagaccaggttattctgcttaacaaacatattgatgcctataaaactttcccgccgaccgaacccaaaaaggacaaaaagaaaaaagctgatgaaacccaggctctaccgcagcgtcagaaaaaacagcaaactgtgactctgctgccagctgcggacctggatgatttttccaagcagctgcaacagtctatgagctctgcggactctacgcaggcttaa

SEQ ID NO: 115 - DNA, 2016 bp, Artificial Sequence
  Description of Artificial Sequence: Synthetic polynucleotide
atgcaccatcatcaccatcatggtggttctggttcgccgatacttggttattggaagattaaaggactggttcagcccacacgcctcctgctagaatacttagaggaaaaatatgaagagcacctgtacgaacgtgatgagggggacaaatggcgaaacaagaaatttgaattgggcttagaatttccaaatttgccgtattatatcgatggcgacgtaaaactgacccaatcaatggccattattcgctacatcgcagataaacataacatgctgggtggctgccctaaagaacgggctgagatctccatgctggaaggtgcggtgctcgacattcgctacggcgtcagtagaattgcgtatagcaaggatttcgaaactttaaaagtggatttcctgagcaaacttccggagatgctgaaaatgtttgaggataggctttgtcataagacgtatctcaatggtgatcatgttacccacccggactttatgctgtacgacgcccttgatgtcgttctgtatatggatcccatgtgcctggacgccttcccgaaattagtgtgttttaaaaaacgtatcgaagcgattccacagatcgataaatacttgaagtcttctaaatatattgcttggcctctgcaaggctggcaggcaacgttcggtgggggagatcatccgccaaaatcagatctggtgccgcgtgggagccctggcatacaccgcgacggtggttctggtgagaacctgtactttcaaagctcagataatgggcctcaaaaccagcgcaacgctccacgtataaccttcggtggcccgtctgactccacaggcagcaaccagaatggtgagcgtagtggagccaggtctaagcagcgccgtccccagggtctgccgaacaacacggcgagctggtttactgcgcttacccaacacggtaaagaagacttaaaattcccgcgtggccagggcgtcccgatcaacactaactcttccccggatgatcagattggttattaccgcagagcaactcgtcggattcgcggcggcgacggtaaaatgaaagatttgtctccgcgttggtacttttactatctcggcaccggtccggaagctggactgccctacggggcaaacaaggacgggatcatttgggtggctaccgaaggtgccctgaatactccaaaagatcatatcggcacccgtaaccctgctaataacgctgcgatcgttctgcaactgcctcagggtacaactctgccaaaaggcttctatgcagaagggtcgcgtggtggcagccaggcgagtagccgtagcagctcccgctctcgcaactcgtcccgtaactccactccgggctcttctcgcggcacgtccccggctcgtatggcaggtaacggtggtgacgctgctctggcgctgctactgctggacaggctgaaccagctggagtcgaagatgagtggtaaaggccaacagcagcagggccagaccgttaccaaaaagagcgcagctgaagcatctaaaaaaccgcgacagaaacgtaccgcgactaaagcgtacaatgtaacacaggccttcggtcgtcgaggtccggagcaaactcaaggaaactttggcgatcaggaatttatccgccaggggaccgactacaaacactggccgcaaattgcccagttcgccccatccgctagtgcattcttcggtatgagccgcatcggcatggaagtaacgccaagtggtacgtggctgacctacaccggtgctatcaagcttgatgacaaggacccgaactttaaagaccaggttattctgcttaacaaacatattgatgcctataaaactttcccgccgaccgaacccaaaaaggacaaaaagaaaaaagctgatgaaacccaggctctaccgcagcgtcagaaaaaacagcaaactgtgactctgctgccagctgcggacctggatgatttttccaagcagctgcaacagtctatgagctctgcggactctacgcaggcttaa

SEQ ID NO: 116 - DNA, 2016 bp, Artificial Sequence
  Description of Artificial Sequence: Synthetic polynucleotide
atgcaccatcatcaccatcatggtggttctggttcgccgatacttggttattggaagattaaaggactggttcagcccacacgcctcctgctagaatacttagaggaaaaatatgaagagcacctgtacgaacgtgatgagggggacaaatggcgaaacaagaaatttgaattgggcttagaatttccaaatttgccgtattatatcgatggcgacgtaaaactgacccaatcaatggccattattcgctacatcgcagataaacataacatgctgggtggctgccctaaagaacgggctgagatctccatgctggaaggtgcggtgctcgacattcgctacggcgtcagtagaattgcgtatagcaaggatttcgaaactttaaaagtggatttcctgagcaaacttccggagatgctgaaaatgtttgaggataggctttgtcataagacgtatctcaatggtgatcatgttacccacccggactttatgctgtacgacgcccttgatgtcgttctgtatatggatcccatgtgcctggacgccttcccgaaattagtgtgttttaaaaaacgtatcgaagcgattccacagatcgataaatacttgaagtcttctaaatatattgcttggcctctgcaaggctggcaggcaacgttcggtgggggagatcatccgccaaaatcagatctggtgccgcgtgggagccctggcatacaccgcgacggtggttctggtgagaacctgtactttcaaagctcagataatgggcctcaaaaccagcgcaacgctccacgtataaccttcggtggcccgtctgactccacaggcagcaaccagaatggtgagcgtagtggagccaggtctaagcagcgccgtccccagggtctgccgaacaacacggcgagctggtttactgcgcttacccaacacggtaaagaagacttaaaattcccgcgtggccagggcgtcccgatcaacactaactcttccccggatgatcagattggttattaccgcagagcaactcgtcggattcgcggcggcgacggtaaaatgaaagatttgtctccgcgttggtacttttactatctcggcaccggtccggaagctggactgccctacggggcaaacaaggacgggatcatttgggtggctaccgaaggtgccctgaatactccaaaagatcatatcggcacccgtaaccctgctaataacgctgcgatcgttctgcaactgcctcagggtacaactctgccaaaaggcttctatgcagaagggtcgcgtggtggcagccaggcgagtagccgtagcagctcccgctctcgcaactcgtcccgtaactccactccgggctcttctcgcggcacgtccccggctcgtatggcaggtaacggtggtgacgctgctctggcgctgctactgctggacaggctgaaccagctggagtcgaagatgagtggtaaaggccaacagcagcagggccagaccgttaccaaaaagagcgcagctgaagcatctaaaaaaccgcgacagaaacgtaccgcgactaaagcgtacaatgtaacacaggccttcggtcgtcgaggtccggagcaaactcaaggaaactttggcgatcaggaattaatccgccaggggaccgactacaaacactggccgcaaattgcccagttcgccccatccgctagtgcattcttcggtatgagccgcatctcaatggaagtaacgccaagtggtacgtggctgacctacaccggtgctatcaagcttgatgacaaggacccgaactttaaagaccaggttattctgcttaacaaacatattgatgcctataaaactttcccgccgaccgaacccaaaaaggacaaaaagaaaaaagctgatgaaacccaggctctaccgcagcgtcagaaaaaacagcaaactgtgactctgctgccagctgcggacctggatgatttttccaagcagctgcaacagtctatgagctctgcggactctacgcaggcttaa

SEQ ID NO: 117 - DNA, 2016 bp, Artificial Sequence
  Description of Artificial Sequence: Synthetic polynucleotide
atgcaccatcatcaccatcatggtggttctggttcgccgatacttggttattggaagattaaaggactggttcagcccacacgcctcctgctagaatacttagaggaaaaatatgaagagcacctgtacgaacgtgatgagggggacaaatggcgaaacaagaaatttgaattgggcttagaatttccaaatttgccgtattatatcgatggcgacgtaaaactgacccaatcaatggccattattcgctacatcgcagataaacataacatgctgggtggctgccctaaagaacgggctgagatctccatgctggaaggtgcggtgctcgacattcgctacggcgtcagtagaattgcgtatagcaaggatttcgaaactttaaaagtggatttcctgagcaaacttccggagatgctgaaaatgtttgaggataggctttgtcataagacgtatctcaatggtgatcatgttacccacccggactttatgctgtacgacgcccttgatgtcgttctgtatatggatcccatgtgcctggacgccttcccgaaattagtgtgttttaaaaaacgtatcgaagcgattccacagatcgataaatacttgaagtcttctaaatatattgcttggcctctgcaaggctggcaggcaacgttcggtgggggagatcatccgccaaaatcagatctggtgccgcgtgggagccctggcatacaccgcgacggtggttctggtgagaacctgtactttcaaagctcagataatgggcctcaaaaccagcgcaacgctccacgtataaccttcggtggcccgtctgactccacaggcagcaaccagaatggtgagcgtagtggagccaggtctaagcagcgccgtccccagggtctgccgaacaacacggcgagctggtttactgcgcttacccaacacggtaaagaagacttaaaattcccgcgtggccagggcgtcccgatcaacactaactcttccccggatgatcagattggttattaccgcagagcaactcgtcggattcgcggcggcgacggtaaaatgaaagatttgtctccgcgttggtacttttactatctcggcaccggtccggaagctggactgccctacggggcaaacaaggacgggatcatttgggtggctaccgaaggtgccctgaatactccaaaagatcatatcggcacccgtaaccctgctaataacgctgcgatcgttctgcaactgcctcagggtacaactctgccaaaaggcttctatgcagaagggtcgcgtggtggcagccaggcgagtagccgtagcagctcccgctctcgcaactcgtcccgtaactccactccgggctcttctcgcggcacgtccccggctcgtatggcaggtaacggtggtgacgctgctctggcgctgctactgctggacaggctgaaccagctggagtcgaagatgagtggtaaaggccaacagcagcagggccagaccgttaccaaaaagagcgcagctgaagcatctaaaaaaccgcgacagaaacgtaccgcgactaaagcgtacaatgtaacacaggccttcggtaaacgaggtccggagcaaactcaaggaaactttggcgatcaggaattaatccgccaggggaccgactacaaacactggccgcaaattgcccagttcgccccatccgctagtgcattcttcggtatgagccgcatcggcatggaagtaacgccaagtggtacgtggctgacctacaccggtgctatcaagcttgatgacaaggacccgaactttaaagaccaggttattctgcttaacaaacatattgatgcctataaaactttcccgccgaccgaacccaaaaaggacaaaaagaaaaaagctgatgaaacccaggctctaccgcagcgtcagaaaaaacagcaaactgtgactctgctgccagctgcggacctggatgatttttccaagcagctgcaacagtctatgagctctgcggactctacgcaggcttaa

SEQ ID NO: 118 - DNA, 2016 bp, Artificial Sequence
  Description of Artificial Sequence: Synthetic polynucleotide
atgcaccatcatcaccatcatggtggttctggttcgccgatacttggttattggaagattaaaggactggttcagcccacacgcctcctgctagaatacttagaggaaaaatatgaagagcacctgtacgaacgtgatgagggggacaaatggcgaaacaagaaatttgaattgggcttagaatttccaaatttgccgtattatatcgatggcgacgtaaaactgacccaatcaatggccattattcgctacatcgcagataaacataacatgctgggtggctgccctaaagaacgggctgagatctccatgctggaaggtgcggtgctcgacattcgctacggcgtcagtagaattgcgtatagcaaggatttcgaaactttaaaagtggatttcctgagcaaacttccggagatgctgaaaatgtttgaggataggctttgtcataagacgtatctcaatggtgatcatgttacccacccggactttatgctgtacgacgcccttgatgtcgttctgtatatggatcccatgtgcctggacgccttcccgaaattagtgtgttttaaaaaacgtatcgaagcgattccacagatcgataaatacttgaagtcttctaaatatattgcttggcctctgcaaggctggcaggcaacgttcggtgggggagatcatccgccaaaatcagatctggtgccgcgtgggagccctggcatacaccgcgacggtggttctggtgagaacctgtactttcaaagctcagataatgggcctcaaaaccagcgcaacgctccacgtataaccttcggtggcccgtctgactccacaggcagcaaccagaatggtgagcgtagtggagccaggtctaagcagcgccgtccccagggtctgccgaacaacacggcgagctggtttactccgcttacccaacacggtaaagaagacttaaaattcccgccaggccagggcgtcccgatcaacactaactcttccccggatgatcagattggttattaccgcagagcaactcgtcggattcgcggcggcgacggtaaaatgaaagatttgcccccgcgttggtacttttactatctcggcaccggtccggaagctgatctgccctacggggcagtaaagcctgggatcgtgtgggtggctgaggaaggtgccctgaatactccaaaagatcatatcggcacccgtaaccctgctaataacgctgcgatcccactgcaactgcctccgggtacaactctgccaaaaggcttctatgcagaagggtcgcgtggtggcagccaggcgagtagccgtagcagctcccgctctcgcaactcgtcccgtaactccactccgggctcttctcgcggcacgtccccggctcgtatggcaggtaacggtggtgacgctgctctggcgctgctactgctggacaggctgaaccagctggagtcgaagatgagtggtaaaggccaacagcagcagggccagaccgttaccaaaaagagcgcagctgaagcatctaaaaaaccgcgacagaaacgtaccgcgactaaagcgtacaatgtaacacaggccttcggtcgtcgaggtccggagcaaactcaaggaaactttggcgatcaggaattaatccgccaggggaccgactacaaacactggccgcaaattgcccagttcgccccatccgctagtgcattcttcggtatgagccgcatcggcatggaagtaacgccaagtggtacgtggctgacctacaccggtgctatcaagcttgatgacaaggacccgaactttaaagaccaggttattctgcttaacaaacatattgatgcctataaaactttcccgccgaccgaacccaaaaaggacaaaaagaaaaaagctgatgaaacccaggctctaccgcagcgtcagaaaaaacagcaaactgtgactctgctgccagctgcggacctggatgatttttccaagcagctgcaacagtctatgagctctgcggactctacgcaggcttaa

SEQ ID NO: 119 - DNA, 2016 bp, Artificial Sequence
  Description of Artificial Sequence: Synthetic polynucleotide
atgcaccatcatcaccatcatggtggttctggttcgccgatacttggttattggaagattaaaggactggttcagcccacacgcctcctgctagaatacttagaggaaaaatatgaagagcacctgtacgaacgtgatgagggggacaaatggcgaaacaagaaatttgaattgggcttagaatttccaaatttgccgtattatatcgatggcgacgtaaaactgacccaatcaatggccattattcgctacatcgcagataaacataacatgctgggtggctgccctaaagaacgggctgagatctccatgctggaaggtgcggtgctcgacattcgctacggcgtcagtagaattgcgtatagcaaggatttcgaaactttaaaagtggatttcctgagcaaacttccggagatgctgaaaatgtttgaggataggctttgtcataagacgtatctcaatggtgatcatgttacccacccggactttatgctgtacgacgcccttgatgtcgttctgtatatggatcccatgtgcctggacgccttcccgaaattagtgtgttttaaaaaacgtatcgaagcgattccacagatcgataaatacttgaagtcttctaaatatattgcttggcctctgcaaggctggcaggcaacgttcggtgggggagatcatccgccaaaatcagatctggtgccgcgtgggagccctggcatacaccgcgacggtggttctggtgagaacctgtactttcaaagctcagataatgggcctcaaaaccagcgcaacgctccacgtataaccttcggtggcccgtctgactccacaggcagcaaccagaatggtgagcgtagtggagccaggtctaagcagcgccgtccccagggtctgccgaacaacacggcgagctggtttactgcgcttacccaacacggtaaagaagacttaaaattcccgcgtggccagggcgtcccgatcaacactaactcttccccggatgatcagattggttattaccgcagagcaactcgtcggattcgcggcggcgacggtaaaatgaaagatttgtctccgcgttggtacttttactatctcggcaccggtccggaagctggactgccctacggggcaaacaaggacgggatcatttgggtggctaccgaaggtgccctgaatactccaaaagatcatatcggcacccgtaaccctgctaataacgctgcgatcgttctgcaactgcctcagggtacaactctgccaaaaggcttctatgcagaagggtcgcgtggtggcagccaggcgagtagccgtagcagctcccgctctcgcaactcgtcccgtaactccactccgggctcttctcgcggcacgtccccggctcgtatggcaggtaacggtggtgacgctgctctggcgctgctactgctggacaggctgaaccagctggagtcgaagatgagtggtaaaggccaacagcagcagggccagaccgttaccaaaaagagcgcagctgaagcatctaaaaaaccgcgacagaaacgtaccgcgactaaagcgtacaatgtaacacaggcctatggtcgtcgaggtccggagcaaactcaaggaaactttggcgatcaggaattaatccgccaggggaccgactacaaacactggccgcaaattgcccagttcgccccatccgctagtgcattcttcggtatgagccgcatcggcatggaagtaacgccaagtggtacgtggctgacctacaccggtgctatcaagcttgatgacaaggacccgaactttaaagaccaggttattctgcttaacaaacatattgatgcctataaaactttcccgccgaccgaacccaaaaaggacaaaaagaaaaaagctgatgaaacccaggctctaccgcagcgtcagaaaaaacagcaaactgtgactctgctgccagctgcggacctggatgatttttccaagcagctgcaacagtctatgagctctgcggactctacgcaggcttaa

SEQ ID NO: 120 - DNA, 2016 bp, Artificial Sequence
  Description of Artificial Sequence: Synthetic polynucleotide
atgcaccatcatcaccatcatggtggttctggttcgccgatacttggttattggaagattaaaggactggttcagcccacacgcctcctgctagaatacttagaggaaaaatatgaagagcacctgtacgaacgtgatgagggggacaaatggcgaaacaagaaatttgaattgggcttagaatttccaaatttgccgtattatatcgatggcgacgtaaaactgacccaatcaatggccattattcgctacatcgcagataaacataacatgctgggtggctgccctaaagaacgggctgagatctccatgctggaaggtgcggtgctcgacattcgctacggcgtcagtagaattgcgtatagcaaggatttcgaaactttaaaagtggatttcctgagcaaacttccggagatgctgaaaatgtttgaggataggctttgtcataagacgtatctcaatggtgatcatgttacccacccggactttatgctgtacgacgcccttgatgtcgttctgtatatggatcccatgtgcctggacgccttcccgaaattagtgtgttttaaaaaacgtatcgaagcgattccacagatcgataaatacttgaagtcttctaaatatattgcttggcctctgcaaggctggcaggcaacgttcggtgggggagatcatccgccaaaatcagatctggtgccgcgtgggagccctggcatacaccgcgacggtggttctggtgagaacctgtactttcaaagctcagataatgggcctcaaaaccagcgcaacgctccacgtataaccttcggtggcccgtctgactccacaggcagcaaccagaatggtgagcgtagtggagccaggtctaagcagcgccgtccccagggtctgccgaacaacacggcgagctggtttactgcgcttacccaacacggtaaagaagacttaaaattcccgcgtggccagggcgtcccgatcaacactaactcttccccggatgatcagattggttattaccgcagagcaactcgtcggattcgcggcggcgacggtaaaatgaaagatttgtctccgcgttggtacttttactatctcggcaccggtccggaagctggactgccctacggggcaaacaaggacgggatcatttgggtggctaccgaaggtgccctgaatactccaaaagatcatatcggcacccgtaaccctgctaataacgctgcgatcgttctgcaactgcctcagggtacaactctgccaaaaggcttctatgcagaagggtcgcgtggtggcagccaggcgagtagccgtagcagctcccgctctcgcaactcgtcccgtaactccactccgggctcttctcgcggcacgtccccggctcgtatggcaggtaacggtggtgacgctgctctggcgctgctactgctggacaggctgaaccagctggagtcgaagatgagtggtaaaggccaacagcagcagggccagaccgttaccaaaaagagcgcagctgaaatgtctaaaaaaccgcgacagaaacgtaccgcgactaaaggatacaatgtaacacagtgtttcggtccgcgaggtccggagcaaactcaaggaaactttggcgatgccgaattagtgaaaaaagggaccgactacaaacactggccgcaaattgcccagttcgccccatccgctagtgcattcttcggtatgagccgcatctcgtcaaaagaaacgccaagtggtacgtggctgacctacaccggtgctatcaagcttgataaagatgacccgaactttaaagaccaggttattctgcttaacaaacatattgatgcctataaaactttcccgccgaccgaacccaaaaaggacaaaaagaaaaaagctgatgaaacccaggctctaccgcagcgtcagaaaaaacagcaaactgtgactctgctgccagctgcggacctggatgatttttccaagcagctgcaacagtctatgagctctgcggactctacgcaggcttaa

SEQ ID NO: 121 - DNA, 2016 bp, Artificial Sequence
  Description of Artificial Sequence: Synthetic polynucleotide
atgcaccatcatcaccatcatggtggttctggttcgccgatacttggttattggaagattaaaggactggttcagcccacacgcctcctgctagaatacttagaggaaaaatatgaagagcacctgtacgaacgtgatgagggggacaaatggcgaaacaagaaatttgaattgggcttagaatttccaaatttgccgtattatatcgatggcgacgtaaaactgacccaatcaatggccattattcgctacatcgcagataaacataacatgctgggtggctgccctaaagaacgggctgagatctccatgctggaaggtgcggtgctcgacattcgctacggcgtcagtagaattgcgtatagcaaggatttcgaaactttaaaagtggatttcctgagcaaacttccggagatgctgaaaatgtttgaggataggctttgtcataagacgtatctcaatggtgatcatgttacccacccggactttatgctgtacgacgcccttgatgtcgttctgtatatggatcccatgtgcctggacgccttcccgaaattagtgtgttttaaaaaacgtatcgaagcgattccacagatcgataaatacttgaagtcttctaaatatattgcttggcctctgcaaggctggcaggcaacgttcggtgggggagatcatccgccaaaatcagatctggtgccgcgtgggagccctggcatacaccgcgacggtggttctggtgagaacctgtactttcaaagctcagataatgggcctcaaaaccagcgcaacgctccacgtataaccttcggtggcccgtctgactccacaggcagcaaccagaatggtgagcgtagtggagccaggtctaagcagcgccgtccccagggtctgccgaacaacacggcgagctggtttactgcgcttacccaacacggtaaagaagacttaaaattcccgcgtggccagggcgtcccgatcaacactaactcttccccggatgatcagattggtgaataccgcagagcaactcgtcggattcgcggcggcgacggtaaaatgaaagatttgtctccgcgttggtacttttactatctcggcaccggtccggaagctggactgccctacggggcaaacaaggacgggatcatttgggtggctaccgaaggtgccctgaatactccaaaagatcatatcggcacccgtaaccctgctaataacgctgcgatcgttctgcaactgcctcagggtacaactctgccaaaaggcttctatgcagaagggtcgcgtggtggcagccaggcgagtagccgtagcagctcccgctctcgcaactcgtcccgtaactccactccgggctcttctcgcggcacgtccccggctcgtatggcaggtaacggtggtgacgctgctctggcgctgctactgctggacaggctgaaccagctggagtcgaagatgagtggtaaaggccaacagcagcagggccagaccgttaccaaaaagagcgcagctgaagcatctaaaaaaccgcgacagaaacgtaccgcgactaaagcgtacaatgtaacacaggccttcggtcgtcgaggtccggagcaaactcaaggaaactttggcgatcaggaattaatccgccaggggaccgactacaaacactggccgcaaattgcccagttcgccccatccgctagtgcattcttcggtatgagccgcatcggcatggaagtaacgccaagtggtacgtggctgacctacaccggtgctatcaagcttgatgacaaggacccgaactttaaagaccaggttattctgcttaacaaacatattgatgcctataaaactttcccgccgaccgaacccaaaaaggacaaaaagaaaaaagctgatgaaacccaggctctaccgcagcgtcagaaaaaacagcaaactgtgactctgctgccagctgcggacctggatgatttttccaagcagctgcaacagtctatgagctctgcggactctacgcaggcttaa

SEQ ID NO: 122 - DNA, 2016 bp, Artificial Sequence
  Description of Artificial Sequence: Synthetic polynucleotide
atgcaccatcatcaccatcatggtggttctggttcgccgatacttggttattggaagattaaaggactggttcagcccacacgcctcctgctagaatacttagaggaaaaatatgaagagcacctgtacgaacgtgatgagggggacaaatggcgaaacaagaaatttgaattgggcttagaatttccaaatttgccgtattatatcgatggcgacgtaaaactgacccaatcaatggccattattcgctacatcgcagataaacataacatgctgggtggctgccctaaagaacgggctgagatctccatgctggaaggtgcggtgctcgacattcgctacggcgtcagtagaattgcgtatagcaaggatttcgaaactttaaaagtggatttcctgagcaaacttccggagatgctgaaaatgtttgaggataggctttgtcataagacgtatctcaatggtgatcatgttacccacccggactttatgctgtacgacgcccttgatgtcgttctgtatatggatcccatgtgcctggacgccttcccgaaattagtgtgttttaaaaaacgtatcgaagcgattccacagatcgataaatacttgaagtcttctaaatatattgcttggcctctgcaaggctggcaggcaacgttcggtgggggagatcatccgccaaaatcagatctggtgccgcgtgggagccctggcatacaccgcgacggtggttctggtgagaacctgtactttcaaagctcagataatgggcctcaaaaccagcgcaacgctccacgtataaccttcggtggcccgtctgactccacaggcagcaaccagaatggtgagcgtagtggagccaggtctaagcagcgccgtccccagggtctgccgaacaacacggcgagctggtttactgcgcttacccaacacggtaaagaagacttaaaattcccgaaaggccagggcgtcccgatcaacactaactctaaaccggatgatcagattggttattggcgcagacaaactcgtcggtaccgcggcggcgacggtcaaatgaaagatttggatccgcgttggtacttttactatctcggcaccggtccggaagctggactgccctacggggcaaacaaggacgggatcatttgggtggctaccgaaggtgccctgaatactccaaaagatcatatcggcacccgtaaccctgctaataacgctgcgatcgttctgcaactgcctcagggtacaactctgccaaaaggcttctatgcagaagggtcgcgtggtggcagccaggcgagtagccgtagcagctcccgctctcgcaactcgtcccgtaactccactccgggctcttctcgcggcacgtccccggctcgtatggcaggtaacggtggtgacgctgctctggcgctgctactgctggacaggctgaaccagctggagtcgaagatgagtggtaaaggccaacagcagcagggccagaccgttaccaaaaagagcgcagctgaagcatctaaaaaaccgcgacagaaacgtaccgcgactaaagcgtacaatgtaacacaggccttcggtcgtcgaggtccggagcaaactcaaggaaactttggcgatcaggaattaatccgccaggggaccgactacaaacactggccgcaaattgcccagttcgccccatccgctagtgcattcttcggtatgagccgcatcggcatggaagtaacgccaagtggtacgtggctgacctacaccggtgctatcaagcttgatgacaaggacccgaactttaaagaccaggttattctgcttaacaaacatattgatgcctataaaactttcccgccgaccgaacccaaaaaggacaaaaagaaaaaagctgatgaaacccaggctctaccgcagcgtcagaaaaaacagcaaactgtgactctgctgccagctgcggacctggatgatttttccaagcagctgcaacagtctatgagctctgcggactctacgcaggcttaa

SEQ ID NO: 123 - DNA, 2016 bp, Artificial Sequence
  Description of Artificial Sequence: Synthetic polynucleotide
atgcaccatcatcaccatcatggtggttctggttcgccgatacttggttattggaagattaaaggactggttcagcccacacgcctcctgctagaatacttagaggaaaaatatgaagagcacctgtacgaacgtgatgagggggacaaatggcgaaacaagaaatttgaattgggcttagaatttccaaatttgccgtattatatcgatggcgacgtaaaactgacccaatcaatggccattattcgctacatcgcagataaacataacatgctgggtggctgccctaaagaacgggctgagatctccatgctggaaggtgcggtgctcgacattcgctacggcgtcagtagaattgcgtatagcaaggatttcgaaactttaaaagtggatttcctgagcaaacttccggagatgctgaaaatgtttgaggataggctttgtcataagacgtatctcaatggtgatcatgttacccacccggactttatgctgtacgacgcccttgatgtcgttctgtatatggatcccatgtgcctggacgccttcccgaaattagtgtgttttaaaaaacgtatcgaagcgattccacagatcgataaatacttgaagtcttctaaatatattgcttggcctctgcaaggctggcaggcaacgttcggtgggggagatcatccgccaaaatcagatctggtgccgcgtgggagccctggcatacaccgcgacggtggttctggtgagaacctgtactttcaaagctcagataatgggcctcaaaaccagcgcaacgctccacgtataaccttcggtggcccgtctgactccacaggcagcaaccagaatggtgagcgtagtggagccaggtctaagcagcgccgtccccagggtctgccgaacaacacggcgagctggtttactgcgcttacccaacacggtaaagaagacttaaaattcccgcgtggccagggcgtcccgatcaacactaactcttccccggatgatcagattggttattaccgcagagcaactcgtcggattcgcggcggcgacggtaaaatgaaagatttgtctccgcgttggtactttaattatctcggcaccggtccggaagctggactgccctacggggcaaacaaggacgggatcatttgggtggctaccgaaggtgccctgaatactccaaaagatcatatcggcacccgtaaccctgctaataacgctgcgatcgttctgcaactgcctcagggtacaactctgccaaaaggcttctatgcagaagggtcgcgtggtggcagccaggcgagtagccgtagcagctcccgctctcgcaactcgtcccgtaactccactccgggctcttctcgcggcacgtccccggctcgtatggcaggtaacggtggtgacgctgctctggcgctgctactgctggacaggctgaaccagctggagtcgaagatgagtggtaaaggccaacagcagcagggccagaccgttaccaaaaagagcgcagctgaagcatctaaaaaaccgcgacagaaacgtaccgcgactaaagcgtacaatgtaacacaggccttcggtcgtcgaggtccggagcaaactcaaggaaactttggcgatcaggaattaatccgccaggggaccgactacaaacactggccgcaaattgcccagttcgccccatccgctagtgcattcttcggtatgagccgcatcggcatggaagtaacgccaagtggtacgtggctgacctacaccggtgctatcaagcttgatgacaaggacccgaactttaaagaccaggttattctgcttaacaaacatattgatgcctataaaactttcccgccgaccgaacccaaaaaggacaaaaagaaaaaagctgatgaaacccaggctctaccgcagcgtcagaaaaaacagcaaactgtgactctgctgccagctgcggacctggatgatttttccaagcagctgcaacagtctatgagctctgcggactctacgcaggcttaa

SEQ ID NO: 124 - DNA, 2016 bp, Artificial Sequence
  Description of Artificial Sequence: Synthetic polynucleotide
atgcaccatcatcaccatcatggtggttctggttcgccgatacttggttattggaagattaaaggactggttcagcccacacgcctcctgctagaatacttagaggaaaaatatgaagagcacctgtacgaacgtgatgagggggacaaatggcgaaacaagaaatttgaattgggcttagaatttccaaatttgccgtattatatcgatggcgacgtaaaactgacccaatcaatggccattattcgctacatcgcagataaacataacatgctgggtggctgccctaaagaacgggctgagatctccatgctggaaggtgcggtgctcgacattcgctacggcgtcagtagaattgcgtatagcaaggatttcgaaactttaaaagtggatttcctgagcaaacttccggagatgctgaaaatgtttgaggataggctttgtcataagacgtatctcaatggtgatcatgttacccacccggactttatgctgtacgacgcccttgatgtcgttctgtatatggatcccatgtgcctggacgccttcccgaaattagtgtgttttaaaaaacgtatcgaagcgattccacagatcgataaatacttgaagtcttctaaatatattgcttggcctctgcaaggctggcaggcaacgttcggtgggggagatcatccgccaaaatcagatctggtgccgcgtgggagccctggcatacaccgcgacggtggttctggtgagaacctgtactttcaaagctcagataatgggcctcaaaaccagcgcaacgctccacgtataaccttcggtggcccgtctgactccacaggcagcaaccagaatggtgagcgtagtggagccaggtctaagcagcgccgtccccagggtctgccgaacaacacggcgagctggtttactgcgcttacccaacacggtaaagaagacttaaaattcccgcgtggccagggcgtcccgatcaacactaactcttccccggatgatcagattggttattaccgcagagcaactcgtcggattcgcggcggcgacggtaaaatgaaagatttgtctccgcgttggtacttttactatctcggcaccggtccggaagctggactgccctacggggcaaacaaggacgggatcatttgggtggctaccgaaggtgccctgaatactccaaaagatcatatcggcacccgtaaccctgctaataacgctgcgatcgttctgcaactgcctcagggtacaactctgccaaaaggcttctatgcagaagggtcgcgtggtggcagccaggcgagtagccgtagcagctcccgctctcgcaactcgtcccgtaactccactccgggctcttctcgcggcacgtccccggctcgtatggcaggtaacggtggtgacgctgctctggcgctgctactgctggacaggctgaaccagctggagtcgaagatgagtggtaaaggccaacagcagcagggccagaccgttaccaaaaagagcgcagctgaagcatctaaaaaaccgcgacagaaacgtaccgcgactaaagcgtacaatgtaacacaggccttcggtcgtcgaggtccggagcaaactcaaggaaactttggcgatcaggaattaatccgccaggggaccgactacaaacactggccgcaaattgcccagttcgccccatccgctagtgcattcttcggtatgagccgcatcggcatggaattgacgccaagtggtacgtggctgacctacaccggtgctatcaagcttgatgacaaggacccgaactttaaagaccaggttattctgcttaacaaacatattgatgcctataaaactttcccgccgaccgaacccaaaaaggacaaaaagaaaaaagctgatgaaacccaggctctaccgcagcgtcagaaaaaacagcaaactgtgactctgctgccagctgcggacctggatgatttttccaagcagctgcaacagtctatgagctctgcggactctacgcaggcttaa

SEQ ID NO: 125 - DNA, 2016 bp, Artificial Sequence
  Description of Artificial Sequence: Synthetic polynucleotide
atgcaccatcatcaccatcatggtggttctggttcgccgatacttggttattggaagattaaaggactggttcagcccacacgcctcctgctagaatacttagaggaaaaatatgaagagcacctgtacgaacgtgatgagggggacaaatggcgaaacaagaaatttgaattgggcttagaatttccaaatttgccgtattatatcgatggcgacgtaaaactgacccaatcaatggccattattcgctacatcgcagataaacataacatgctgggtggctgccctaaagaacgggctgagatctccatgctggaaggtgcggtgctcgacattcgctacggcgtcagtagaattgcgtatagcaaggatttcgaaactttaaaagtggatttcctgagcaaacttccggagatgctgaaaatgtttgaggataggctttgtcataagacgtatctcaatggtgatcatgttacccacccggactttatgctgtacgacgcccttgatgtcgttctgtatatggatcccatgtgcctggacgccttcccgaaattagtgtgttttaaaaaacgtatcgaagcgattccacagatcgataaatacttgaagtcttctaaatatattgcttggcctctgcaaggctggcaggcaacgttcggtgggggagatcatccgccaaaatcagatctggtgccgcgtgggagccctggcatacaccgcgacggtggttctggtgagaacctgtactttcaaagctcagataatgggcctcaaaaccagcgcaacgctccacgtataaccttcggtggcccgtctgactccacaggcagcaaccagaatggtgagcgtagtggagccaggtctaagcagcgccgtccccagggtctgccgaacaacacggcgagctggtttactgcgcttacccaacacggtaaagaagacttaaaattcccgcgtggccagggcgtcccgatcaacactaactcttccccggatgatcagattggttattaccgcagagcaactcgtcggattcgcggcggcgacggtaaaatgaaagatttgtctccgcgttggtacttttactatctcggcaccggtccggaagctggactgccctacggggcaaacaaggacgggatcatttgggtggctaccgaaggtgccctgaatactccaaaagatcatatcggcacccgtaaccctgctaataacgctgcgatcgttctgcaactgcctcagggtacaagtctgccaaaaggcttctatgcagaagggtcgcgtggtggcagccaggcgagtagccgtagcagctcccgctctcgcaactcgtcccgtaactccactccgggctcttctcgcggcacgtccccggctcgtatggcaggtaacggtggtgacgctgctctggcgctgctactgctggacaggctgaaccagctggagtcgaagatgagtggtaaaggccaacagcagcagggccagaccgttaccaaaaagagcgcagctgaagcatctaaaaaaccgcgacagaaacgtaccgcgactaaagcgtacaatgtaacacaggccttcggtcgtcgaggtccggagcaaactcaaggaaactttggcgatcaggaattaatccgccaggggaccgactacaaacactggccgcaaattgcccagttcgccccatccgctagtgcattcttcggtatgagccgcatcggcatggaagtaacgccaagtggtacgtggctgacctacaccggtgctatcaagcttgatgacaaggacccgaactttaaagaccaggttattctgcttaacaaacatattgatgcctataaaactttcccgccgaccgaacccaaaaaggacaaaaagaaaaaagctgatgaaacccaggctctaccgcagcgtcagaaaaaacagcaaactgtgactctgctgccagctgcggacctggatgatttttccaagcagctgcaacagtctatgagctctgcggactctacgcaggcttaa

SEQ ID NO: 126 - DNA, 2016 bp, Artificial Sequence
  Description of Artificial Sequence: Synthetic polynucleotide
atgcaccatcatcaccatcatggtggttctggttcgccgatacttggttattggaagattaaaggactggttcagcccacacgcctcctgctagaatacttagaggaaaaatatgaagagcacctgtacgaacgtgatgagggggacaaatggcgaaacaagaaatttgaattgggcttagaatttccaaatttgccgtattatatcgatggcgacgtaaaactgacccaatcaatggccattattcgctacatcgcagataaacataacatgctgggtggctgccctaaagaacgggctgagatctccatgctggaaggtgcggtgctcgacattcgctacggcgtcagtagaattgcgtatagcaaggatttcgaaactttaaaagtggatttcctgagcaaacttccggagatgctgaaaatgtttgaggataggctttgtcataagacgtatctcaatggtgatcatgttacccacccggactttatgctgtacgacgcccttgatgtcgttctgtatatggatcccatgtgcctggacgccttcccgaaattagtgtgttttaaaaaacgtatcgaagcgattccacagatcgataaatacttgaagtcttctaaatatattgcttggcctctgcaaggctggcaggcaacgttcggtgggggagatcatccgccaaaatcagatctggtgccgcgtgggagccctggcatacaccgcgacggtggttctggtgagaacctgtactttcaaagctcagataatgggcctcaaaaccagcgcaacgctccacgtataaccttcggtggcccgtctgactccacaggcagcaaccagaatggtgagcgtagtggagccaggtctaagcagcgccgtccccagggtctgccgaacaacacggcgagctggtttactgcgcttacccaacacggtaaagaagacttaaaattcccgcgtggccagggcgtcccgatcaacactaactcttccccggatgatcagattggttattaccgcagagcaactcgtcggattcgcggcggcgacggtaaaatgaaagatttgtctccgcgttggtacttttactatctcggcaccggtccggaagctggactgccctacggggcaaacaaggacgggatcatttgggtggctaccgaaggtgccctgaatactccaaaagatcatatcggcacccgtaaccctgctaataacgctgcgatcgttctgcaactgcctcagggtacaactctgccaaaaggcttctatgcagaagggtcgcgtggtggcagccaggcgagtagccgtagcagctcccgctctcgcaactcgtcccgtaactccactccgggctcttctcgcggcacgtccccggctcgtatggcaggtaacggtggtgacgctgctctggcgctgctactgctggacaggctgaaccagctggagtcgaagatgagtggtaaaggccaacagcagcagggccagaccgttaccaaaaagagcgcagctgaaatgtctaaaaaaccgcgacagaaacgtaccgcgactaaaggctgtaatgtaacacagtgcttcggtccgcgaggtccggagcaaactcaaggaaactttggcgatgcggatttaatcaagaaagggaccgactacaaacactggccgcaaattgcccagttcgccccatccgctagtgcattcttcggtatgagccgcatctcgtcaaaagaaacgccaagtggtacgtggctgacctacaccggtgctatcaagcttgataaagatgacccgaactttaaagaccaggttattctgcttaacaaacatattgatgcctataaaactttcccgccgaccgaacccaaaaaggacaaaaagaaaaaagctgatgaaacccaggctctaccgcagcgtcagaaaaaacagcaaactgtgactctgctgccagctgcggacctggatgatttttccaagcagctgcaacagtctatgagctctgcggactctacgcaggcttaa

SEQ ID NO: 127 - DNA, 2016 bp, Artificial Sequence
  Description of Artificial Sequence: Synthetic polynucleotide
atgcaccatcatcaccatcatggtggttctggttcgccgatacttggttattggaagattaaaggactggttcagcccacacgcctcctgctagaatacttagaggaaaaatatgaagagcacctgtacgaacgtgatgagggggacaaatggcgaaacaagaaatttgaattgggcttagaatttccaaatttgccgtattatatcgatggcgacgtaaaactgacccaatcaatggccattattcgctacatcgcagataaacataacatgctgggtggctgccctaaagaacgggctgagatctccatgctggaaggtgcggtgctcgacattcgctacggcgtcagtagaattgcgtatagcaaggatttcgaaactttaaaagtggatttcctgagcaaacttccggagatgctgaaaatgtttgaggataggctttgtcataagacgtatctcaatggtgatcatgttacccacccggactttatgctgtacgacgcccttgatgtcgttctgtatatggatcccatgtgcctggacgccttcccgaaattagtgtgttttaaaaaacgtatcgaagcgattccacagatcgataaatacttgaagtcttctaaatatattgcttggcctctgcaaggctggcaggcaacgttcggtgggggagatcatccgccaaaatcagatctggtgccgcgtgggagccctggcatacaccgcgacggtggttctggtgagaacctgtactttcaaagctcagataatgggcctcaaaaccagcgcaacgctccacgtataaccttcggtggcccgtctgactccacaggcagcaaccagaatggtgagcgtagtggagccaggtctaagcagcgccgtccccagggtctgccgaacaacacggcgagctggtttactgcgcttacccaacacggtaaagaagacttaaaattcccgcgtggccagggcgtcccgatcaacactaactcttccccggatgatcagattggttattaccgcagagcaactcgtcggattcgcggcggcgacggtaaaatgaaagatttgtctccgcgttggtacttttactatctcggcaccggtccggaagctggactgccctacggggcaaacaaggacgggatcatttgggtggctaccgaaggtgccctgaatactccaaaagatcatatcggcacccgtaaccctgctaataacgctgcgatcgttctgcaactgcctcagggtacaactctgccaaaaggcttctatgcagaagggtcgcgtggtggcagccaggcgagtagccgtagcagctcccgctctcgcaactcgtcccgtaactccactccgggctcttctcgcggcacgtccccggctcgtatggcaggtaacggtggtgacgctgctctggcgctgctactgctggacaggctgaaccagctggagtcgaagatgagtggtaaaggccaacagcagcagggccagaccgttaccaaaaagagcgcagctgaaatgtctaaaaaaccgcgacagaaacgtaccgcgactaaaggatacaatgtaacacagtgcttcggtccccgaggtccggagcaaactcaaggaaactttggcgatgccgaattaaataagaaagggaccgactacaaacactggccgcaaattgcccagttcgccccatccgctagtgcattcttcggtatgagccgcatctcatcaaaagaacaaccaagtggtacgtggctgacctacaccggtgctatcaagcttgataaagatgacccgaactttaaagaccaggttattctgcttaacaaacatattgatgcctataaaactttcccgccgaccgaacccaaaaaggacaaaaagaaaaaagctgatgaaacccaggctctaccgcagcgtcagaaaaaacagcaaactgtgactctgctgccagctgcggacctggatgatttttccaagcagctgcaacagtctatgagctctgcggactctacgcaggcttaa

SEQ ID NO: 128 - DNA, 2016 bp, Artificial Sequence
  Description of Artificial Sequence: Synthetic polynucleotide
atgcaccatcatcaccatcatggtggttctggttcgccgatacttggttattggaagattaaaggactggttcagcccacacgcctcctgctagaatacttagaggaaaaatatgaagagcacctgtacgaacgtgatgagggggacaaatggcgaaacaagaaatttgaattgggcttagaatttccaaatttgccgtattatatcgatggcgacgtaaaactgacccaatcaatggccattattcgctacatcgcagataaacataacatgctgggtggctgccctaaagaacgggctgagatctccatgctggaaggtgcggtgctcgacattcgctacggcgtcagtagaattgcgtatagcaaggatttcgaaactttaaaagtggatttcctgagcaaacttccggagatgctgaaaatgtttgaggataggctttgtcataagacgtatctcaatggtgatcatgttacccacccggactttatgctgtacgacgcccttgatgtcgttctgtatatggatcccatgtgcctggacgccttcccgaaattagtgtgttttaaaaaacgtatcgaagcgattccacagatcgataaatacttgaagtcttctaaatatattgcttggcctctgcaaggctggcaggcaacgttcggtgggggagatcatccgccaaaatcagatctggtgccgcgtgggagccctggcatacaccgcgacggtggttctggtgagaacctgtactttcaaagctcagataatgggcctcaaaaccagcgcaacgctccacgtataaccttcggtggcccgtctgactccacaggcagcaaccagaatggtgagcgtagtggagccaggtctaagcagcgccgtccccagggtctgccgaacaacacggcgagctggtttactgcgcttacccaacacggtaaagaagacttaaaattcccgcgtggccagggcgtcccgatcaacactaactcttccccggatgatcagattggttattaccgcagagcaactcgtcggattcgcggcggcgacggtaaaatgaaagatttgtctccgcgttggtacttttactatctcggcaccggtccggaagctggactgccctacggggcaaacaaggacgggatcatttgggtggctaccgaaggtgccctgaatactccaaaagatcatatcggcacccgtaaccctgctaataacgctgcgatctcactgcaactgcctcagggtacaactctgccaaaaggcttctatgcagaagggtcgcgtggtggcagccaggcgagtagccgtagcagctcccgctctcgcaactcgtcccgtaactccactccgggctcttctcgcggcacgtccccggctcgtatggcaggtaacggtggtgacgctgctctggcgctgctactgctggacaggctgaaccagctggagtcgaagatgagtggtaaaggccaacagcagcagggccagaccgttaccaaaaagagcgcagctgaagcatctaaaaaaccgcgacagaaacgtaccgcgactaaagcgtacaatgtaacacaggccttcggtcgtcgaggtccggagcaaactcaaggaaactttggcgatcaggaattaatccgccaggggaccgactacaaacactggccgcaaattgcccagttcgccccatccgctagtgcattcttcggtatgagccgcatcggcatggaagtaacgccaagtggtacgtggctgacctacaccggtgctatcaagcttgatgacaaggacccgaactttaaagaccaggttattctgcttaacaaacatattgatgcctataaaactttcccgccgaccgaacccaaaaaggacaaaaagaaaaaagctgatgaaacccaggctctaccgcagcgtcagaaaaaacagcaaactgtgactctgctgccagctgcggacctggatgatttttccaagcagctgcaacagtctatgagctctgcggactctacgcaggcttaa

SEQ ID NO: 129 - DNA, 2016 bp, Artificial Sequence
  Description of Artificial Sequence: Synthetic polynucleotide
atgcaccatcatcaccatcatggtggttctggttcgccgatacttggttattggaagattaaaggactggttcagcccacacgcctcctgctagaatacttagaggaaaaatatgaagagcacctgtacgaacgtgatgagggggacaaatggcgaaacaagaaatttgaattgggcttagaatttccaaatttgccgtattatatcgatggcgacgtaaaactgacccaatcaatggccattattcgctacatcgcagataaacataacatgctgggtggctgccctaaagaacgggctgagatctccatgctggaaggtgcggtgctcgacattcgctacggcgtcagtagaattgcgtatagcaaggatttcgaaactttaaaagtggatttcctgagcaaacttccggagatgctgaaaatgtttgaggataggctttgtcataagacgtatctcaatggtgatcatgttacccacccggactttatgctgtacgacgcccttgatgtcgttctgtatatggatcccatgtgcctggacgccttcccgaaattagtgtgttttaaaaaacgtatcgaagcgattccacagatcgataaatacttgaagtcttctaaatatattgcttggcctctgcaaggctggcaggcaacgttcggtgggggagatcatccgccaaaatcagatctggtgccgcgtgggagccctggcatacaccgcgacggtggttctggtgagaacctgtactttcaaagctcagataatgggcctcaaaaccagcgcaacgctccacgtataaccttcggtggcccgtctgactccacaggcagcaaccagaatggtgagcgtagtggagccaggtctaagcagcgccgtccccagggtctgccgaacaacacggcgagctggtttactgcgcttacccaacacggtaaagaagacttaaaattcccgcgtggccagggcgtcccgatcaacactaactcttccccggatgatcagattggttattaccgcagagcaactcgtcggattcgcggcggcgacggtaaaatgaaagatttgtctccgcgttggtacttttactatctcggcaccggtccggaagctggactgccctacggggcaaacaaggacgggatcatttgggtggctaccgaaggtgccctgaatactccaaaagatcatatcggcacccgtaaccctgctaataacgctgcgatcgttctgcaactgcctcagggtacaactctgccaaaaggcttctatgcagaagggtcgcgtggtggcagccaggcgagtagccgtagcagctcccgctctcgcaactcgtcccgtaactccactccgggctcttctcgcggcacgtccccggctcgtatggcaggtaacggtggtgacgctgctctggcgctgctactgctggacaggctgaaccagctggagtcgaagatgagtggtaaaggccaacagcagcagggccagaccgttaccaaaaagagcgcagctgaagcatctaaaaaaccgcgacagaaacgtaccgcgactaaagcgtacaatgtaacacaggccttcggtcgtcgaggtccggagcaaactcaaggaaactttggcgatgccgaattaatccgccaggggaccgactacaaacactggccgcaaattgcccagttcgccccatccgctagtgcattcttcggtatgagccgcatcggcatggaagtaacgccaagtggtacgtggctgacctacaccggtgctatcaagcttgatgacaaggacccgaactttaaagaccaggttattctgcttaacaaacatattgatgcctataaaactttcccgccgaccgaacccaaaaaggacaaaaagaaaaaagctgatgaaacccaggctctaccgcagcgtcagaaaaaacagcaaactgtgactctgctgccagctgcggacctggatgatttttccaagcagctgcaacagtctatgagctctgcggactctacgcaggcttaa

SEQ ID NO: 130 - DNA, 2016 bp, Artificial Sequence
  Description of Artificial Sequence: Synthetic polynucleotide
atgcaccatcatcaccatcatggtggttctggttcgccgatacttggttattggaagattaaaggactggttcagcccacacgcctcctgctagaatacttagaggaaaaatatgaagagcacctgtacgaacgtgatgagggggacaaatggcgaaacaagaaatttgaattgggcttagaatttccaaatttgccgtattatatcgatggcgacgtaaaactgacccaatcaatggccattattcgctacatcgcagataaacataacatgctgggtggctgccctaaagaacgggctgagatctccatgctggaaggtgcggtgctcgacattcgctacggcgtcagtagaattgcgtatagcaaggatttcgaaactttaaaagtggatttcctgagcaaacttccggagatgctgaaaatgtttgaggataggctttgtcataagacgtatctcaatggtgatcatgttacccacccggactttatgctgtacgacgcccttgatgtcgttctgtatatggatcccatgtgcctggacgccttcccgaaattagtgtgttttaaaaaacgtatcgaagcgattccacagatcgataaatacttgaagtcttctaaatatattgcttggcctctgcaaggctggcaggcaacgttcggtgggggagatcatccgccaaaatcagatctggtgccgcgtgggagccctggcatacaccgcgacggtggttctggtgagaacctgtactttcaaagctcagataatgggcctcaaaaccagcgcaacgctccacgtataaccttcggtggcccgtctgactccacaggcagcaaccagaatggtgagcgtagtggagccaggtctaagcagcgccgtccccagggtctgccgaacaacacggcgagctggtttactgcgcttacccaacacggtaaagaagacttaaaattcccgcgtggccagggcgtcccgatcaacactaactcttccccggatgatcagattggttattaccgcagagcaactcgtcggattcgcggcggcgacggtaaaatgaaagatttgtctccgcgttggtacttttactatctcggcaccggtccggaagctggactgccctacggggcaaacaaggacgggatcatttgggtggctaccgaaggtgccctgaatactccaaaagatcatatcggcacccgtaaccctgctaataacgctgcgatcctgctgcaactgcctcagggtacaactctgccaaaaggcttctatgcagaagggtcgcgtggtggcagccaggcgagtagccgtagcagctcccgctctcgcaactcgtcccgtaactccactccgggctcttctcgcggcacgtccccggctcgtatggcaggtaacggtggtgacgctgctctggcgctgctactgctggacaggctgaaccagctggagtcgaagatgagtggtaaaggccaacagcagcagggccagaccgttaccaaaaagagcgcagctgaagcatctaaaaaaccgcgacagaaacgtaccgcgactaaagcgtacaatgtaacacaggccttcggtcgtcgaggtccggagcaaactcaaggaaactttggcgatcaggaattaatccgccaggggaccgactacaaacactggccgcaaattgcccagttcgccccatccgctagtgcattcttcggtatgagccgcatcggcatggaagtaacgccaagtggtacgtggctgacctacaccggtgctatcaagcttgatgacaaggacccgaactttaaagaccaggttattctgcttaacaaacatattgatgcctataaaactttcccgccgaccgaacccaaaaaggacaaaaagaaaaaagctgatgaaacccaggctctaccgcagcgtcagaaaaaacagcaaactgtgactctgctgccagctgcggacctggatgatttttccaagcagctgcaacagtctatgagctctgcggactctacgcaggcttaa

SEQ ID NO: 131 - DNA, 2016 bp, Artificial Sequence
  Description of Artificial Sequence: Synthetic polynucleotide
atgcaccatcatcaccatcatggtggttctggttcgccgatacttggttattggaagattaaaggactggttcagcccacacgcctcctgctagaatacttagaggaaaaatatgaagagcacctgtacgaacgtgatgagggggacaaatggcgaaacaagaaatttgaattgggcttagaatttccaaatttgccgtattatatcgatggcgacgtaaaactgacccaatcaatggccattattcgctacatcgcagataaacataacatgctgggtggctgccctaaagaacgggctgagatctccatgctggaaggtgcggtgctcgacattcgctacggcgtcagtagaattgcgtatagcaaggatttcgaaactttaaaagtggatttcctgagcaaacttccggagatgctgaaaatgtttgaggataggctttgtcataagacgtatctcaatggtgatcatgttacccacccggactttatgctgtacgacgcccttgatgtcgttctgtatatggatcccatgtgcctggacgccttcccgaaattagtgtgttttaaaaaacgtatcgaagcgattccacagatcgataaatacttgaagtcttctaaatatattgcttggcctctgcaaggctggcaggcaacgttcggtgggggagatcatccgccaaaatcagatctggtgccgcgtgggagccctggcatacaccgcgacggtggttctggtgagaacctgtactttcaaagctcagataatgggcctcaaaaccagcgcaacgctccacgtataaccttcggtggcccgtctgactccacaggcagcaaccagaatggtgagcgtagtggagccaggtctaagcagcgccgtccccagggtctgccgaacaacacggcgagctggtttactgcgcttacccaacacggtaaagaagacttaaaattcccgcgtggccagggcgtcccgatcaacactaactcttccccggatgatcagattggttattaccgcagagcaactcgtcggattcgcggcggcgacggtaaaatgaaagatttgtctccgcgttggtacttttactatctcggcaccggtccggaagctggactgccctacggggcaaacaaggacgggatcatttgggtggctaccgaaggtgccctgaatactccaaaagatcatatcggcacccgtaaccctgctaataacgctgcgatcgttctgcaactgcctcagggtacaactctgccaaaaggcttctatgcagaagggtcgcgtggtggcagccaggcgagtagccgtagcagctcccgctctcgcaactcgtcccgtaactccactccgggctctgagcgcggcacggaaccggctcgtatggcaggtaacggtggtgacgctgctctggcgctgctactgctggacaggctgaaccagctggagtcgaagatgagtggtaaaggccaacagcagcagggccagaccgttaccaaaaagagcgcagctgaagcatctaaaaaaccgcgacagaaacgtaccgcgactaaagcgtacaatgtaacacaggccttcggtcgtcgaggtccggagcaaactcaaggaaactttggcgatcaggaattaatccgccaggggaccgactacaaacactggccgcaaattgcccagttcgccccatccgctagtgcattcttcggtatgagccgcatcggcatggaagtaacgccaagtggtacgtggctgacctacaccggtgctatcaagcttgatgacaaggacccgaactttaaagaccaggttattctgcttaacaaacatattgatgcctataaaactttcccgccgaccgaacccaaaaaggacaaaaagaaaaaagctgatgaaacccaggctctaccgcagcgtcagaaaaaacagcaaactgtgactctgctgccagctgcggacctggatgatttttccaagcagctgcaacagtctatgagctctgcggactctacgcaggcttaa

SEQ ID NO: 132 - DNA, 2016 bp, Artificial Sequence
  Description of Artificial Sequence: Synthetic polynucleotide
atgcaccatcatcaccatcatggtggttctggttcgccgatacttggttattggaagattaaaggactggttcagcccacacgcctcctgctagaatacttagaggaaaaatatgaagagcacctgtacgaacgtgatgagggggacaaatggcgaaacaagaaatttgaattgggcttagaatttccaaatttgccgtattatatcgatggcgacgtaaaactgacccaatcaatggccattattcgctacatcgcagataaacataacatgctgggtggctgccctaaagaacgggctgagatctccatgctggaaggtgcggtgctcgacattcgctacggcgtcagtagaattgcgtatagcaaggatttcgaaactttaaaagtggatttcctgagcaaacttccggagatgctgaaaatgtttgaggataggctttgtcataagacgtatctcaatggtgatcatgttacccacccggactttatgctgtacgacgcccttgatgtcgttctgtatatggatcccatgtgcctggacgccttcccgaaattagtgtgttttaaaaaacgtatcgaagcgattccacagatcgataaatacttgaagtcttctaaatatattgcttggcctctgcaaggctggcaggcaacgttcggtgggggagatcatccgccaaaatcagatctggtgccgcgtgggagccctggcatacaccgcgacggtggttctggtgagaacctgtactttcaaagctcagataatgggcctcaaaaccagcgcaacgctccacgtataaccttcggtggcccgtctgactccacaggcagcaaccagaatggtgagcgtagtggagccaggtctaagcagcgccgtccccagggtctgccgaacaacacggcgagctggtttactccgcttacccaaaatggtaaagaagacttaaaattcccgccaggccagggcgtcccgatcaacactaactcttccccggatgatcagattggttattaccgcagagcaactcgtcggattcgcggcggcgacggtaaaatgaaagatttgcctccgaagtggtacttttactatctcggcaccggtccgcacgctgatctgccctacgggcaaaaacaagacggggtattttgggtggctcgacccggtgccctgaatactccaaaagatcatatcggcacccgtaaccctgctaataacgctgcgatcccgctgcaactgcctccgggtacaaagctgccaaaaggcttctatgcagaagggtcgcgtggtggcagccaggcgagtagccgtagcagctcccgctctcgcaactcgtcccgtaactccactccgggctcttctcgcggcacgtccccggctcgtatggcaggtaacggtggtgacgctgctctggcgctgctactgctggacaggctgaaccagctggagtcgaagatgagtggtaaaggccaacagcagcagggccagaccgttaccaaaaagagcgcagctgaagcatctaaaaaaccgcgacagaaacgtaccgcgactaaagcgtacaatgtaacacaggccttcggtcgtcgaggtccggagcaaactcaaggaaactttggcgatcaggaattaatccgccaggggaccgactacaaacactggccgcaaattgcccagttcgccccatccgctagtgcattcttcggtatgagccgcatcggcatggaagtaacgccaagtggtacgtggctgacctacaccggtgctatcaagcttgatgacaaggacccgaactttaaagaccaggttattctgcttaacaaacatattgatgcctataaaactttcccgccgaccgaacccaaaaaggacaaaaagaaaaaagctgatgaaacccaggctctaccgcagcgtcagaaaaaacagcaaactgtgactctgctgccagctgcggacctggatgatttttccaagcagctgcaacagtctatgagctctgcggactctacgcaggcttaa

SEQ ID NO: 133 - DNA, 2016 bp, Artificial Sequence
  Description of Artificial Sequence: Synthetic polynucleotide
atgcaccatcatcaccatcatggtggttctggttcgccgatacttggttattggaagattaaaggactggttcagcccacacgcctcctgctagaatacttagaggaaaaatatgaagagcacctgtacgaacgtgatgagggggacaaatggcgaaacaagaaatttgaattgggcttagaatttccaaatttgccgtattatatcgatggcgacgtaaaactgacccaatcaatggccattattcgctacatcgcagataaacataacatgctgggtggctgccctaaagaacgggctgagatctccatgctggaaggtgcggtgctcgacattcgctacggcgtcagtagaattgcgtatagcaaggatttcgaaactttaaaagtggatttcctgagcaaacttccggagatgctgaaaatgtttgaggataggctttgtcataagacgtatctcaatggtgatcatgttacccacccggactttatgctgtacgacgcccttgatgtcgttctgtatatggatcccatgtgcctggacgccttcccgaaattagtgtgttttaaaaaacgtatcgaagcgattccacagatcgataaatacttgaagtcttctaaatatattgcttggcctctgcaaggctggcaggcaacgttcggtgggggagatcatccgccaaaatcagatctggtgccgcgtgggagccctggcatacaccgcgacggtggttctggtgagaacctgtactttcaaagctcagataatgggcctcaaaaccagcgcaacgctccacgtataaccttcggtggcccgtctgactccacaggcagcaaccagaatggtgagcgtagtggagccaggtctaagcagcgccgtccccagggtctgccgaacaacacggcgagctggtttactgcgcttacccaacacggtaaagaagacttaaaattcccgcgtggccagggcgtcccgatcaacactaactcttccccggatgatcagattggttattaccgcagagcaactcgtcggattcgcggcggcgacggtaaaatgaaagatttgtctccgcgttggtacttttactatctcggcaccggtccggaagctggactgccctacggggcaaacaaggacgggatcatttgggtggctaccgaaggtgccctgaatactccaaaagatcatatcggcacccgtaaccctgctaataacgctgcgatcgttctgcaactgcctcagggtacaactctgccaaaaggcttctatgcagaagggtcgcgtggtggcagccaggcgagtagccgtagcagctcccgctctcgcaactcgtcccgtaactccactccgggctcttctcgcggcacgtccccggctcgtatggcaggtaacggtggtgacgctgctctggcgctgctactgctggacaggctgaaccagctggagtcgaagatgagtggtaaaggccaacagcagcagggccagaccgttaccaaaaagagcgcagctgaagcatctaaaaaaccgcgacagaaacgtaccgcgactaaagcgtacaatgtaacacaggccttcggtcgtcgaggtccggagcaaactcaaggaaactttggcgatcaggaattaatccgccaggggaccgactacaaacgctggccgcaaattgcccagttcgccccatccgctagtgcattcttcggtatgagccgcatcggcatggaagtaacgccaagtggtacgtggctgacctacaccggtgctatcaagcttgatgacaaggacccgaactttaaagaccaggttattctgcttaacaaacatattgatgcctataaaactttcccgccgaccgaacccaaaaaggacaaaaagaaaaaagctgatgaaacccaggctctaccgcagcgtcagaaaaaacagcaaactgtgactctgctgccagctgcggacctggatgatttttccaagcagctgcaacagtctatgagctctgcggactctacgcaggcttaa

SEQ ID NO: 134 - DNA, 2016 bp, Artificial Sequence
  Description of Artificial Sequence: Synthetic polynucleotide
atgcaccatcatcaccatcatggtggttctggttcgccgatacttggttattggaagattaaaggactggttcagcccacacgcctcctgctagaatacttagaggaaaaatatgaagagcacctgtacgaacgtgatgagggggacaaatggcgaaacaagaaatttgaattgggcttagaatttccaaatttgccgtattatatcgatggcgacgtaaaactgacccaatcaatggccattattcgctacatcgcagataaacataacatgctgggtggctgccctaaagaacgggctgagatctccatgctggaaggtgcggtgctcgacattcgctacggcgtcagtagaattgcgtatagcaaggatttcgaaactttaaaagtggatttcctgagcaaacttccggagatgctgaaaatgtttgaggataggctttgtcataagacgtatctcaatggtgatcatgttacccacccggactttatgctgtacgacgcccttgatgtcgttctgtatatggatcccatgtgcctggacgccttcccgaaattagtgtgttttaaaaaacgtatcgaagcgattccacagatcgataaatacttgaagtcttctaaatatattgcttggcctctgcaaggctggcaggcaacgttcggtgggggagatcatccgccaaaatcagatctggtgccgcgtgggagccctggcatacaccgcgacggtggttctggtgagaacctgtactttcaaagctcagataatgggcctcaaaaccagcgcaacgctccacgtataaccttcggtggcccgtctgactccacaggcagcaaccagaatggtgagcgtagtggagccaggtctaagcagcgccgtccccagggtctgccgaacaacacggcgagctggtttactgcgcttacccaacacggtaaagaagacttaaaattcccgcgtggccagggcgtcccgatcaacactaactcttccccggatgatcagattggtaattaccgcagagcaactcgtcggattcgcggcggcgacggtaaaatgaaagatttgtctccgcgttggtacttttactatctcggcaccggtccggaagctggactgccctacggggcaaacaaggacgggatcatttgggtggctaccgaaggtgccctgaatactccaaaagatcatatcggcacccgtaaccctgctaataacgctgcgatcgttctgcaactgcctcagggtacaactctgccaaaaggcttctatgcagaagggtcgcgtggtggcagccaggcgagtagccgtagcagctcccgctctcgcaactcgtcccgtaactccactccgggctcttctcgcggcacgtccccggctcgtatggcaggtaacggtggtgacgctgctctggcgctgctactgctggacaggctgaaccagctggagtcgaagatgagtggtaaaggccaacagcagcagggccagaccgttaccaaaaagagcgcagctgaagcatctaaaaaaccgcgacagaaacgtaccgcgactaaagcgtacaatgtaacacaggccttcggtcgtcgaggtccggagcaaactcaaggaaactttggcgatcaggaattaatccgccaggggaccgactacaaacactggccgcaaattgcccagttcgccccatccgctagtgcattcttcggtatgagccgcatcggcatggaagtaacgccaagtggtacgtggctgacctacaccggtgctatcaagcttgatgacaaggacccgaactttaaagaccaggttattctgcttaacaaacatattgatgcctataaaactttcccgccgaccgaacccaaaaaggacaaaaagaaaaaagctgatgaaacccaggctctaccgcagcgtcagaaaaaacagcaaactgtgactctgctgccagctgcggacctggatgatttttccaagcagctgcaacagtctatgagctctgcggactctacgcaggcttaa

SEQ ID NO: 135 - DNA, 2016 bp, Artificial Sequence
  Description of Artificial Sequence: Synthetic polynucleotide
atgcaccatcatcaccatcatggtggttctggttcgccgatacttggttattggaagattaaaggactggttcagcccacacgcctcctgctagaatacttagaggaaaaatatgaagagcacctgtacgaacgtgatgagggggacaaatggcgaaacaagaaatttgaattgggcttagaatttccaaatttgccgtattatatcgatggcgacgtaaaactgacccaatcaatggccattattcgctacatcgcagataaacataacatgctgggtggctgccctaaagaacgggctgagatctccatgctggaaggtgcggtgctcgacattcgctacggcgtcagtagaattgcgtatagcaaggatttcgaaactttaaaagtggatttcctgagcaaacttccggagatgctgaaaatgtttgaggataggctttgtcataagacgtatctcaatggtgatcatgttacccacccggactttatgctgtacgacgcccttgatgtcgttctgtatatggatcccatgtgcctggacgccttcccgaaattagtgtgttttaaaaaacgtatcgaagcgattccacagatcgataaatacttgaagtcttctaaatatattgcttggcctctgcaaggctggcaggcaacgttcggtgggggagatcatccgccaaaatcagatctggtgccgcgtgggagccctggcatacaccgcgacggtggttctggtgagaacctgtactttcaaagctcagataatgggcctcaaaaccagcgcaacgctccacgtataaccttcggtggcccgtctgactccacaggcagcaaccagaatggtgagcgtagtggagccaggtctaagcagcgccgtccccagggtctgccgaacaacacggcgagctggtttactgcgcttgttcaacacggtaaagaagacttaaaattcccgcgtggccagggcgtcccgatcaacactaactcttccccggatgatcagattggttattaccgcagagcaactcgtcggattcgcggcggcgacggtaaaatgaaagatttgtctccgcgttggtacttttactatctcggcaccggtccggaagctggactgccctacggggcaaacaaggacgggatcatttgggtggctaccgaaggtgccctgaatactccaaaagatcatatcggcacccgtaaccctgctaataacgctgcgatcgttctgcaactgcctcagggtacaactctgccaaaaggcttctatgcagaagggtcgcgtggtggcagccaggcgagtagccgtagcagctcccgctctcgcaactcgtcccgtaactccactccgggctcttctcgcggcacgtccccggctcgtatggcaggtaacggtggtgacgctgctctggcgctgctactgctggacaggctgaaccagctggagtcgaagatgagtggtaaaggccaacagcagcagggccagaccgttaccaaaaagagcgcagctgaagcatctaaaaaaccgcgacagaaacgtaccgcgactaaagcgtacaatgtaacacaggccttcggtcgtcgaggtccggagcaaactcaaggaaactttggcgatcaggaattaatccgccaggggaccgactacaaacactggccgcaaattgcccagttcgccccatccgctagtgcattcttcggtatgagccgcatcggcatggaagtaacgccaagtggtacgtggctgacctacaccggtgctatcaagcttgatgacaaggacccgaactttaaagaccaggttattctgcttaacaaacatattgatgcctataaaactttcccgccgaccgaacccaaaaaggacaaaaagaaaaaagctgatgaaacccaggctctaccgcagcgtcagaaaaaacagcaaactgtgactctgctgccagctgcggacctggatgatttttccaagcagctgcaacagtctatgagctctgcggactctacgcaggcttaa

SEQ ID NO: 136 - DNA, 2016 bp, Artificial Sequence
  Description of Artificial Sequence: Synthetic polynucleotide
atgcaccatcatcaccatcatggtggttctggttcgccgatacttggttattggaagattaaaggactggttcagcccacacgcctcctgctagaatacttagaggaaaaatatgaagagcacctgtacgaacgtgatgagggggacaaatggcgaaacaagaaatttgaattgggcttagaatttccaaatttgccgtattatatcgatggcgacgtaaaactgacccaatcaatggccattattcgctacatcgcagataaacataacatgctgggtggctgccctaaagaacgggctgagatctccatgctggaaggtgcggtgctcgacattcgctacggcgtcagtagaattgcgtatagcaaggatttcgaaactttaaaagtggatttcctgagcaaacttccggagatgctgaaaatgtttgaggataggctttgtcataagacgtatctcaatggtgatcatgttacccacccggactttatgctgtacgacgcccttgatgtcgttctgtatatggatcccatgtgcctggacgccttcccgaaattagtgtgttttaaaaaacgtatcgaagcgattccacagatcgataaatacttgaagtcttctaaatatattgcttggcctctgcaaggctggcaggcaacgttcggtgggggagatcatccgccaaaatcagatctggtgccgcgtgggagccctggcatacaccgcgacggtggttctggtgagaacctgtactttcaaagctcagataatgggcctcaaaaccagcgcaacgctccacgtataaccttcggtggcccgtctgactccacaggcagcaaccagaatggtgagcgtagtggagccaggtctaagcagcgccgtccccagggtctgccgaacaacacggcgagctggtttactccgcttacccaaaatggtaaagaagacttaaaattcccgccaggccagggcgtcccgatcaacactaactcttccccggatgatcagattggttattaccgcagagcaactcgtcggattcgcggcggcgacggtaaaatgaaagatttgcctccgaaatggtacttttactatctcggcaccggtccgcacgctgatctgccctacgggcaaaagcatgacggggtagtgtgggtggctcgaccgggtgccctgaatactccaaaagatcatatcggcacccgtaaccctgctaataacgctgcgatccccctgcaactgcctccgggtacaaagctgccaaaaggcttctatgcagaagggtcgcgtggtggcagccaggcgagtagccgtagcagctcccgctctcgcaactcgtcccgtaactccactccgggctcttctcgcggcacgtccccggctcgtatggcaggtaacggtggtgacgctgctctggcgctgctactgctggacaggctgaaccagctggagtcgaagatgagtggtaaaggccaacagcagcagggccagaccgttaccaaaaagagcgcagctgaagcatctaaaaaaccgcgacagaaacgtaccgcgactaaagcgtacaatgtaacacaggccttcggtcgtcgaggtccggagcaaactcaaggaaactttggcgatcaggaattaatccgccaggggaccgactacaaacactggccgcaaattgcccagttcgccccatccgctagtgcattcttcggtatgagccgcatcggcatggaagtaacgccaagtggtacgtggctgacctacaccggtgctatcaagcttgatgacaaggacccgaactttaaagaccaggttattctgcttaacaaacatattgatgcctataaaactttcccgccgaccgaacccaaaaaggacaaaaagaaaaaagctgatgaaacccaggctctaccgcagcgtcagaaaaaacagcaaactgtgactctgctgccagctgcggacctggatgatttttccaagcagctgcaacagtctatgagctctgcggactctacgcaggcttaa

SEQ ID NO: 137 - DNA, 2016 bp, Artificial Sequence
  Description of Artificial Sequence: Synthetic polynucleotide
atgcaccatcatcaccatcatggtggttctggttcgccgatacttggttattggaagattaaaggactggttcagcccacacgcctcctgctagaatacttagaggaaaaatatgaagagcacctgtacgaacgtgatgagggggacaaatggcgaaacaagaaatttgaattgggcttagaatttccaaatttgccgtattatatcgatggcgacgtaaaactgacccaatcaatggccattattcgctacatcgcagataaacataacatgctgggtggctgccctaaagaacgggctgagatctccatgctggaaggtgcggtgctcgacattcgctacggcgtcagtagaattgcgtatagcaaggatttcgaaactttaaaagtggatttcctgagcaaacttccggagatgctgaaaatgtttgaggataggctttgtcataagacgtatctcaatggtgatcatgttacccacccggactttatgctgtacgacgcccttgatgtcgttctgtatatggatcccatgtgcctggacgccttcccgaaattagtgtgttttaaaaaacgtatcgaagcgattccacagatcgataaatacttgaagtcttctaaatatattgcttggcctctgcaaggctggcaggcaacgttcggtgggggagatcatccgccaaaatcagatctggtgccgcgtgggagccctggcatacaccgcgacggtggttctggtgagaacctgtactttcaaagctcagataatgggcctcaaaaccagcgcaacgctccacgtataaccttcggtggcccgtctgactccacaggcagcaaccagaatggtgagcgtagtggagccaggtctaagcagcgccgtccccagggtctgccgaacaacacggcgagctggtttactgcgcttacccaacacggtaaagaagacttaaaattcccgcgtggccagggcgtcccgatcaacactaactcttccccggatgatcagattggttattaccgcagagcaactcgtcggattcgcggcggcgacggtaaaatgaaagatttgtctccgcgttggtacttttactatctcggcaccggtccggaagctggactgccctacggggcaaacaaggacgggatcatttgggtggctaccgaaggtgccctgaatactccaaaagatcatatcggcacccgtaaccctgctaataacgctgcgatcgttctgcaactgcctcagggtacaactctgccaaaaggcttctatgcagaagggtcgcgtggtggcagccaggcgagtagccgtagcagctcccgctctcgcaactcgtcccgtaactccactccgggctcttctcgcggcacgtccccggctcgtatggcaggtaacggtggtgacgctgctctggcgctgctactgctggacaggctgaaccagctggagtcgaagatgagtggtaaaggccaacagcagcagggccagaccgttaccaaaaagagcgcagctgaagcatctaaaaaaccgcgacagaaacgtaccgcgactaaagcgtacaatgtaacacaggccttcggtcgtcgaggtccggagcaaactcaaggaaactttggcgatcaggaattaatccgccaggggaccgactacaaacactggccgcaaattgcccagttcgccccatccgctagtgcattcttcggtatgagccgcatcggcatggaagtaacgccaagtggtacgtggctgacctacaccggtgctatcaagcttgattcgaaggacccgaactttaaagaccaggttattctgcttaacaaacatattgatgcctataaaactttcccgccgaccgaacccaaaaaggacaaaaagaaaaaagctgatgaaacccaggctctaccgcagcgtcagaaaaaacagcaaactgtgactctgctgccagctgcggacctggatgatttttccaagcagctgcaacagtctatgagctctgcggactctacgcaggcttaa

SEQ ID NO: 138 - DNA, 2016 bp, Artificial Sequence
  Description of Artificial Sequence: Synthetic polynucleotide
atgcaccatcatcaccatcatggtggttctggttcgccgatacttggttattggaagattaaaggactggttcagcccacacgcctcctgctagaatacttagaggaaaaatatgaagagcacctgtacgaacgtgatgagggggacaaatggcgaaacaagaaatttgaattgggcttagaatttccaaatttgccgtattatatcgatggcgacgtaaaactgacccaatcaatggccattattcgctacatcgcagataaacataacatgctgggtggctgccctaaagaacgggctgagatctccatgctggaaggtgcggtgctcgacattcgctacggcgtcagtagaattgcgtatagcaaggatttcgaaactttaaaagtggatttcctgagcaaacttccggagatgctgaaaatgtttgaggataggctttgtcataagacgtatctcaatggtgatcatgttacccacccggactttatgctgtacgacgcccttgatgtcgttctgtatatggatcccatgtgcctggacgccttcccgaaattagtgtgttttaaaaaacgtatcgaagcgattccacagatcgataaatacttgaagtcttctaaatatattgcttggcctctgcaaggctggcaggcaacgttcggtgggggagatcatccgccaaaatcagatctggtgccgcgtgggagccctggcatacaccgcgacggtggttctggtgagaacctgtactttcaaagctcagataatgggcctcaaaaccagcgcaacgctccacgtataaccttcggtggcccgtctgactccacaggcagcaaccagaatggtgagcgtagtggagccaggtctaagcagcgccgtccccagggtctgccgaacaacacggcgagctggtttactgcgcttacccaacacggtaaagaagacttaaaattcccgcgtggccagggcgtcccgatcaacactaactcttccccggatgatcagattggttattaccgcagagcaactcgtcggattcgcggcggcgacggtaaaatgaaagatttgtctccgcgttggtacttttactatctcggcaccggtccggaagctggactgccctacggggcaaacaaggacgggatcatttgggtggctaccgaaggtgccctgaatactccaaaagatcatatcggcacccgtaaccctgctaataacgctgcgatcgttctgcaactgcctcagggtacaactctgccaaaaggcttctatgcagaagggtcgcgtggtggcagccaggcgagtagccgtagcagctcccgctctcgcaactcgtcccgtaactccactccgggcgagtctcgcggcacgtccccggctcgtatggcaggtaacggtggtgacgctgctctggcgctgctactgctggacaggctgaaccagctggagtcgaagatgagtggtaaaggccaacagcagcagggccagaccgttaccaaaaagagcgcagctgaagcatctaaaaaaccgcgacagaaacgtaccgcgactaaagcgtacaatgtaacacaggccttcggtcgtcgaggtccggagcaaactcaaggaaactttggcgatcaggaattaatccgccaggggaccgactacaaacactggccgcaaattgcccagttcgccccatccgctagtgcattcttcggtatgagccgcatcggcatggaagtaacgccaagtggtacgtggctgacctacaccggtgctatcaagcttgatgacaaggacccgaactttaaagaccaggttattctgcttaacaaacatattgatgcctataaaactttcccgccgaccgaacccaaaaaggacaaaaagaaaaaagctgatgaaacccaggctctaccgcagcgtcagaaaaaacagcaaactgtgactctgctgccagctgcggacctggatgatttttccaagcagctgcaacagtctatgagctctgcggactctacgcaggcttaa

SEQ ID NO: 139 - DNA, 2016 bp, Artificial Sequence
  Description of Artificial Sequence: Synthetic polynucleotide
atgcaccatcatcaccatcatggtggttctggttcgccgatacttggttattggaagattaaaggactggttcagcccacacgcctcctgctagaatacttagaggaaaaatatgaagagcacctgtacgaacgtgatgagggggacaaatggcgaaacaagaaatttgaattgggcttagaatttccaaatttgccgtattatatcgatggcgacgtaaaactgacccaatcaatggccattattcgctacatcgcagataaacataacatgctgggtggctgccctaaagaacgggctgagatctccatgctggaaggtgcggtgctcgacattcgctacggcgtcagtagaattgcgtatagcaaggatttcgaaactttaaaagtggatttcctgagcaaacttccggagatgctgaaaatgtttgaggataggctttgtcataagacgtatctcaatggtgatcatgttacccacccggactttatgctgtacgacgcccttgatgtcgttctgtatatggatcccatgtgcctggacgccttcccgaaattagtgtgttttaaaaaacgtatcgaagcgattccacagatcgataaatacttgaagtcttctaaatatattgcttggcctctgcaaggctggcaggcaacgttcggtgggggagatcatccgccaaaatcagatctggtgccgcgtgggagccctggcatacaccgcgacggtggttctggtgagaacctgtactttcaaagctcagataatgggcctcaaaaccagcgcaacgctccacgtataaccttcggtggcccgtctgactccacaggcagcaaccagaatggtgagcgtagtggagccaggtctaagcagcgccgtccccagggtctgccgaacaacacggcgagctggtttactgcgcttacccaacacggtaaagaagacttaaaattcccgcgtggccagggcgtcccgatcaacactaactcttccccggatgatcagattggttattaccgcagagcaactcgtcggattcgcggcggcgacggtaaaatgaaagatttgtctccgcgttggtacttttactatctccgaaccggtccggaagctggactgccctacggggcaaacaaggacgggatcatttgggtggctaccgaaggtgccctgaatactccaaaagatcatatcggcacccgtaaccctgctaataacgctgcgatcgttctgcaactgcctcagggtacaactctgccaaaaggcttctatgcagaagggtcgcgtggtggcagccaggcgagtagccgtagcagctcccgctctcgcaactcgtcccgtaactccactccgggctcttctcgcggcacgtccccggctcgtatggcaggtaacggtggtgacgctgctctggcgctgctactgctggacaggctgaaccagctggagtcgaagatgagtggtaaaggccaacagcagcagggccagaccgttaccaaaaagagcgcagctgaagcatctaaaaaaccgcgacagaaacgtaccgcgactaaagcgtacaatgtaacacaggccttcggtcgtcgaggtccggagcaaactcaaggaaactttggcgatcaggaattaatccgccaggggaccgactacaaacactggccgcaaattgcccagttcgccccatccgctagtgcattcttcggtatgagccgcatcggcatggaagtaacgccaagtggtacgtggctgacctacaccggtgctatcaagcttgatgacaaggacccgaactttaaagaccaggttattctgcttaacaaacatattgatgcctataaaactttcccgccgaccgaacccaaaaaggacaaaaagaaaaaagctgatgaaacccaggctctaccgcagcgtcagaaaaaacagcaaactgtgactctgctgccagctgcggacctggatgatttttccaagcagctgcaacagtctatgagctctgcggactctacgcaggcttaa

SEQ ID NO: 140 - DNA, 2016 bp, Artificial Sequence
  Description of Artificial Sequence: Synthetic polynucleotide
atgcaccatcatcaccatcatggtggttctggttcgccgatacttggttattggaagattaaaggactggttcagcccacacgcctcctgctagaatacttagaggaaaaatatgaagagcacctgtacgaacgtgatgagggggacaaatggcgaaacaagaaatttgaattgggcttagaatttccaaatttgccgtattatatcgatggcgacgtaaaactgacccaatcaatggccattattcgctacatcgcagataaacataacatgctgggtggctgccctaaagaacgggctgagatctccatgctggaaggtgcggtgctcgacattcgctacggcgtcagtagaattgcgtatagcaaggatttcgaaactttaaaagtggatttcctgagcaaacttccggagatgctgaaaatgtttgaggataggctttgtcataagacgtatctcaatggtgatcatgttacccacccggactttatgctgtacgacgcccttgatgtcgttctgtatatggatcccatgtgcctggacgccttcccgaaattagtgtgttttaaaaaacgtatcgaagcgattccacagatcgataaatacttgaagtcttctaaatatattgcttggcctctgcaaggctggcaggcaacgttcggtgggggagatcatccgccaaaatcagatctggtgccgcgtgggagccctggcatacaccgcgacggtggttctggtgagaacctgtactttcaaagctcagataatgggcctcaaaaccagcgcaacgctccacgtataaccttcggtggcccgtctgactccacaggcagcaaccagaatggtgagcgtagtggagccaggtctaagcagcgccgtccccagggtctgccgaacaacacggcgagctggtttactgcgcttacccaacacggtaaagaagacttaaaattcccgaaaggccagggcgtcccgatcaacactaactctaaaccggatgatcagattggttattaccgcagagaagtacgtcggtatcgcggcggcgacggtcaaatgaaagatttggatccgcgttggtacttttactatctcggcaccggtccggaagctggactgccctacggggcaaacaaggacgggatcatttgggtggctaccgaaggtgccctgaatactccaaaagatcatatcggcacccgtaaccctgctaataacgctgcgatcgttctgcaactgcctcagggtacaactctgccaaaaggcttctatgcagaagggtcgcgtggtggcagccaggcgagtagccgtagcagctcccgctctcgcaactcgtcccgtaactccactccgggctcttctcgcggcacgtccccggctcgtatggcaggtaacggtggtgacgctgctctggcgctgctactgctggacaggctgaaccagctggagtcgaagatgagtggtaaaggccaacagcagcagggccagaccgttaccaaaaagagcgcagctgaagcatctaaaaaaccgcgacagaaacgtaccgcgactaaagcgtacaatgtaacacaggccttcggtcgtcgaggtccggagcaaactcaaggaaactttggcgatcaggaattaatccgccaggggaccgactacaaacactggccgcaaattgcccagttcgccccatccgctagtgcattcttcggtatgagccgcatcggcatggaagtaacgccaagtggtacgtggctgacctacaccggtgctatcaagcttgatgacaaggacccgaactttaaagaccaggttattctgcttaacaaacatattgatgcctataaaactttcccgccgaccgaacccaaaaaggacaaaaagaaaaaagctgatgaaacccaggctctaccgcagcgtcagaaaaaacagcaaactgtgactctgctgccagctgcggacctggatgatttttccaagcagctgcaacagtctatgagctctgcggactctacgcaggcttaa

SEQ ID NO: 141 - DNA, 2016 bp, Artificial Sequence
  Description of Artificial Sequence: Synthetic polynucleotide
atgcaccatcatcaccatcatggtggttctggttcgccgatacttggttattggaagattaaaggactggttcagcccacacgcctcctgctagaatacttagaggaaaaatatgaagagcacctgtacgaacgtgatgagggggacaaatggcgaaacaagaaatttgaattgggcttagaatttccaaatttgccgtattatatcgatggcgacgtaaaactgacccaatcaatggccattattcgctacatcgcagataaacataacatgctgggtggctgccctaaagaacgggctgagatctccatgctggaaggtgcggtgctcgacattcgctacggcgtcagtagaattgcgtatagcaaggatttcgaaactttaaaagtggatttcctgagcaaacttccggagatgctgaaaatgtttgaggataggctttgtcataagacgtatctcaatggtgatcatgttacccacccggactttatgctgtacgacgcccttgatgtcgttctgtatatggatcccatgtgcctggacgccttcccgaaattagtgtgttttaaaaaacgtatcgaagcgattccacagatcgataaatacttgaagtcttctaaatatattgcttggcctctgcaaggctggcaggcaacgttcggtgggggagatcatccgccaaaatcagatctggtgccgcgtgggagccctggcatacaccgcgacggtggttctggtgagaacctgtactttcaaagctcagataatgggcctcaaaaccagcgcaacgctccacgtataaccttcggtggcccgtctgactccacaggcagcaaccagaatggtgagcgtagtggagccaggtctaagcagcgccgtccccagggtctgccgaacaacacggcgagctggtttactgcgcttacccaacacggtaaagaagacttaaaattcccgcgtggccagggcgtcccgatcaacactaactcttccccggatgatcagattggttattaccgcagagcaactcgtcggattcgcggcggcgacggtaaaatgaaagatttgtctccgcgttggtacttttactatctcggcaccggtccggaagctggactgccctacggggcaaacaaggacgggatctattgggtggctaccgaaggtgccctgaatactccaaaagatcatatcggcacccgtaaccctgctaataacgctgcgatcgttctgcaactgcctcagggtacaactctgccaaaaggcttctatgcagaagggtcgcgtggtggcagccaggcgagtagccgtagcagctcccgctctcgcaactcgtcccgtaactccactccgggctcttctcgcggcacgtccccggctcgtatggcaggtaacggtggtgacgctgctctggcgctgctactgctggacaggctgaaccagctggagtcgaagatgagtggtaaaggccaacagcagcagggccagaccgttaccaaaaagagcgcagctgaagcatctaaaaaaccgcgacagaaacgtaccgcgactaaagcgtacaatgtaacacaggccttcggtcgtcgaggtccggagcaaactcaaggaaactttggcgatcaggaattaatccgccaggggaccgactacaaacactggccgcaaattgcccagttcgccccatccgctagtgcattcttcggtatgagccgcatcggcatggaagtaacgccaagtggtacgtggctgacctacaccggtgctatcaagcttgatgacaaggacccgaactttaaagaccaggttattctgcttaacaaacatattgatgcctataaaactttcccgccgaccgaacccaaaaaggacaaaaagaaaaaagctgatgaaacccaggctctaccgcagcgtcagaaaaaacagcaaactgtgactctgctgccagctgcggacctggatgatttttccaagcagctgcaacagtctatgagctctgcggactctacgcaggcttaa

SEQ ID NO: 142 - DNA, 2016 bp, Artificial Sequence
  Description of Artificial Sequence: Synthetic polynucleotide
atgcaccatcatcaccatcatggtggttctggttcgccgatacttggttattggaagattaaaggactggttcagcccacacgcctcctgctagaatacttagaggaaaaatatgaagagcacctgtacgaacgtgatgagggggacaaatggcgaaacaagaaatttgaattgggcttagaatttccaaatttgccgtattatatcgatggcgacgtaaaactgacccaatcaatggccattattcgctacatcgcagataaacataacatgctgggtggctgccctaaagaacgggctgagatctccatgctggaaggtgcggtgctcgacattcgctacggcgtcagtagaattgcgtatagcaaggatttcgaaactttaaaagtggatttcctgagcaaacttccggagatgctgaaaatgtttgaggataggctttgtcataagacgtatctcaatggtgatcatgttacccacccggactttatgctgtacgacgcccttgatgtcgttctgtatatggatcccatgtgcctggacgccttcccgaaattagtgtgttttaaaaaacgtatcgaagcgattccacagatcgataaatacttgaagtcttctaaatatattgcttggcctctgcaaggctggcaggcaacgttcggtgggggagatcatccgccaaaatcagatctggtgccgcgtgggagccctggcatacaccgcgacggtggttctggtgagaacctgtactttcaaagctcagataatgggcctcaaaaccagcgcaacgctccacgtataaccttcggtggcccgtctgactccacaggcagcaaccagaatggtgagcgtagtggagccaggtctaagcagcgccgtccccagggtctgccgaacaacacggcgagctggtttactgcgcttacccaacacggtaaagaagacttaaaattcccgcgtggccagggcgtcccgatcaacactaactcttccccggatgatcagattggttattaccgcagagcaactcgtcggattcgcggcggcgacggtaaaatgaaagatttgtctccgcgttggtacttttactatctcggcaccggtccggaagctggactgccctacggggcaaacaagaatgggatcatttgggtggctaccgaaggtgccctgaatactccaaaagatcatatcggcacccgtaaccctgctaataacgctgcgatcgttctgcaactgcctcagggtacaactctgccaaaaggcttctatgcagaagggtcgcgtggtggcagccaggcgagtagccgtagcagctcccgctctcgcaactcgtcccgtaactccactccgggctcttctcgcggcacgtccccggctcgtatggcaggtaacggtggtgacgctgctctggcgctgctactgctggacaggctgaaccagctggagtcgaagatgagtggtaaaggccaacagcagcagggccagaccgttaccaaaaagagcgcagctgaagcatctaaaaaaccgcgacagaaacgtaccgcgactaaagcgtacaatgtaacacaggccttcggtcgtcgaggtccggagcaaactcaaggaaactttggcgatcaggaattaatccgccaggggaccgactacaaacactggccgcaaattgcccagttcgccccatccgctagtgcattcttcggtatgagccgcatcggcatggaagtaacgccaagtggtacgtggctgacctacaccggtgctatcaagcttgatgacaaggacccgaactttaaagaccaggttattctgcttaacaaacatattgatgcctataaaactttcccgccgaccgaacccaaaaaggacaaaaagaaaaaagctgatgaaacccaggctctaccgcagcgtcagaaaaaacagcaaactgtgactctgctgccagctgcggacctggatgatttttccaagcagctgcaacagtctatgagctctgcggactctacgcaggcttaa

SEQ ID NO: 143 - DNA, 2016 bp, Artificial Sequence
  Description of Artificial Sequence: Synthetic polynucleotide
atgcaccatcatcaccatcatggtggttctggttcgccgatacttggttattggaagattaaaggactggttcagcccacacgcctcctgctagaatacttagaggaaaaatatgaagagcacctgtacgaacgtgatgagggggacaaatggcgaaacaagaaatttgaattgggcttagaatttccaaatttgccgtattatatcgatggcgacgtaaaactgacccaatcaatggccattattcgctacatcgcagataaacataacatgctgggtggctgccctaaagaacgggctgagatctccatgctggaaggtgcggtgctcgacattcgctacggcgtcagtagaattgcgtatagcaaggatttcgaaactttaaaagtggatttcctgagcaaacttccggagatgctgaaaatgtttgaggataggctttgtcataagacgtatctcaatggtgatcatgttacccacccggactttatgctgtacgacgcccttgatgtcgttctgtatatggatcccatgtgcctggacgccttcccgaaattagtgtgttttaaaaaacgtatcgaagcgattccacagatcgataaatacttgaagtcttctaaatatattgcttggcctctgcaaggctggcaggcaacgttcggtgggggagatcatccgccaaaatcagatctggtgccgcgtgggagccctggcatacaccgcgacggtggttctggtgagaacctgtactttcaaagctcagataatgggcctcaaaaccagcgcaacgctccacgtataaccttcggtggcccgtctgactccacaggcagcaaccagaatggtgagcgtagtggagccaggtctaagcagcgccgtccccagggtctgccgaacaacacggcgagctggtttactcctcttacccaaaatggtaaagaagacttaaaattcccgccgggccagggcgtcccgatcaacactaactcttccccggatgatcagattggttattaccgcagagcaactcgtcggattcgcggcggcgacggtaaaatgaaagatttgccaccgaaatggtacttttactatctcggcaccggtccgcatgctgatctgccctacgggcaaaagaaggacggggttttttgggtggctcggcctggtgccctgaatactccaaaagatcatatcggcacccgtaaccctgctaataacgctgcgatcccgctgcaactgcctccgggtacaaaactgccaaaaggcttctatgcagaagggtcgcgtggtggcagccaggcgagtagccgtagcagctcccgctctcgcaactcgtcccgtaactccactccgggctcttctcgcggcacgtccccggctcgtatggcaggtaacggtggtgacgctgctctggcgctgctactgctggacaggctgaaccagctggagtcgaagatgagtggtaaaggccaacagcagcagggccagaccgttaccaaaaagagcgcagctgaagcatctaaaaaaccgcgacagaaacgtaccgcgactaaagcgtacaatgtaacacaggccttcggtcgtcgaggtccggagcaaactcaaggaaactttggcgatcaggaattaatccgccaggggaccgactacaaacactggccgcaaattgcccagttcgccccatccgctagtgcattcttcggtatgagccgcatcggcatggaagtaacgccaagtggtacgtggctgacctacaccggtgctatcaagcttgatgacaaggacccgaactttaaagaccaggttattctgcttaacaaacatattgatgcctataaaactttcccgccgaccgaacccaaaaaggacaaaaagaaaaaagctgatgaaacccaggctctaccgcagcgtcagaaaaaacagcaaactgtgactctgctgccagctgcggacctggatgatttttccaagcagctgcaacagtctatgagctctgcggactctacgcaggcttaa

SEQ ID NO: 144 - DNA, 2016 bp, Artificial Sequence
  Description of Artificial Sequence: Synthetic polynucleotide
atgcaccatcatcaccatcatggtggttctggttcgccgatacttggttattggaagattaaaggactggttcagcccacacgcctcctgctagaatacttagaggaaaaatatgaagagcacctgtacgaacgtgatgagggggacaaatggcgaaacaagaaatttgaattgggcttagaatttccaaatttgccgtattatatcgatggcgacgtaaaactgacccaatcaatggccattattcgctacatcgcagataaacataacatgctgggtggctgccctaaagaacgggctgagatctccatgctggaaggtgcggtgctcgacattcgctacggcgtcagtagaattgcgtatagcaaggatttcgaaactttaaaagtggatttcctgagcaaacttccggagatgctgaaaatgtttgaggataggctttgtcataagacgtatctcaatggtgatcatgttacccacccggactttatgctgtacgacgcccttgatgtcgttctgtatatggatcccatgtgcctggacgccttcccgaaattagtgtgttttaaaaaacgtatcgaagcgattccacagatcgataaatacttgaagtcttctaaatatattgcttggcctctgcaaggctggcaggcaacgttcggtgggggagatcatccgccaaaatcagatctggtgccgcgtgggagccctggcatacaccgcgacggtggttctggtgagaacctgtactttcaaagctcagataatgggcctcaaaaccagcgcaacgctccacgtataaccttcggtggcccgtctgactccacaggcagcaaccagaatggtgagcgtagtggagccaggtctaagcagcgccgtccccagggtctgccgaacaacacggcgagctggtttactgcgcttacccaacacggtaaagaagacttaaaattcccgaaaggccagggcgtcccgatcaacactaactctaagccggatgatcagattggttattggcgcagagaaactcgtcggtaccgcggcggcgacggtcaaatgaaagatttggatccgcgttggtacttttactatctcggcaccggtccggaagctggactgccctacggggcaaacaaggacgggatcatttgggtggctaccgaaggtgccctgaatactccaaaagatcatatcggcacccgtaaccctgctaataacgctgcgatcgttctgcaactgcctcagggtacaactctgccaaaaggcttctatgcagaagggtcgcgtggtggcagccaggcgagtagccgtagcagctcccgctctcgcaactcgtcccgtaactccactccgggctcttctcgcggcacgtccccggctcgtatggcaggtaacggtggtgacgctgctctggcgctgctactgctggacaggctgaaccagctggagtcgaagatgagtggtaaaggccaacagcagcagggccagaccgttaccaaaaagagcgcagctgaagcatctaaaaaaccgcgacagaaacgtaccgcgactaaagcgtacaatgtaacacaggccttcggtcgtcgaggtccggagcaaactcaaggaaactttggcgatcaggaattaatccgccaggggaccgactacaaacactggccgcaaattgcccagttcgccccatccgctagtgcattcttcggtatgagccgcatcggcatggaagtaacgccaagtggtacgtggctgacctacaccggtgctatcaagcttgatgacaaggacccgaactttaaagaccaggttattctgcttaacaaacatattgatgcctataaaactttcccgccgaccgaacccaaaaaggacaaaaagaaaaaagctgatgaaacccaggctctaccgcagcgtcagaaaaaacagcaaactgtgactctgctgccagctgcggacctggatgatttttccaagcagctgcaacagtctatgagctctgcggactctacgcaggcttaa

SEQ ID NO: 145 - DNA, 2016 bp, Artificial Sequence
  Description of Artificial Sequence: Synthetic polynucleotide
atgcaccatcatcaccatcatggtggttctggttcgccgatacttggttattggaagattaaaggactggttcagcccacacgcctcctgctagaatacttagaggaaaaatatgaagagcacctgtacgaacgtgatgagggggacaaatggcgaaacaagaaatttgaattgggcttagaatttccaaatttgccgtattatatcgatggcgacgtaaaactgacccaatcaatggccattattcgctacatcgcagataaacataacatgctgggtggctgccctaaagaacgggctgagatctccatgctggaaggtgcggtgctcgacattcgctacggcgtcagtagaattgcgtatagcaaggatttcgaaactttaaaagtggatttcctgagcaaacttccggagatgctgaaaatgtttgaggataggctttgtcataagacgtatctcaatggtgatcatgttacccacccggactttatgctgtacgacgcccttgatgtcgttctgtatatggatcccatgtgcctggacgccttcccgaaattagtgtgttttaaaaaacgtatcgaagcgattccacagatcgataaatacttgaagtcttctaaatatattgcttggcctctgcaaggctggcaggcaacgttcggtgggggagatcatccgccaaaatcagatctggtgccgcgtgggagccctggcatacaccgcgacggtggttctggtgagaacctgtactttcaaagctcagataatgggcctcaaaaccagcgcaacgctccacgtataaccttcggtggcccgtctgactccacaggcagcaaccagaatggtgagcgtagtggagccaggtctaagcagcgccgtccccagggtctgccgaacaacacggcgagctggtttactccacttacccaacacggtaaagaagacttaaaattcccgccgggccagggcgtcccgatcaacactaactcttccccggatgatcagattggttattaccgcagagcaactcgtcggattcgcggcggcgacggtaaaatgaaagatttgcccccgcgttggtacttttactatctcggcaccggtccggaagctgatctgccctacgggcaagtgaaggacgggatcttttgggtggctgaggaaggtgccctgaatactccaaaagatcatatcggcacccgtaaccctgctaataacgctgcgatcccgctgcaactgcctcccggtacaactctgccaaaaggcttctatgcagaagggtcgcgtggtggcagccaggcgagtagccgtagcagctcccgctctcgcaactcgtcccgtaactccactccgggctcttctcgcggcacgtccccggctcgtatggcaggtaacggtggtgacgctgctctggcgctgctactgctggacaggctgaaccagctggagtcgaagatgagtggtaaaggccaacagcagcagggccagaccgttaccaaaaagagcgcagctgaagcatctaaaaaaccgcgacagaaacgtaccgcgactaaagcgtacaatgtaacacaggccttcggtcgtcgaggtccggagcaaactcaaggaaactttggcgatcaggaattaatccgccaggggaccgactacaaacactggccgcaaattgcccagttcgccccatccgctagtgcattcttcggtatgagccgcatcggcatggaagtaacgccaagtggtacgtggctgacctacaccggtgctatcaagcttgatgacaaggacccgaactttaaagaccaggttattctgcttaacaaacatattgatgcctataaaactttcccgccgaccgaacccaaaaaggacaaaaagaaaaaagctgatgaaacccaggctctaccgcagcgtcagaaaaaacagcaaactgtgactctgctgccagctgcggacctggatgatttttccaagcagctgcaacagtctatgagctctgcggactctacgcaggcttaa

SEQ ID NO: 146 - DNA, 2016 bp, Artificial Sequence
  Description of Artificial Sequence: Synthetic polynucleotide
atgcaccatcatcaccatcatggtggttctggttcgccgatacttggttattggaagattaaaggactggttcagcccacacgcctcctgctagaatacttagaggaaaaatatgaagagcacctgtacgaacgtgatgagggggacaaatggcgaaacaagaaatttgaattgggcttagaatttccaaatttgccgtattatatcgatggcgacgtaaaactgacccaatcaatggccattattcgctacatcgcagataaacataacatgctgggtggctgccctaaagaacgggctgagatctccatgctggaaggtgcggtgctcgacattcgctacggcgtcagtagaattgcgtatagcaaggatttcgaaactttaaaagtggatttcctgagcaaacttccggagatgctgaaaatgtttgaggataggctttgtcataagacgtatctcaatggtgatcatgttacccacccggactttatgctgtacgacgcccttgatgtcgttctgtatatggatcccatgtgcctggacgccttcccgaaattagtgtgttttaaaaaacgtatcgaagcgattccacagatcgataaatacttgaagtcttctaaatatattgcttggcctctgcaaggctggcaggcaacgttcggtgggggagatcatccgccaaaatcagatctggtgccgcgtgggagccctggcatacaccgcgacggtggttctggtgagaacctgtactttcaaagctcagataatgggcctcaaaaccagcgcaacgctccacgtataaccttcggtggcccgtctgactccacaggcagcaaccagaatggtgagcgtagtggagccaggtctaagcagcgccgtccccagggtctgccgaacaacacggcgagctggtttactgcgcttacccaacacggtaaagaagacttaaaattcccgcgtggccagggcgtcccgatcaacactaactcttccccggatgatcagattggttattaccgcagagcaactcgtcggattcgcggcggcgacggtaaaatgaaagatttgtctccgcgttggtacttttactatctcggcaccggtccggaagctggactgccctacggggcaaacaaggacgggatcatttgggtggctaccgaaggtgccctgaatactccaaaagatcatatcggcacccgtaaccctgctaataacgctgcgatcgttctgcaactgcctcagggtacaactctgccaaaaggcttctatgcagaagggtcgcgtggtggcagccaggcgagtagccgtagcagctcccgctctcgcaactcgtcccgtaactccactccgggctcttctcgcggcacgtccccggctcgtatggcaggtaacggtggtgacgctgctctggcgctgctactgctggacaggctgaaccagctggagtcgaagatgagtggtaaaggccaacagcagcagggccagaccgttaccaaaaagagcgcagctgaagcatctaaaaaaccgcgatggaaacgtaccgcgactaaagcgtacaatgtaacacaggccttcggtcgtcgaggtccggagcaaactcaaggaaactttggcgatcaggaattaatccgccaggggaccgactacaaacactggccgcaaattgcccagttcgccccatccgctagtgcattcttcggtatgagccgcatcggcatggaagtaacgccaagtggtacgtggctgacctacaccggtgctatcaagcttgatgacaaggacccgaactttaaagaccaggttattctgcttaacaaacatattgatgcctataaaactttcccgccgaccgaacccaaaaaggacaaaaagaaaaaagctgatgaaacccaggctctaccgcagcgtcagaaaaaacagcaaactgtgactctgctgccagctgcggacctggatgatttttccaagcagctgcaacagtctatgagctctgcggactctacgcaggcttaa

SEQ ID NO: 147 - DNA, 2016 bp, Artificial Sequence
  Description of Artificial Sequence: Synthetic polynucleotide
atgcaccatcatcaccatcatggtggttctggttcgccgatacttggttattggaagattaaaggactggttcagcccacacgcctcctgctagaatacttagaggaaaaatatgaagagcacctgtacgaacgtgatgagggggacaaatggcgaaacaagaaatttgaattgggcttagaatttccaaatttgccgtattatatcgatggcgacgtaaaactgacccaatcaatggccattattcgctacatcgcagataaacataacatgctgggtggctgccctaaagaacgggctgagatctccatgctggaaggtgcggtgctcgacattcgctacggcgtcagtagaattgcgtatagcaaggatttcgaaactttaaaagtggatttcctgagcaaacttccggagatgctgaaaatgtttgaggataggctttgtcataagacgtatctcaatggtgatcatgttacccacccggactttatgctgtacgacgcccttgatgtcgttctgtatatggatcccatgtgcctggacgccttcccgaaattagtgtgttttaaaaaacgtatcgaagcgattccacagatcgataaatacttgaagtcttctaaatatattgcttggcctctgcaaggctggcaggcaacgttcggtgggggagatcatccgccaaaatcagatctggtgccgcgtgggagccctggcatacaccgcgacggtggttctggtgagaacctgtactttcaaagctcagataatgggcctcaaaaccagcgcaacgctccacgtataaccttcggtggcccgtctgactccacaggcagcaaccagaatggtgagcgtagtggagccaggtctaagcagcgccgtccccagggtctgccgaacaacacggcgagctggtttactgcgcttacccaacacggtaaagaagacttaaaattcccgcgtggccagggcgtcccgatcaacactaactcttccccggatgatcagattggttattaccgcagagcaactcgtcggattcgcggcggcgacggtaaaatgaaagatttgtctccgcgttggtacttttactatctcggcaccggtccggaagctggactgccctacggggcaaacaaggacgggatcatttgggtggctaccgaaggtgccctgaatactccaaaagatcatatcggcacccgtaaccctgctaataacgctgcgatcgttctgcaactgcctccaggtacaactctgccaaaaggcttctatgcagaagggtcgcgtggtggcagccaggcgagtagccgtagcagctcccgctctcgcaactcgtcccgtaactccactccgggctcttctcgcggcacgtccccggctcgtatggcaggtaacggtggtgacgctgctctggcgctgctactgctggacaggctgaaccagctggagtcgaagatgagtggtaaaggccaacagcagcagggccagaccgttaccaaaaagagcgcagctgaagcatctaaaaaaccgcgacagaaacgtaccgcgactaaagcgtacaatgtaacacaggccttcggtcgtcgaggtccggagcaaactcaaggaaactttggcgatcaggaattaatccgccaggggaccgactacaaacactggccgcaaattgcccagttcgccccatccgctagtgcattcttcggtatgagccgcatcggcatggaagtaacgccaagtggtacgtggctgacctacaccggtgctatcaagcttgatgacaaggacccgaactttaaagaccaggttattctgcttaacaaacatattgatgcctataaaactttcccgccgaccgaacccaaaaaggacaaaaagaaaaaagctgatgaaacccaggctctaccgcagcgtcagaaaaaacagcaaactgtgactctgctgccagctgcggacctggatgatttttccaagcagctgcaacagtctatgagctctgcggactctacgcaggcttaa

SEQ ID NO: 148 - DNA, 2016 bp, Artificial Sequence
  Description of Artificial Sequence: Synthetic polynucleotide
atgcaccatcatcaccatcatggtggttctggttcgccgatacttggttattggaagattaaaggactggttcagcccacacgcctcctgctagaatacttagaggaaaaatatgaagagcacctgtacgaacgtgatgagggggacaaatggcgaaacaagaaatttgaattgggcttagaatttccaaatttgccgtattatatcgatggcgacgtaaaactgacccaatcaatggccattattcgctacatcgcagataaacataacatgctgggtggctgccctaaagaacgggctgagatctccatgctggaaggtgcggtgctcgacattcgctacggcgtcagtagaattgcgtatagcaaggatttcgaaactttaaaagtggatttcctgagcaaacttccggagatgctgaaaatgtttgaggataggctttgtcataagacgtatctcaatggtgatcatgttacccacccggactttatgctgtacgacgcccttgatgtcgttctgtatatggatcccatgtgcctggacgccttcccgaaattagtgtgttttaaaaaacgtatcgaagcgattccacagatcgataaatacttgaagtcttctaaatatattgcttggcctctgcaaggctggcaggcaacgttcggtgggggagatcatccgccaaaatcagatctggtgccgcgtgggagccctggcatacaccgcgacggtggttctggtgagaacctgtactttcaaagctcagataatgggcctcaaaaccagcgcaacgctccacgtataaccttcggtggcccgtctgactccacaggcagcaaccagaatggtgagcgtagtggagccaggtctaagcagcgccgtccccagggtctgccgaacaacacggcgagctggtttactgcgcttacccaacacggtaaagaagacttaaaattcccgcgtggccagggcgtcccgatcaacactaactcttccccggatgatcagattggttattaccgcagagcaactcgtcggattcgcggcggcgacggtaaaatgaaagatttgtctccgcgttggtacttttactatctcggcaccggtccggaagctggactgccctacggggcaaacaaggacgggatcatttgggtggctaccgaaggtgccctgaatactccaaaagatcatatcggcacccgtaaccctgctaataacgctgcgatcgttctgcaactgcctcagggtacacaactgccaaaaggcttctatgcagaagggtcgcgtggtggcagccaggcgagtagccgtagcagctcccgctctcgcaactcgtcccgtaactccactccgggctcttctcgcggcacgtccccggctcgtatggcaggtaacggtggtgacgctgctctggcgctgctactgctggacaggctgaaccagctggagtcgaagatgagtggtaaaggccaacagcagcagggccagaccgttaccaaaaagagcgcagctgaagcatctaaaaaaccgcgacagaaacgtaccgcgactaaagcgtacaatgtaacacaggccttcggtcgtcgaggtccggagcaaactcaaggaaactttggcgatcaggaattaatccgccaggggaccgactacaaacactggccgcaaattgcccagttcgccccatccgctagtgcattcttcggtatgagccgcatcggcatggaagtaacgccaagtggtacgtggctgacctacaccggtgctatcaagcttgatgacaaggacccgaactttaaagaccaggttattctgcttaacaaacatattgatgcctataaaactttcccgccgaccgaacccaaaaaggacaaaaagaaaaaagctgatgaaacccaggctctaccgcagcgtcagaaaaaacagcaaactgtgactctgctgccagctgcggacctggatgatttttccaagcagctgcaacagtctatgagctctgcggactctacgcaggcttaa

SEQ ID NO: 149 - DNA, 2016 bp, Artificial Sequence
  Description of Artificial Sequence: Synthetic polynucleotide
atgcaccatcatcaccatcatggtggttctggttcgccgatacttggttattggaagattaaaggactggttcagcccacacgcctcctgctagaatacttagaggaaaaatatgaagagcacctgtacgaacgtgatgagggggacaaatggcgaaacaagaaatttgaattgggcttagaatttccaaatttgccgtattatatcgatggcgacgtaaaactgacccaatcaatggccattattcgctacatcgcagataaacataacatgctgggtggctgccctaaagaacgggctgagatctccatgctggaaggtgcggtgctcgacattcgctacggcgtcagtagaattgcgtatagcaaggatttcgaaactttaaaagtggatttcctgagcaaacttccggagatgctgaaaatgtttgaggataggctttgtcataagacgtatctcaatggtgatcatgttacccacccggactttatgctgtacgacgcccttgatgtcgttctgtatatggatcccatgtgcctggacgccttcccgaaattagtgtgttttaaaaaacgtatcgaagcgattccacagatcgataaatacttgaagtcttctaaatatattgcttggcctctgcaaggctggcaggcaacgttcggtgggggagatcatccgccaaaatcagatctggtgccgcgtgggagccctggcatacaccgcgacggtggttctggtgagaacctgtactttcaaagctcagataatgggcctcaaaaccagcgcaacgctccacgtataaccttcggtggcccgtctgactccacaggcagcaaccagaatggtgagcgtagtggagccaggtctaagcagcgccgtccccagggtctgccgaacaacacggcgagctggtttactgcgcttacccaacacggtaaagaagacttaaaattcccgcgtggccagggcgtcccgatcaacactaactcttccccggatgatcagattggttattaccgcagagcaactcgtcggattcgcggcggcgacggtaaaatgaaagatttgtctccgcgttggtacttttactatctcggcaccggtccggaagctggactgccctacggggcaaacaaggacgggatcatttgggtggctaccgaaggtgccctgaatactccaaaagatcatatcggcacccgtaaccctgctaataacgctgcgatcgttctgcaactgcctcagggtacaactctgccaaaaggcttctatgcagaagggtcgcgtggtggcagccaggcgagtagccgtagcagctcccgctctcgcaactcgtcccgtaactccactccgggctcttctcgcggcacgtccccggctcgtatggcaggtaacggtggtgacgctgctctggcgctgctactgctggacaggctgaaccagctggagtcgaagatgagtggtaaaggccaacagcagcagggccagaccgttaccaaaaagagcgcagctgaagcatctaaaaaaccgcgacagaaacgtaccgcgactaaaggatacaatgtaacacaggccttcggtcgtcgaggtccggagcaaactcaaggaaactttggcgatcaggatttaatcaaagaagggaccgactacaaacactggccgcaaattgcccagttcgccccatccgctagtgcattcttcggtatgagccgcatctcgaccgaagaaacgccaagtggtacgtggctgacctacaccggtgctatcaagcttgataaaaaggacccgaactttaaagaccaggttattctgcttaacaaacatattgatgcctataaaactttcccgccgaccgaacccaaaaaggacaaaaagaaaaaagctgatgaaacccaggctctaccgcagcgtcagaaaaaacagcaaactgtgactctgctgccagctgcggacctggatgatttttccaagcagctgcaacagtctatgagctctgcggactctacgcaggcttaa

SEQ ID NO: 150 - DNA, 2016 bp, Artificial Sequence
  Description of Artificial Sequence: Synthetic polynucleotide
atgcaccatcatcaccatcatggtggttctggttcgccgatacttggttattggaagattaaaggactggttcagcccacacgcctcctgctagaatacttagaggaaaaatatgaagagcacctgtacgaacgtgatgagggggacaaatggcgaaacaagaaatttgaattgggcttagaatttccaaatttgccgtattatatcgatggcgacgtaaaactgacccaatcaatggccattattcgctacatcgcagataaacataacatgctgggtggctgccctaaagaacgggctgagatctccatgctggaaggtgcggtgctcgacattcgctacggcgtcagtagaattgcgtatagcaaggatttcgaaactttaaaagtggatttcctgagcaaacttccggagatgctgaaaatgtttgaggataggctttgtcataagacgtatctcaatggtgatcatgttacccacccggactttatgctgtacgacgcccttgatgtcgttctgtatatggatcccatgtgcctggacgccttcccgaaattagtgtgttttaaaaaacgtatcgaagcgattccacagatcgataaatacttgaagtcttctaaatatattgcttggcctctgcaaggctggcaggcaacgttcggtgggggagatcatccgccaaaatcagatctggtgccgcgtgggagccctggcatacaccgcgacggtggttctggtgagaacctgtactttcaaagctcagataatgggcctcaaaaccagcgcaacgctccacgtataaccttcggtggcccgtctgactccacaggcagcaaccagaatggtgagcgtagtggagccaggtctaagcagcgccgtccccagggtctgccgaacaacacggcgagctggtttactgcgcttacccaacacggtaaagaagacttaaaattcccgcgtggccagggcgtcccgatcaacactaactcttccccggatgatcagattggttattaccgcagagcaactcgtcggattcgcggcggcgacggtaaaatgaaagatttgtctccgcgttggtacttttactatctcggcaccggtccggaagctggactgccctacggggcaaacaaggacgggatcatttgggtggctaccgaaggtgccctgaatactccaaaagatcatatcggcacccgtgatcctgctaataacgctgcgatcgttctgcaactgcctcagggtacaactctgccaaaaggcttctatgcagaagggtcgcgtggtggcagccaggcgagtagccgtagcagctcccgctctcgcaactcgtcccgtaactccactccgggctcttctcgcggcacgtccccggctcgtatggcaggtaacggtggtgacgctgctctggcgctgctactgctggacaggctgaaccagctggagtcgaagatgagtggtaaaggccaacagcagcagggccagaccgttaccaaaaagagcgcagctgaagcatctaaaaaaccgcgacagaaacgtaccgcgactaaagcgtacaatgtaacacaggccttcggtcgtcgaggtccggagcaaactcaaggaaactttggcgatcaggaattaatccgccaggggaccgactacaaacactggccgcaaattgcccagttcgccccatccgctagtgcattcttcggtatgagccgcatcggcatggaagtaacgccaagtggtacgtggctgacctacaccggtgctatcaagcttgatgacaaggacccgaactttaaagaccaggttattctgcttaacaaacatattgatgcctataaaactttcccgccgaccgaacccaaaaaggacaaaaagaaaaaagctgatgaaacccaggctctaccgcagcgtcagaaaaaacagcaaactgtgactctgctgccagctgcggacctggatgatttttccaagcagctgcaacagtctatgagctctgcggactctacgcaggcttaa

SEQ ID NO: 151 - DNA, 2016 bp, Artificial Sequence
  Description of Artificial Sequence: Synthetic polynucleotide
atgcaccatcatcaccatcatggtggttctggttcgccgatacttggttattggaagattaaaggactggttcagcccacacgcctcctgctagaatacttagaggaaaaatatgaagagcacctgtacgaacgtgatgagggggacaaatggcgaaacaagaaatttgaattgggcttagaatttccaaatttgccgtattatatcgatggcgacgtaaaactgacccaatcaatggccattattcgctacatcgcagataaacataacatgctgggtggctgccctaaagaacgggctgagatctccatgctggaaggtgcggtgctcgacattcgctacggcgtcagtagaattgcgtatagcaaggatttcgaaactttaaaagtggatttcctgagcaaacttccggagatgctgaaaatgtttgaggataggctttgtcataagacgtatctcaatggtgatcatgttacccacccggactttatgctgtacgacgcccttgatgtcgttctgtatatggatcccatgtgcctggacgccttcccgaaattagtgtgttttaaaaaacgtatcgaagcgattccacagatcgataaatacttgaagtcttctaaatatattgcttggcctctgcaaggctggcaggcaacgttcggtgggggagatcatccgccaaaatcagatctggtgccgcgtgggagccctggcatacaccgcgacggtggttctggtgagaacctgtactttcaaagctcagataatgggcctcaaaaccagcgcaacgctccacgtataaccttcggtggcccgtctgactccacaggcagcaaccagaatggtgagcgtagtggagccaggtctaagcagcgccgtccccagggtctgccgaacaacacggcgagctggtttactgcgcttacccaacacggtaaagaagacttaaaattcccgcgtggccagggcgtcccgatcaacactaactcttccccggatgatcagattggttattaccgcagagcaactcgtcggattcgcggcggcgacggtaaaatgaaagatttgtctccgcgttggtacttttactatctcggcaccggtccggaagctggactgccctacggggcaaacaaggacgggatcatttgggtggctaccgaaggtgccctgaatactccaaaagatcatatcggcgatcgtaaccctgctaataacgctgcgatcgttctgcaactgcctcagggtacaactctgccaaaaggcttctatgcagaagggtcgcgtggtggcagccaggcgagtagccgtagcagctcccgctctcgcaactcgtcccgtaactccactccgggctcttctcgcggcacgtccccggctcgtatggcaggtaacggtggtgacgctgctctggcgctgctactgctggacaggctgaaccagctggagtcgaagatgagtggtaaaggccaacagcagcagggccagaccgttaccaaaaagagcgcagctgaagcatctaaaaaaccgcgacagaaacgtaccgcgactaaagcgtacaatgtaacacaggccttcggtcgtcgaggtccggagcaaactcaaggaaactttggcgatcaggaattaatccgccaggggaccgactacaaacactggccgcaaattgcccagttcgccccatccgctagtgcattcttcggtatgagccgcatcggcatggaagtaacgccaagtggtacgtggctgacctacaccggtgctatcaagcttgatgacaaggacccgaactttaaagaccaggttattctgcttaacaaacatattgatgcctataaaactttcccgccgaccgaacccaaaaaggacaaaaagaaaaaagctgatgaaacccaggctctaccgcagcgtcagaaaaaacagcaaactgtgactctgctgccagctgcggacctggatgatttttccaagcagctgcaacagtctatgagctctgcggactctacgcaggcttaa

SEQ ID NO: 152 - DNA, 2016 bp, Artificial Sequence
  Description of Artificial Sequence: Synthetic polynucleotide
atgcaccatcatcaccatcatggtggttctggttcgccgatacttggttattggaagattaaaggactggttcagcccacacgcctcctgctagaatacttagaggaaaaatatgaagagcacctgtacgaacgtgatgagggggacaaatggcgaaacaagaaatttgaattgggcttagaatttccaaatttgccgtattatatcgatggcgacgtaaaactgacccaatcaatggccattattcgctacatcgcagataaacataacatgctgggtggctgccctaaagaacgggctgagatctccatgctggaaggtgcggtgctcgacattcgctacggcgtcagtagaattgcgtatagcaaggatttcgaaactttaaaagtggatttcctgagcaaacttccggagatgctgaaaatgtttgaggataggctttgtcataagacgtatctcaatggtgatcatgttacccacccggactttatgctgtacgacgcccttgatgtcgttctgtatatggatcccatgtgcctggacgccttcccgaaattagtgtgttttaaaaaacgtatcgaagcgattccacagatcgataaatacttgaagtcttctaaatatattgcttggcctctgcaaggctggcaggcaacgttcggtgggggagatcatccgccaaaatcagatctggtgccgcgtgggagccctggcatacaccgcgacggtggttctggtgagaacctgtactttcaaagctcagataatgggcctcaaaaccagcgcaacgctccacgtataaccttcggtggcccgtctgactccacaggcagcaaccagaatggtgagcgtagtggagccaggtctaagcagcgccgtccccagggtctgccgaacaacacggcgagctggtttactccgcttacccaacacggtaaagaagacttaaaattcccgccaggccagggcgtcccgatcaacactaactcttccccggatgatcagattggttattaccgcagagcaactcgtcggattcgcggcggcgacggtaaaatgaaagatttgcccccgcgttggtacttttactatctcggcaccggtccggaagctgatctgccctacggggcagtaaaggacgggatcttttgggtggctgccgaaggtgccctgaatactccaaaagatcatatcggcacccgtaaccctgctaataacgctgcgatcccgctgcaactgcctcccggtacaactctgccaaaaggcttctatgcagaagggtcgcgtggtggcagccaggcgagtagccgtagcagctcccgctctcgcaactcgtcccgtaactccactccgggctcttctcgcggcacgtccccggctcgtatggcaggtaacggtggtgacgctgctctggcgctgctactgctggacaggctgaaccagctggagtcgaagatgagtggtaaaggccaacagcagcagggccagaccgttaccaaaaagagcgcagctgaagcatctaaaaaaccgcgacagaaacgtaccgcgactaaagcgtacaatgtaacacaggccttcggtcgtcgaggtccggagcaaactcaaggaaactttggcgatcaggaattaatccgccaggggaccgactacaaacactggccgcaaattgcccagttcgccccatccgctagtgcattcttcggtatgagccgcatcggcatggaagtaacgccaagtggtacgtggctgacctacaccggtgctatcaagcttgatgacaaggacccgaactttaaagaccaggttattctgcttaacaaacatattgatgcctataaaactttcccgccgaccgaacccaaaaaggacaaaaagaaaaaagctgatgaaacccaggctctaccgcagcgtcagaaaaaacagcaaactgtgactctgctgccagctgcggacctggatgatttttccaagcagctgcaacagtctatgagctctgcggactctacgcaggcttaa

SEQ ID NO: 153 - DNA, 2016 bp, Artificial Sequence
  Description of Artificial Sequence: Synthetic polynucleotide
atgcaccatcatcaccatcatggtggttctggttcgccgatacttggttattggaagattaaaggactggttcagcccacacgcctcctgctagaatacttagaggaaaaatatgaagagcacctgtacgaacgtgatgagggggacaaatggcgaaacaagaaatttgaattgggcttagaatttccaaatttgccgtattatatcgatggcgacgtaaaactgacccaatcaatggccattattcgctacatcgcagataaacataacatgctgggtggctgccctaaagaacgggctgagatctccatgctggaaggtgcggtgctcgacattcgctacggcgtcagtagaattgcgtatagcaaggatttcgaaactttaaaagtggatttcctgagcaaacttccggagatgctgaaaatgtttgaggataggctttgtcataagacgtatctcaatggtgatcatgttacccacccggactttatgctgtacgacgcccttgatgtcgttctgtatatggatcccatgtgcctggacgccttcccgaaattagtgtgttttaaaaaacgtatcgaagcgattccacagatcgataaatacttgaagtcttctaaatatattgcttggcctctgcaaggctggcaggcaacgttcggtgggggagatcatccgccaaaatcagatctggtgccgcgtgggagccctggcatacaccgcgacggtggttctggtgagaacctgtactttcaaagctcagataatgggcctcaaaaccagcgcaacgctccacgtataaccttcggtggcccgtctgactccacaggcagcaaccagaatggtgagcgtagtggagccaggtctaagcagcgccgtccccagggtctgccgaacaacacggcgagctggtttactgcgcttacccaacacggtaaagaagacttaaaattcccgcgtggccagggcgtcccgatcaacactaactcttccccggatgatcagattggttattaccgcagagcaactcgtcggattcgcggcggcgacggtaaaatgaaagatttgtctccgcgttggtacttttactatctcggcaccggtccggaagctggactgccctacggggcaaacaaggacgggatcatttgggtggctaccgaaggtgccctgaatactccaaaagatcatatcggcacccgtaaccctgctaataacgctgcgatcgttctgcaactgcctcagggtacaactctgccaaaaggcttctatgcagaagggtcgcgtggtggcagccaggcgagtagccgtagcagctcccgctctcgcaactcgtcccgtaactccactccgggctcttctcgcggcacgtccccggctcgtatggcaggtaacggtggtgacgctgctctggcgctgctactgctggacaggctgaaccagctggagtcgaagatgagtggtaaaggccaacagcagcagggccagaccgttaccaaaaagagcgcagctgaagcatctaaaaaaccgcgacagaaacgtaccgcgactaaagcgtacaatgtaacacaggccttcggtcgtcgaggtccggagcaaactcaaggaaactttggcgatcaggaattaatccgccaggggaccgactacaaacactggccgcaaattgcccagttcgccccatccgctagtgcattcttcggtatgagccgcatcggcatggaatggacgccaagtggtacgtggctgacctacaccggtgctatcaagcttgatgacaaggacccgaactttaaagaccaggttattctgcttaacaaacatattgatgcctataaaactttcccgccgaccgaacccaaaaaggacaaaaagaaaaaagctgatgaaacccaggctctaccgcagcgtcagaaaaaacagcaaactgtgactctgctgccagctgcggacctggatgatttttccaagcagctgcaacagtctatgagctctgcggactctacgcaggcttaa

SEQ ID NO: 154 - DNA, 2016 bp, Artificial Sequence
  Description of Artificial Sequence: Synthetic polynucleotide
atgcaccatcatcaccatcatggtggttctggttcgccgatacttggttattggaagattaaaggactggttcagcccacacgcctcctgctagaatacttagaggaaaaatatgaagagcacctgtacgaacgtgatgagggggacaaatggcgaaacaagaaatttgaattgggcttagaatttccaaatttgccgtattatatcgatggcgacgtaaaactgacccaatcaatggccattattcgctacatcgcagataaacataacatgctgggtggctgccctaaagaacgggctgagatctccatgctggaaggtgcggtgctcgacattcgctacggcgtcagtagaattgcgtatagcaaggatttcgaaactttaaaagtggatttcctgagcaaacttccggagatgctgaaaatgtttgaggataggctttgtcataagacgtatctcaatggtgatcatgttacccacccggactttatgctgtacgacgcccttgatgtcgttctgtatatggatcccatgtgcctggacgccttcccgaaattagtgtgttttaaaaaacgtatcgaagcgattccacagatcgataaatacttgaagtcttctaaatatattgcttggcctctgcaaggctggcaggcaacgttcggtgggggagatcatccgccaaaatcagatctggtgccgcgtgggagccctggcatacaccgcgacggtggttctggtgagaacctgtactttcaaagctcagataatgggcctcaaaaccagcgcaacgctccacgtataaccttcggtggcccgtctgactccacaggcagcaaccagaatggtgagcgtagtggagccaggtctaagcagcgccgtccccagggtctgccgaacaacacggcgagctggtttactgcgcttacccaacacggtaaagaagacttaaaattcccgcgtggccagggcgtcccgatcaacactaactcttccccggatgatcagattggttattaccgcagagcaactcgtcggattcgcggcggcgacggtaaaatgaaagatttgtctccgcgttggtacttttactatctcggccatggtccggaagctggactgccctacggggcaaacaaggacgggatcatttgggtggctaccgaaggtgccctgaatactccaaaagatcatatcggcacccgtaaccctgctaataacgctgcgatcgttctgcaactgcctcagggtacaactctgccaaaaggcttctatgcagaagggtcgcgtggtggcagccaggcgagtagccgtagcagctcccgctctcgcaactcgtcccgtaactccactccgggctcttctcgcggcacgtccccggctcgtatggcaggtaacggtggtgacgctgctctggcgctgctactgctggacaggctgaaccagctggagtcgaagatgagtggtaaaggccaacagcagcagggccagaccgttaccaaaaagagcgcagctgaagcatctaaaaaaccgcgacagaaacgtaccgcgactaaagcgtacaatgtaacacaggccttcggtcgtcgaggtccggagcaaactcaaggaaactttggcgatcaggaattaatccgccaggggaccgactacaaacactggccgcaaattgcccagttcgccccatccgctagtgcattcttcggtatgagccgcatcggcatggaagtaacgccaagtggtacgtggctgacctacaccggtgctatcaagcttgatgacaaggacccgaactttaaagaccaggttattctgcttaacaaacatattgatgcctataaaactttcccgccgaccgaacccaaaaaggacaaaaagaaaaaagctgatgaaacccaggctctaccgcagcgtcagaaaaaacagcaaactgtgactctgctgccagctgcggacctggatgatttttccaagcagctgcaacagtctatgagctctgcggactctacgcaggcttaa

SEQ ID NO: 155 - DNA, 2016 bp, Artificial Sequence
  Description of Artificial Sequence: Synthetic polynucleotide
atgcaccatcatcaccatcatggtggttctggttcgccgatacttggttattggaagattaaaggactggttcagcccacacgcctcctgctagaatacttagaggaaaaatatgaagagcacctgtacgaacgtgatgagggggacaaatggcgaaacaagaaatttgaattgggcttagaatttccaaatttgccgtattatatcgatggcgacgtaaaactgacccaatcaatggccattattcgctacatcgcagataaacataacatgctgggtggctgccctaaagaacgggctgagatctccatgctggaaggtgcggtgctcgacattcgctacggcgtcagtagaattgcgtatagcaaggatttcgaaactttaaaagtggatttcctgagcaaacttccggagatgctgaaaatgtttgaggataggctttgtcataagacgtatctcaatggtgatcatgttacccacccggactttatgctgtacgacgcccttgatgtcgttctgtatatggatcccatgtgcctggacgccttcccgaaattagtgtgttttaaaaaacgtatcgaagcgattccacagatcgataaatacttgaagtcttctaaatatattgcttggcctctgcaaggctggcaggcaacgttcggtgggggagatcatccgccaaaatcagatctggtgccgcgtgggagccctggcatacaccgcgacggtggttctggtgagaacctgtactttcaaagctcagataatgggcctcaaaaccagcgcaacgctccacgtataaccttcggtggcccgtctgactccacaggcagcaaccagaatggtgagcgtagtggagccaggtctaagcagcgccgtccccagggtctgccgaacaacacggcgagctggtttactgcgcttacccaacacggtaaagaagacttaaaattcccgcgtggccagggcgtcccgatcaacactaactcttccccggatgatcagattggttattaccgcagagcaactcgtcggattcgcggcggcgacggtaaaatgaaagatttgtctccgcgttggtacttttactatctcggcaccggtccggaagctggactgccctacggggcaaacaaggacgggatcatttgggtggctggagaaggtgccctgaatactccaaaagatcatatcggcacccgtaaccctgctaataacgctgcgatcgttctgcaactgcctcagggtacaactctgccaaaaggcttctatgcagaagggtcgcgtggtggcagccaggcgagtagccgtagcagctcccgctctcgcaactcgtcccgtaactccactccgggctcttctcgcggcacgtccccggctcgtatggcaggtaacggtggtgacgctgctctggcgctgctactgctggacaggctgaaccagctggagtcgaagatgagtggtaaaggccaacagcagcagggccagaccgttaccaaaaagagcgcagctgaagcatctaaaaaaccgcgacagaaacgtaccgcgactaaagcgtacaatgtaacacaggccttcggtcgtcgaggtccggagcaaactcaaggaaactttggcgatcaggaattaatccgccaggggaccgactacaaacactggccgcaaattgcccagttcgccccatccgctagtgcattcttcggtatgagccgcatcggcatggaagtaacgccaagtggtacgtggctgacctacaccggtgctatcaagcttgatgacaaggacccgaactttaaagaccaggttattctgcttaacaaacatattgatgcctataaaactttcccgccgaccgaacccaaaaaggacaaaaagaaaaaagctgatgaaacccaggctctaccgcagcgtcagaaaaaacagcaaactgtgactctgctgccagctgcggacctggatgatttttccaagcagctgcaacagtctatgagctctgcggactctacgcaggcttaa

SEQ ID NO: 156 - DNA, 2016 bp, Artificial Sequence
  Description of Artificial Sequence: Synthetic polynucleotide
atgcaccatcatcaccatcatggtggttctggttcgccgatacttggttattggaagattaaaggactggttcagcccacacgcctcctgctagaatacttagaggaaaaatatgaagagcacctgtacgaacgtgatgagggggacaaatggcgaaacaagaaatttgaattgggcttagaatttccaaatttgccgtattatatcgatggcgacgtaaaactgacccaatcaatggccattattcgctacatcgcagataaacataacatgctgggtggctgccctaaagaacgggctgagatctccatgctggaaggtgcggtgctcgacattcgctacggcgtcagtagaattgcgtatagcaaggatttcgaaactttaaaagtggatttcctgagcaaacttccggagatgctgaaaatgtttgaggataggctttgtcataagacgtatctcaatggtgatcatgttacccacccggactttatgctgtacgacgcccttgatgtcgttctgtatatggatcccatgtgcctggacgccttcccgaaattagtgtgttttaaaaaacgtatcgaagcgattccacagatcgataaatacttgaagtcttctaaatatattgcttggcctctgcaaggctggcaggcaacgttcggtgggggagatcatccgccaaaatcagatctggtgccgcgtgggagccctggcatacaccgcgacggtggttctggtgagaacctgtactttcaaagctcagataatgggcctcaaaaccagcgcaacgctccacgtataaccttcggtggcccgtctgactccacaggcagcaaccagaatggtgagcgtagtggagccaggtctaagcagcgccgtccccagggtctgccgaacaacacggcgagctggtttactgcgcttacccaacacggtaaagaagacttaaaattcccgcgtggccagggcgtcccgatcaacactaactcttccccggatgatcagattggttattaccgcagagcaactcgtcggattcgcggcggcgacggtaaaatgaaagatttgtctccgcgttggtacttttactatctcggcaccggtccggaagctggactgccctacggggcaaacaaggacgggatcatttgggtggctaccgaaggtgccctgaatactccaaaagatcatatcggcacccgtaaccctgctaataacgctgcgatcgttctgcaactgcctcagggtacaactctgccaaaaggcttctatgcagaagggtcgcgtggtggcagccaggcgagtagccgtagcagctcccgctctcgcaactcgtcccgtaactccactccgggctcttctcgcggcacgtccccggctcgtatggcaggtaacggtggtgacgctgctctggcgctgctactgctggacaggctgaaccagctggagtcgaagatgagtggtaaaggccaacagcagcagggccagaccgttaccaaaaagagcgcagctgaaatgtctaaaaaaccgcgacagaaacgtaccgcgactaaagggtacaatgtaacacagtgtttcggtccacgaggtccggagcaaactcaaggaaactttggcgatgcggaattaaataaaaaaggggtggactacaaacactggccgcaaattgcccagttcgccccatccgctagtgcattcttcggtatgagccgcatctcgagtaaggaaacgccaagtggtacgtggctgacctacaccggtgctatcaagcttgataaagatgacccgaactttaaagaccaggttattctgcttaacaaacatattgatgcctataaaactttcccgccgaccgaacccaaaaaggacaaaaagaaaaaagctgatgaaacccaggctctaccgcagcgtcagaaaaaacagcaaactgtgactctgctgccagctgcggacctggatgatttttccaagcagctgcaacagtctatgagctctgcggactctacgcaggcttaa

SEQ ID NO: 157 - DNA, 2016 bp, Artificial Sequence
  Description of Artificial Sequence: Synthetic polynucleotide
atgcaccatcatcaccatcatggtggttctggttcgccgatacttggttattggaagattaaaggactggttcagcccacacgcctcctgctagaatacttagaggaaaaatatgaagagcacctgtacgaacgtgatgagggggacaaatggcgaaacaagaaatttgaattgggcttagaatttccaaatttgccgtattatatcgatggcgacgtaaaactgacccaatcaatggccattattcgctacatcgcagataaacataacatgctgggtggctgccctaaagaacgggctgagatctccatgctggaaggtgcggtgctcgacattcgctacggcgtcagtagaattgcgtatagcaaggatttcgaaactttaaaagtggatttcctgagcaaacttccggagatgctgaaaatgtttgaggataggctttgtcataagacgtatctcaatggtgatcatgttacccacccggactttatgctgtacgacgcccttgatgtcgttctgtatatggatcccatgtgcctggacgccttcccgaaattagtgtgttttaaaaaacgtatcgaagcgattccacagatcgataaatacttgaagtcttctaaatatattgcttggcctctgcaaggctggcaggcaacgttcggtgggggagatcatccgccaaaatcagatctggtgccgcgtgggagccctggcatacaccgcgacggtggttctggtgagaacctgtactttcaaagctcagataatgggcctcaaaaccagcgcaacgctccacgtataaccttcggtggcccgtctgactccacaggcagcaaccagaatggtgagcgtagtggagccaggtctaagcagcgccgtccccagggtctgccgaacaacacggcgagctggtttactgcgcttacccaacacggtaaagaagacttaaaattcccgcgtggccagggcgtcccgatcaacactaactctaaaccggatgatcagattggttattaccgcagagcaactcgtcggattcgcggcggcgacggtaaaatgaaagatttgtctccgcgttggtacttttactatctcggcaccggtccggaagctggactgccctacggggcaaacaaggacgggatcatttgggtggctaccgaaggtgccctgaatactccaaaagatcatatcggcacccgtaaccctgctaataacgctgcgatcgttctgcaactgcctcagggtacaactctgccaaaaggcttctatgcagaagggtcgcgtggtggcagccaggcgagtagccgtagcagctcccgctctcgcaactcgtcccgtaactccactccgggctcttctcgcggcacgtccccggctcgtatggcaggtaacggtggtgacgctgctctggcgctgctactgctggacaggctgaaccagctggagtcgaagatgagtggtaaaggccaacagcagcagggccagaccgttaccaaaaagagcgcagctgaagcatctaaaaaaccgcgacagaaacgtaccgcgactaaagcgtacaatgtaacacaggccttcggtcgtcgaggtccggagcaaactcaaggaaactttggcgatcaggaattaatccgccaggggaccgactacaaacactggccgcaaattgcccagttcgccccatccgctagtgcattcttcggtatgagccgcatcggcatggaagtaacgccaagtggtacgtggctgacctacaccggtgctatcaagcttgatgacaaggacccgaactttaaagaccaggttattctgcttaacaaacatattgatgcctataaaactttcccgccgaccgaacccaaaaaggacaaaaagaaaaaagctgatgaaacccaggctctaccgcagcgtcagaaaaaacagcaaactgtgactctgctgccagctgcggacctggatgatttttccaagcagctgcaacagtctatgagctctgcggactctacgcaggcttaa

SEQ ID NO: 158 - DNA, 2016 bp, Artificial Sequence
  Description of Artificial Sequence: Synthetic polynucleotide
atgcaccatcatcaccatcatggtggttctggttcgccgatacttggttattggaagattaaaggactggttcagcccacacgcctcctgctagaatacttagaggaaaaatatgaagagcacctgtacgaacgtgatgagggggacaaatggcgaaacaagaaatttgaattgggcttagaatttccaaatttgccgtattatatcgatggcgacgtaaaactgacccaatcaatggccattattcgctacatcgcagataaacataacatgctgggtggctgccctaaagaacgggctgagatctccatgctggaaggtgcggtgctcgacattcgctacggcgtcagtagaattgcgtatagcaaggatttcgaaactttaaaagtggatttcctgagcaaacttccggagatgctgaaaatgtttgaggataggctttgtcataagacgtatctcaatggtgatcatgttacccacccggactttatgctgtacgacgcccttgatgtcgttctgtatatggatcccatgtgcctggacgccttcccgaaattagtgtgttttaaaaaacgtatcgaagcgattccacagatcgataaatacttgaagtcttctaaatatattgcttggcctctgcaaggctggcaggcaacgttcggtgggggagatcatccgccaaaatcagatctggtgccgcgtgggagccctggcatacaccgcgacggtggttctggtgagaacctgtactttcaaagctcagataatgggcctcaaaaccagcgcaacgctccacgtataaccttcggtggcccgtctgactccacaggcagcaaccagaatggtgagcgtagtggagccaggtctaagcagcgccgtccccagggtctgccgaacaacacggcgagctggtttactgcgcttacccaacacggtaaagaagacttaaaattcccgcgtggccagggcgtcccgatcaacactaactcttccccggatgatcagattggttattaccgcagagcaactcgtcggattcgcggcggcgacggtaaaatgaaagatttgtctccgcgttggtacttttactatctcggcaccggtccggaagctggactgccctacggggcaaacaaggacgggatcatttgggtggctaccgaaggtgccctgaatactccaaaagatcatatcggcacccgtaaccctgctaataacgctgcgatcgttctgcaactgcctcagggtacaactctgccaaaaggcttctatgcagaagggtcgcgtggtggcagccaggcgagtagccgtagcagctcccgctctcgcaactcgtcccgtaactccactccgggctcttctcgcggcacgtccccggctcgtatggcaggtaacggtggtgacgctgctctggcgctgctactgctggacaggctgaaccagctggagtcgaagatgagtggtaaaggccaacagcagcagggccagaccgttaccaaaaagagcgcagctgaaatgtctaaaaaaccgcgacagaaacgtaccgcgactaaagggtgtaatgtaacacagtgcttcggtcctcgaggtccggagcaaactcaaggaaactttggcgatgccgatttaaataaaaaggggaccgactacaaacactggccgcaaattgcccagttcgccccatccgctagtgcattcttcggtatgagccgcatctcgagtaaagaacaaccaagtggtacgtggctgacctacaccggtgctatcaagcttgataaagatgacccgaactttaaagaccaggttattctgcttaacaaacatattgatgcctataaaactttcccgccgaccgaacccaaaaaggacaaaaagaaaaaagctgatgaaacccaggctctaccgcagcgtcagaaaaaacagcaaactgtgactctgctgccagctgcggacctggatgatttttccaagcagctgcaacagtctatgagctctgcggactctacgcaggcttaa

SEQ ID NO: 159 - DNA, 2016 bp, Artificial Sequence
  Description of Artificial Sequence: Synthetic polynucleotide
atgcaccatcatcaccatcatggtggttctggttcgccgatacttggttattggaagattaaaggactggttcagcccacacgcctcctgctagaatacttagaggaaaaatatgaagagcacctgtacgaacgtgatgagggggacaaatggcgaaacaagaaatttgaattgggcttagaatttccaaatttgccgtattatatcgatggcgacgtaaaactgacccaatcaatggccattattcgctacatcgcagataaacataacatgctgggtggctgccctaaagaacgggctgagatctccatgctggaaggtgcggtgctcgacattcgctacggcgtcagtagaattgcgtatagcaaggatttcgaaactttaaaagtggatttcctgagcaaacttccggagatgctgaaaatgtttgaggataggctttgtcataagacgtatctcaatggtgatcatgttacccacccggactttatgctgtacgacgcccttgatgtcgttctgtatatggatcccatgtgcctggacgccttcccgaaattagtgtgttttaaaaaacgtatcgaagcgattccacagatcgataaatacttgaagtcttctaaatatattgcttggcctctgcaaggctggcaggcaacgttcggtgggggagatcatccgccaaaatcagatctggtgccgcgtgggagccctggcatacaccgcgacggtggttctggtgagaacctgtactttcaaagctcagataatgggcctcaaaaccagcgcaacgctccacgtataaccttcggtggcccgtctgactccacaggcagcaaccagaatggtgagcgtagtggagccaggtctaagcagcgccgtccccagggtctgccgaacaacacggcgagctggtttactgcgcttacccaacacggtaaagaagacttaaaattcccgcgtggccagggcgtcccgatcaacactaactcttccccggatgatcagattggttattaccgcagagcaactcgtcggattcgcggcggcgacggtaaaatgaaagatttgtctccgcgttggtacttttactatctcggcaccggtccggaagctggactgccctacggggcaaacaaggacgggatcatttgggtggctaccgaaggtgccctgaatactccaaaagatcatatcggcacccgtaaccctgctaataacgctgcgatcgttctgcaactgcctcagggtacaactctgccaaaaggcttctatgcagaagggtcgcgtggtggcagccaggcgagtagccgtagcagctcccgctctcgcaactcgtcccgtaactccactccgggctcttctcgcggcacgtccccggctcgtatggcaggtaacggtggtgacgctgctctggcgctgctactgctggacaggctgaaccagctggagtcgaagatgagtggtaaaggccaacagcagcagggccagaccgttaccaaaaagagcgcagctgaagcatctaaaaaaccgcgacagaaacgtacccccactaaagcgtacaatgtaacacaggccttcggtcgtcgaggtccggagcaaactcaaggaaactttggcgatcaggaattaatccgccaggggaccgactacaaacactggccgcaaattgcccagttcgccccatccgctagtgcattcttcggtatgagccgcatcggcatggaagtaacgccaagtggtacgtggctgacctacaccggtgctatcaagcttgatgacaaggacccgaactttaaagaccaggttattctgcttaacaaacatattgatgcctataaaactttcccgccgaccgaacccaaaaaggacaaaaagaaaaaagctgatgaaacccaggctctaccgcagcgtcagaaaaaacagcaaactgtgactctgctgccagctgcggacctggatgatttttccaagcagctgcaacagtctatgagctctgcggactctacgcaggcttaa

SEQ ID NO: 160 - DNA, 2016 bp, Artificial Sequence
  Description of Artificial Sequence: Synthetic polynucleotide
atgcaccatcatcaccatcatggtggttctggttcgccgatacttggttattggaagattaaaggactggttcagcccacacgcctcctgctagaatacttagaggaaaaatatgaagagcacctgtacgaacgtgatgagggggacaaatggcgaaacaagaaatttgaattgggcttagaatttccaaatttgccgtattatatcgatggcgacgtaaaactgacccaatcaatggccattattcgctacatcgcagataaacataacatgctgggtggctgccctaaagaacgggctgagatctccatgctggaaggtgcggtgctcgacattcgctacggcgtcagtagaattgcgtatagcaaggatttcgaaactttaaaagtggatttcctgagcaaacttccggagatgctgaaaatgtttgaggataggctttgtcataagacgtatctcaatggtgatcatgttacccacccggactttatgctgtacgacgcccttgatgtcgttctgtatatggatcccatgtgcctggacgccttcccgaaattagtgtgttttaaaaaacgtatcgaagcgattccacagatcgataaatacttgaagtcttctaaatatattgcttggcctctgcaaggctggcaggcaacgttcggtgggggagatcatccgccaaaatcagatctggtgccgcgtgggagccctggcatacaccgcgacggtggttctggtgagaacctgtactttcaaagctcagataatgggcctcaaaaccagcgcaacgctccacgtataaccttcggtggcccgtctgactccacaggcagcaaccagaatggtgagcgtagtggagccaggtctaagcagcgccgtccccagggtctgccgaacaacacggcgagctggtttactgcgcttacccaacacggtaaagaagacttaaaattcccgcgtggccagggcgtcccgatcaacactaactcttccccggatgatcagattggttattaccgcagagcaactcgtcggattcgcggcggcgacggtaaaatgaaagatttgtctccgcgttggtacttttactatctcggcaccggtccggaagctggactgccctacggggcaaacaaggacgggatcatttgggtggctaccgaaggtgccctgaatactccaaaagatcatatcggcacccgtaaccctgctaataacgctgcgcgcgttctgcaactgcctcagggtacaactctgccaaaaggcttctatgcagaagggtcgcgtggtggcagccaggcgagtagccgtagcagctcccgctctcgcaactcgtcccgtaactccactccgggctcttctcgcggcacgtccccggctcgtatggcaggtaacggtggtgacgctgctctggcgctgctactgctggacaggctgaaccagctggagtcgaagatgagtggtaaaggccaacagcagcagggccagaccgttaccaaaaagagcgcagctgaagcatctaaaaaaccgcgacagaaacgtaccgcgactaaagcgtacaatgtaacacaggccttcggtcgtcgaggtccggagcaaactcaaggaaactttggcgatcaggaattaatccgccaggggaccgactacaaacactggccgcaaattgcccagttcgccccatccgctagtgcattcttcggtatgagccgcatcggcatggaagtaacgccaagtggtacgtggctgacctacaccggtgctatcaagcttgatgacaaggacccgaactttaaagaccaggttattctgcttaacaaacatattgatgcctataaaactttcccgccgaccgaacccaaaaaggacaaaaagaaaaaagctgatgaaacccaggctctaccgcagcgtcagaaaaaacagcaaactgtgactctgctgccagctgcggacctggatgatttttccaagcagctgcaacagtctatgagctctgcggactctacgcaggcttaa

SEQ ID NO: 161 - DNA, 2016 bp, Artificial Sequence
  Description of Artificial Sequence: Synthetic polynucleotide
atgcaccatcatcaccatcatggtggttctggttcgccgatacttggttattggaagattaaaggactggttcagcccacacgcctcctgctagaatacttagaggaaaaatatgaagagcacctgtacgaacgtgatgagggggacaaatggcgaaacaagaaatttgaattgggcttagaatttccaaatttgccgtattatatcgatggcgacgtaaaactgacccaatcaatggccattattcgctacatcgcagataaacataacatgctgggtggctgccctaaagaacgggctgagatctccatgctggaaggtgcggtgctcgacattcgctacggcgtcagtagaattgcgtatagcaaggatttcgaaactttaaaagtggatttcctgagcaaacttccggagatgctgaaaatgtttgaggataggctttgtcataagacgtatctcaatggtgatcatgttacccacccggactttatgctgtacgacgcccttgatgtcgttctgtatatggatcccatgtgcctggacgccttcccgaaattagtgtgttttaaaaaacgtatcgaagcgattccacagatcgataaatacttgaagtcttctaaatatattgcttggcctctgcaaggctggcaggcaacgttcggtgggggagatcatccgccaaaatcagatctggtgccgcgtgggagccctggcatacaccgcgacggtggttctggtgagaacctgtactttcaaagctcagataatgggcctcaaaaccagcgcaacgctccacgtataaccttcggtggcccgtctgactccacaggcagcaaccagaatggtgagcgtagtggagccaggtctaagcagcgccgtccccagggtctgccgaacaacacggcgagctggtttactggccttacccaaaatggtaaagaagacttaaaattcccgccaggccagggcgtcccgatcaacactaactcttccccggatgatcagattggttattaccgcagagcaactcgtcggattcgcggcggcgacggtaaaatgaaagatttgccaccgaaatggtacttttactatctcggcaccggtccgcatgctgatctgccctacgggcaaaagcacgacggggtgttttgggtggctcgaccgggtgccctgaatactccaaaagatcatatcggcacccgtaaccctgctaataacgctgcgatcccgctgcaactgcctccgggtacaaaactgccaaaaggcttctatgcagaagggtcgcgtggtggcagccaggcgagtagccgtagcagctcccgctctcgcaactcgtcccgtaactccactccgggctcttctcgcggcacgtccccggctcgtatggcaggtaacggtggtgacgctgctctggcgctgctactgctggacaggctgaaccagctggagtcgaagatgagtggtaaaggccaacagcagcagggccagaccgttaccaaaaagagcgcagctgaagcatctaaaaaaccgcgacagaaacgtaccgcgactaaagcgtacaatgtaacacaggccttcggtcgtcgaggtccggagcaaactcaaggaaactttggcgatcaggaattaatccgccaggggaccgactacaaacactggccgcaaattgcccagttcgccccatccgctagtgcattcttcggtatgagccgcatcggcatggaagtaacgccaagtggtacgtggctgacctacaccggtgctatcaagcttgatgacaaggacccgaactttaaagaccaggttattctgcttaacaaacatattgatgcctataaaactttcccgccgaccgaacccaaaaaggacaaaaagaaaaaagctgatgaaacccaggctctaccgcagcgtcagaaaaaacagcaaactgtgactctgctgccagctgcggacctggatgatttttccaagcagctgcaacagtctatgagctctgcggactctacgcaggcttaa

SEQ ID NO: 162 - DNA, 2016 bp, Artificial Sequence
  Description of Artificial Sequence: Synthetic polynucleotide
atgcaccatcatcaccatcatggtggttctggttcgccgatacttggttattggaagattaaaggactggttcagcccacacgcctcctgctagaatacttagaggaaaaatatgaagagcacctgtacgaacgtgatgagggggacaaatggcgaaacaagaaatttgaattgggcttagaatttccaaatttgccgtattatatcgatggcgacgtaaaactgacccaatcaatggccattattcgctacatcgcagataaacataacatgctgggtggctgccctaaagaacgggctgagatctccatgctggaaggtgcggtgctcgacattcgctacggcgtcagtagaattgcgtatagcaaggatttcgaaactttaaaagtggatttcctgagcaaacttccggagatgctgaaaatgtttgaggataggctttgtcataagacgtatctcaatggtgatcatgttacccacccggactttatgctgtacgacgcccttgatgtcgttctgtatatggatcccatgtgcctggacgccttcccgaaattagtgtgttttaaaaaacgtatcgaagcgattccacagatcgataaatacttgaagtcttctaaatatattgcttggcctctgcaaggctggcaggcaacgttcggtgggggagatcatccgccaaaatcagatctggtgccgcgtgggagccctggcatacaccgcgacggtggttctggtgagaacctgtactttcaaagctcagataatgggcctcaaaaccagcgcaacgctccacgtataaccttcggtggcccgtctgactccacaggcagcaaccagaatggtgagcgtagtggagccaggtctaagcagcgccgtccccagggtctgccgaacaacacggcgagctggtttactgcgcttacccaacacggtaaagaagacttaaaattcccgcgtggccagggcgtcccgatcaacactaactcttccccggatgatcagattggttattaccgcagagcaactcgtcggattcgcggcggcgacggtaaaatgaaagatttgtctccgcgttggtacttttactatctcggcaccggtccggaagctggactgccctacggggcaaacaaggacgggatcatttgggtggctaccgaaggtgccctgaatactccaaaagatcatatcggcacccgtaaccctgctaataacgctgcgatcgttctgcaactgcctcagggtacaactctgccaaaaggcttctatgcagaagggtcgcgtggtggcagccaggcgagtagccgtagcagctcccgctctcgcaactcgtcccgtaactccactccgggctcttctcgcggcacgtccccggctcgtatggcaggtaacggtggtgacgctgctctggcgctgctactgctggacaggctgaaccagctggagtcgaagatgagtggtaaaggccaacagcagcagggccagaccgttaccaaaaagagcgcagctgaaatgtctaaaaaaccgcgacagaaacgtaccgcgactaaagagtgcaatgtaacacagtgtttcggtccgcgaggtccggagcaaactcaaggaaactttggcgatgccgaattaatcaagaaagggaccgactacaaacactggccgcaaattgcccagttcgccccatccgctagtgcattcttcggtatgagccgcatctcgtcaaaggaacaaccaagtggtacgtggctgacctacaccggtgctatcaagcttgataaagatgacccgaactttaaagaccaggttattctgcttaacaaacatattgatgcctataaaactttcccgccgaccgaacccaaaaaggacaaaaagaaaaaagctgatgaaacccaggctctaccgcagcgtcagaaaaaacagcaaactgtgactctgctgccagctgcggacctggatgatttttccaagcagctgcaacagtctatgagctctgcggactctacgcaggcttaa

SEQ ID NO: 163 - DNA, 2016 bp, Artificial Sequence
  Description of Artificial Sequence: Synthetic polynucleotide
atgcaccatcatcaccatcatggtggttctggttcgccgatacttggttattggaagattaaaggactggttcagcccacacgcctcctgctagaatacttagaggaaaaatatgaagagcacctgtacgaacgtgatgagggggacaaatggcgaaacaagaaatttgaattgggcttagaatttccaaatttgccgtattatatcgatggcgacgtaaaactgacccaatcaatggccattattcgctacatcgcagataaacataacatgctgggtggctgccctaaagaacgggctgagatctccatgctggaaggtgcggtgctcgacattcgctacggcgtcagtagaattgcgtatagcaaggatttcgaaactttaaaagtggatttcctgagcaaacttccggagatgctgaaaatgtttgaggataggctttgtcataagacgtatctcaatggtgatcatgttacccacccggactttatgctgtacgacgcccttgatgtcgttctgtatatggatcccatgtgcctggacgccttcccgaaattagtgtgttttaaaaaacgtatcgaagcgattccacagatcgataaatacttgaagtcttctaaatatattgcttggcctctgcaaggctggcaggcaacgttcggtgggggagatcatccgccaaaatcagatctggtgccgcgtgggagccctggcatacaccgcgacggtggttctggtgagaacctgtactttcaaagctcagataatgggcctcaaaaccagcgcaacgctccacgtataaccttcggtggcccgtctgactccacaggcagcaaccagaatggtgagcgtagtggagccaggtctaagcagcgccgtccccagggtctgccgaacaacacggcgagctggtttactgcgcttacccaacacggtaaagaagacttaaaattcccgcgtggccagggcgtcccggtaaacactaactcttccccggatgatcagattggttattaccgcagagcaactcgtcggattcgcggcggcgacggtaaaatgaaagatttgtctccgcgttggtacttttactatctcggcaccggtccggaagctggactgccctacggggcaaacaaggacgggatcatttgggtggctaccgaaggtgccctgaatactccaaaagatcatatcggcacccgtaaccctgctaataacgctgcgatcgttctgcaactgcctcagggtacaactctgccaaaaggcttctatgcagaagggtcgcgtggtggcagccaggcgagtagccgtagcagctcccgctctcgcaactcgtcccgtaactccactccgggctcttctcgcggcacgtccccggctcgtatggcaggtaacggtggtgacgctgctctggcgctgctactgctggacaggctgaaccagctggagtcgaagatgagtggtaaaggccaacagcagcagggccagaccgttaccaaaaagagcgcagctgaagcatctaaaaaaccgcgacagaaacgtaccgcgactaaagcgtacaatgtaacacaggccttcggtcgtcgaggtccggagcaaactcaaggaaactttggcgatcaggaattaatccgccaggggaccgactacaaacactggccgcaaattgcccagttcgccccatccgctagtgcattcttcggtatgagccgcatcggcatggaagtaacgccaagtggtacgtggctgacctacaccggtgctatcaagcttgatgacaaggacccgaactttaaagaccaggttattctgcttaacaaacatattgatgcctataaaactttcccgccgaccgaacccaaaaaggacaaaaagaaaaaagctgatgaaacccaggctctaccgcagcgtcagaaaaaacagcaaactgtgactctgctgccagctgcggacctggatgatttttccaagcagctgcaacagtctatgagctctgcggactctacgcaggcttaa

SEQ ID NO: 164 - DNA, 2016 bp, Artificial Sequence
  Description of Artificial Sequence: Synthetic polynucleotide
atgcaccatcatcaccatcatggtggttctggttcgccgatacttggttattggaagattaaaggactggttcagcccacacgcctcctgctagaatacttagaggaaaaatatgaagagcacctgtacgaacgtgatgagggggacaaatggcgaaacaagaaatttgaattgggcttagaatttccaaatttgccgtattatatcgatggcgacgtaaaactgacccaatcaatggccattattcgctacatcgcagataaacataacatgctgggtggctgccctaaagaacgggctgagatctccatgctggaaggtgcggtgctcgacattcgctacggcgtcagtagaattgcgtatagcaaggatttcgaaactttaaaagtggatttcctgagcaaacttccggagatgctgaaaatgtttgaggataggctttgtcataagacgtatctcaatggtgatcatgttacccacccggactttatgctgtacgacgcccttgatgtcgttctgtatatggatcccatgtgcctggacgccttcccgaaattagtgtgttttaaaaaacgtatcgaagcgattccacagatcgataaatacttgaagtcttctaaatatattgcttggcctctgcaaggctggcaggcaacgttcggtgggggagatcatccgccaaaatcagatctggtgccgcgtgggagccctggcatacaccgcgacggtggttctggtgagaacctgtactttcaaagctcagataatgggcctcaaaaccagcgcaacgctccacgtataaccttcggtggcccgtctgactccacaggcagcaaccagaatggtgagcgtagtggagccaggtctaagcagcgccgtccccagggtctgccgaacaacacggcgagctggtttactccgcttacccaaaatggtaaagaagacttaaaattcccgccaggccagggcgtcccgatcaacactaactcttccccggatgatcagattggttattaccgcagagcaactcgtcggattcgcggcggcgacggtaaaatgaaagatttgccaccgaagtggtacttttactatctcggcaccggtccgcatgctgatctgccctacgggcaaaaacaggacggggtggtatgggtggctcgaccaggtgccctgaatactccaaaagatcatatcggcacccgtaaccctgctaataacgctgcgatcccgctgcaactgcctcctggtacaaaactgccaaaaggcttctatgcagaagggtcgcgtggtggcagccaggcgagtagccgtagcagctcccgctctcgcaactcgtcccgtaactccactccgggctcttctcgcggcacgtccccggctcgtatggcaggtaacggtggtgacgctgctctggcgctgctactgctggacaggctgaaccagctggagtcgaagatgagtggtaaaggccaacagcagcagggccagaccgttaccaaaaagagcgcagctgaagcatctaaaaaaccgcgacagaaacgtaccgcgactaaagcgtacaatgtaacacaggccttcggtcgtcgaggtccggagcaaactcaaggaaactttggcgatcaggaattaatccgccaggggaccgactacaaacactggccgcaaattgcccagttcgccccatccgctagtgcattcttcggtatgagccgcatcggcatggaagtaacgccaagtggtacgtggctgacctacaccggtgctatcaagcttgatgacaaggacccgaactttaaagaccaggttattctgcttaacaaacatattgatgcctataaaactttcccgccgaccgaacccaaaaaggacaaaaagaaaaaagctgatgaaacccaggctctaccgcagcgtcagaaaaaacagcaaactgtgactctgctgccagctgcggacctggatgatttttccaagcagctgcaacagtctatgagctctgcggactctacgcaggcttaa

SEQ ID NO: 165 - DNA, 2016 bp, Artificial Sequence
  Description of Artificial Sequence: Synthetic polynucleotide
atgcaccatcatcaccatcatggtggttctggttcgccgatacttggttattggaagattaaaggactggttcagcccacacgcctcctgctagaatacttagaggaaaaatatgaagagcacctgtacgaacgtgatgagggggacaaatggcgaaacaagaaatttgaattgggcttagaatttccaaatttgccgtattatatcgatggcgacgtaaaactgacccaatcaatggccattattcgctacatcgcagataaacataacatgctgggtggctgccctaaagaacgggctgagatctccatgctggaaggtgcggtgctcgacattcgctacggcgtcagtagaattgcgtatagcaaggatttcgaaactttaaaagtggatttcctgagcaaacttccggagatgctgaaaatgtttgaggataggctttgtcataagacgtatctcaatggtgatcatgttacccacccggactttatgctgtacgacgcccttgatgtcgttctgtatatggatcccatgtgcctggacgccttcccgaaattagtgtgttttaaaaaacgtatcgaagcgattccacagatcgataaatacttgaagtcttctaaatatattgcttggcctctgcaaggctggcaggcaacgttcggtgggggagatcatccgccaaaatcagatctggtgccgcgtgggagccctggcatacaccgcgacggtggttctggtgagaacctgtactttcaaagctcagataatgggcctcaaaaccagcgcaacgctccacgtataaccttcggtggcccgtctgactccacaggcagcaaccagaatggtgagcgtagtggagccaggtctaagcagcgccgtccccagggtctgccgaacaacacggcgagctggtttactgcgcttacccaacacggtaaagaagacttaaaattcccgcgtggccagggcgtcccgatcaacactaactcttccccggatgatcagattggttattaccgcagagcaactcgtcggattcgcggcggcgacggtaaaatgaaagatttgtctccgcgttggtacttttactatctcggcaccggtccggaagctggactgccctacggggcaaacaaggacgggatcatttgggtggctaccgaaggtgccctgaatactccaaaagatcatatcggcacccgtaaccctgctaataacgctgcgatcgttctgcaactgcctcagggtacaactctgccaaaaggcttctatgcagaagggtcgcgtggtggcagccaggcgagtagccgtagcagctcccgctctcgcaactcgtcccgtaactccactccgggctcttctcgcggcacgtccccggctcgtatggcaggtaacggtggtgacgctgctctggcgctgctactgctggacaggctgaaccagctggagtcgaagatgagtggtaaaggccaacagcagcagggccagaccgttaccaaaaagagcgcagctgaagcatctaaaaaaccgcgacagaaacgtaccgcgactaaagcgtacaatgtaacacaggccttcggtcgtcgaggtccggagcaaactcaaggaaactttggcgatcaggaattaatccgccaggggaccgactacaaacactggccgcaaattgcccagttcgccccatccgctagtgcattcttcggtatgagccgcatcggcatggaagtaacgccaagtggtacgtggctgacctacaccggtgctatcaagcttgatgacaaggacccgaactttgaagaccaggttattctgcttaacaaacatattgatgcctataaaactttcccgccgaccgaacccaaaaaggacaaaaagaaaaaagctgatgaaacccaggctctaccgcagcgtcagaaaaaacagcaaactgtgactctgctgccagctgcggacctggatgatttttccaagcagctgcaacagtctatgagctctgcggactctacgcaggcttaa

SEQ ID NO: 166 - DNA, 2016 bp, Artificial Sequence
  Description of Artificial Sequence: Synthetic polynucleotide
atgcaccatcatcaccatcatggtggttctggttcgccgatacttggttattggaagattaaaggactggttcagcccacacgcctcctgctagaatacttagaggaaaaatatgaagagcacctgtacgaacgtgatgagggggacaaatggcgaaacaagaaatttgaattgggcttagaatttccaaatttgccgtattatatcgatggcgacgtaaaactgacccaatcaatggccattattcgctacatcgcagataaacataacatgctgggtggctgccctaaagaacgggctgagatctccatgctggaaggtgcggtgctcgacattcgctacggcgtcagtagaattgcgtatagcaaggatttcgaaactttaaaagtggatttcctgagcaaacttccggagatgctgaaaatgtttgaggataggctttgtcataagacgtatctcaatggtgatcatgttacccacccggactttatgctgtacgacgcccttgatgtcgttctgtatatggatcccatgtgcctggacgccttcccgaaattagtgtgttttaaaaaacgtatcgaagcgattccacagatcgataaatacttgaagtcttctaaatatattgcttggcctctgcaaggctggcaggcaacgttcggtgggggagatcatccgccaaaatcagatctggtgccgcgtgggagccctggcatacaccgcgacggtggttctggtgagaacctgtactttcaaagctcagataatgggcctcaaaaccagcgcaacgctccacgtataaccttcggtggcccgtctgactccacaggcagcaaccagaatggtgagcgtagtggagccaggtctaagcagcgccgtccccagggtctgccgaacaacacggcgagctggtttactccgcttacccaattcggtaaagaagacttaaaattcccgccaggccagggcgtcccgatcaacactaactcttccccggatgatcagattggttattaccgcagagcaactcgtcggattcgcggcggcgacggtaaaatgaaagatttgcctccgaagtggtacttttactatctcggcaccggtccgcatgctgatctgccctacgggcaaaaacacgacggggtagtgtgggtggctcgcccaggtgccctgaatactccaaaagatcatatcggcacccgtaaccctgctaataacgctgcgatcccgctgcaactgcctccgggtacaaaactgccaaaaggcttctatgcagaagggtcgcgtggtggcagccaggcgagtagccgtagcagctcccgctctcgcaactcgtcccgtaactccactccgggctcttctcgcggcacgtccccggctcgtatggcaggtaacggtggtgacgctgctctggcgctgctactgctggacaggctgaaccagctggagtcgaagatgagtggtaaaggccaacagcagcagggccagaccgttaccaaaaagagcgcagctgaagcatctaaaaaaccgcgacagaaacgtaccgcgactaaagcgtacaatgtaacacaggccttcggtcgtcgaggtccggagcaaactcaaggaaactttggcgatcaggaattaatccgccaggggaccgactacaaacactggccgcaaattgcccagttcgccccatccgctagtgcattcttcggtatgagccgcatcggcatggaagtaacgccaagtggtacgtggctgacctacaccggtgctatcaagcttgatgacaaggacccgaactttaaagaccaggttattctgcttaacaaacatattgatgcctataaaactttcccgccgaccgaacccaaaaaggacaaaaagaaaaaagctgatgaaacccaggctctaccgcagcgtcagaaaaaacagcaaactgtgactctgctgccagctgcggacctggatgatttttccaagcagctgcaacagtctatgagctctgcggactctacgcaggcttaa

SEQ ID NO: 167 - DNA, 2016 bp, Artificial Sequence
  Description of Artificial Sequence: Synthetic polynucleotide
atgcaccatcatcaccatcatggtggttctggttcgccgatacttggttattggaagattaaaggactggttcagcccacacgcctcctgctagaatacttagaggaaaaatatgaagagcacctgtacgaacgtgatgagggggacaaatggcgaaacaagaaatttgaattgggcttagaatttccaaatttgccgtattatatcgatggcgacgtaaaactgacccaatcaatggccattattcgctacatcgcagataaacataacatgctgggtggctgccctaaagaacgggctgagatctccatgctggaaggtgcggtgctcgacattcgctacggcgtcagtagaattgcgtatagcaaggatttcgaaactttaaaagtggatttcctgagcaaacttccggagatgctgaaaatgtttgaggataggctttgtcataagacgtatctcaatggtgatcatgttacccacccggactttatgctgtacgacgcccttgatgtcgttctgtatatggatcccatgtgcctggacgccttcccgaaattagtgtgttttaaaaaacgtatcgaagcgattccacagatcgataaatacttgaagtcttctaaatatattgcttggcctctgcaaggctggcaggcaacgttcggtgggggagatcatccgccaaaatcagatctggtgccgcgtgggagccctggcatacaccgcgacggtggttctggtgagaacctgtactttcaaagctcagataatgggcctcaaaaccagcgcaacgctccacgtataaccttcggtggcccgtctgactccacaggcagcaaccagaatggtgagcgtagtggagccaggtctaagcagcgccgtccccagggtctgccgaacaacacggcgagctggtttactgcgcttacccaacacggtaaagaagacttaaaattcccgcgtggccagggcgtcccgatcaacactaactcttccccggatgatcagattggttattaccgcagaacgactcgtcggattcgcggcggcgacggtaaaatgaaagatttgtctccgcgttggtacttttactatctcggcaccggtccggaagctggactgccctacggggcaaacaaggacgggatcatttgggtggctaccgaaggtgccctgaatactccaaaagatcatatcggcacccgtaaccctgctaataacgctgcgatcgttctgcaactgcctcagggtacaactctgccaaaaggcttctatgcagaagggtcgcgtggtggcagccaggcgagtagccgtagcagctcccgctctcgcaactcgtcccgtaactccactccgggctcttctcgcggcacgtccccggctcgtatggcaggtaacggtggtgacgctgctctggcgctgctactgctggacaggctgaaccagctggagtcgaagatgagtggtaaaggccaacagcagcagggccagaccgttaccaaaaagagcgcagctgaagcatctaaaaaaccgcgacagaaacgtaccgcgactaaagcgtacaatgtaacacaggccttcggtcgtcgaggtccggagcaaactcaaggaaactttggcgatcaggaattaatccgccaggggaccgactacaaacactggccgcaaattgcccagttcgccccatccgctagtgcattcttcggtatgagccgcatcggcatggaagtaacgccaagtggtacgtggctgacctacaccggtgctatcaagcttgatgacaaggacccgaactttaaagaccaggttattctgcttaacaaacatattgatgcctataaaactttcccgccgaccgaacccaaaaaggacaaaaagaaaaaagctgatgaaacccaggctctaccgcagcgtcagaaaaaacagcaaactgtgactctgctgccagctgcggacctggatgatttttccaagcagctgcaacagtctatgagctctgcggactctacgcaggcttaa

SEQ ID NO: 168 - DNA, 2016 bp, Artificial Sequence
  Description of Artificial Sequence: Synthetic polynucleotide
atgcaccatcatcaccatcatggtggttctggttcgccgatacttggttattggaagattaaaggactggttcagcccacacgcctcctgctagaatacttagaggaaaaatatgaagagcacctgtacgaacgtgatgagggggacaaatggcgaaacaagaaatttgaattgggcttagaatttccaaatttgccgtattatatcgatggcgacgtaaaactgacccaatcaatggccattattcgctacatcgcagataaacataacatgctgggtggctgccctaaagaacgggctgagatctccatgctggaaggtgcggtgctcgacattcgctacggcgtcagtagaattgcgtatagcaaggatttcgaaactttaaaagtggatttcctgagcaaacttccggagatgctgaaaatgtttgaggataggctttgtcataagacgtatctcaatggtgatcatgttacccacccggactttatgctgtacgacgcccttgatgtcgttctgtatatggatcccatgtgcctggacgccttcccgaaattagtgtgttttaaaaaacgtatcgaagcgattccacagatcgataaatacttgaagtcttctaaatatattgcttggcctctgcaaggctggcaggcaacgttcggtgggggagatcatccgccaaaatcagatctggtgccgcgtgggagccctggcatacaccgcgacggtggttctggtgagaacctgtactttcaaagctcagataatgggcctcaaaaccagcgcaacgctccacgtataaccttcggtggcccgtctgactccacaggcagcaaccagaatggtgagcgtagtggagccaggtctaagcagcgccgtccccagggtctgccgaacaacacggcgagctggtttactgcgcttacccaacacggtaaagaagacttaaaattcccgcgtggccagggcgtcccgatcaacactaactcttccccggatgatcagattggttattaccgcagagcaactcgtcggattcgcggcggcgacggtaaaatgaaagatttgtctccgcgttggtacttttactatctcggcaccggtccggaagctggactgccctacggggcaaacaaggacgggatcatttgggtggctaccgaaggtgccctgaatactccaaaagatcatatcggcacccgtaaccctgctaataacgctgcgatcgttctgcaactgcctcagggtacaactctgccaaaaggcttctatgcagaagggtcgcgtggtggcagccaggcgagtagccgtagcagctcccgctctcgcaactcgtcccgtaactccactccgggctcttctcgcggcacgtccccggctcgtatggcaggtaacggtggtgacgctgctctggcgctgctactgctggacaggctgaaccagctggagtcgaagatgagtggtaaaggccaacagcagcagggccagaccgttaccaaaaagagcgcagctgaaatgtctaaaaaaccgcgatggaaacgtaccccgactaaagggtacaatgtaacacaggccttcggtccacgaggtccgaaagatactcaaggaaactttggcgatgccgaattaatcaaacaggggaccgactacaaacactggccgcaaattgcccagttcgtgccatccgctgcggcattcttctttatgagccgcatctcgatgaaagaaacgccagatggtgtctggctgacctacaccggtacgatcaagcttgataaagatgacccgaactttgatgaccaggttaagctgcttaacaaacatattgatgcctataaaactttcccgccgaccgaacccaaaaaggacaaaaagaaaaaagctgatgaaacccaggctctaccgcagcgtcagaaaaaacagcaaactgtgactctgctgccagctgcggacctggatgatttttccaagcagctgcaacagtctatgagctctgcggactctacgcaggcttaa

SEQ ID NO: 169 - DNA, 2016 bp, Artificial Sequence
  Description of Artificial Sequence: Synthetic polynucleotide
atgcaccatcatcaccatcatggtggttctggttcgccgatacttggttattggaagattaaaggactggttcagcccacacgcctcctgctagaatacttagaggaaaaatatgaagagcacctgtacgaacgtgatgagggggacaaatggcgaaacaagaaatttgaattgggcttagaatttccaaatttgccgtattatatcgatggcgacgtaaaactgacccaatcaatggccattattcgctacatcgcagataaacataacatgctgggtggctgccctaaagaacgggctgagatctccatgctggaaggtgcggtgctcgacattcgctacggcgtcagtagaattgcgtatagcaaggatttcgaaactttaaaagtggatttcctgagcaaacttccggagatgctgaaaatgtttgaggataggctttgtcataagacgtatctcaatggtgatcatgttacccacccggactttatgctgtacgacgcccttgatgtcgttctgtatatggatcccatgtgcctggacgccttcccgaaattagtgtgttttaaaaaacgtatcgaagcgattccacagatcgataaatacttgaagtcttctaaatatattgcttggcctctgcaaggctggcaggcaacgttcggtgggggagatcatccgccaaaatcagatctggtgccgcgtgggagccctggcatacaccgcgacggtggttctggtgagaacctgtactttcaaagctcagataatgggcctcaaaaccagcgcaacgctccacgtataaccttcggtggcccgtctgactccacaggcagcaaccagaatggtgagcgtagtggagccaggtctaagcagcgccgtccccagggtctgccgaacaacacggcgagctggtttactgcgcttacccaacacggtaaagaagacttaaaattcccgcgtggccagggcgtcccgatcaacactaactcttccccggatgatcagattggttattaccgcagagcaactcgtcggattcgcggcggcgacggtaaaatgaaagatttgtctccgcgttggtacttttactatctcggcaccggtccggaagctggactgccctacggggcaaacaaggacgggatcatttgggtggctaccgaaggtgccctgaatactccaaaagatcatatcggcacccgtaaccctgctaataacgctgcgatcgttctgcaactgcctcagggtacaactctgccaaaaggcttctatgcagaagggtcgcgtggtggcagccaggcgagtagccgtagcagctcccgctctcgcaactcgtcccgtaactccactccgggctcttctcgcggcacgtccccggctcgtatggcaggtaacggtggtgacgctgctctggcgctgctactgctggacaggctgaaccagctggagtcgaagatgagtggtaaaggccaacagcagcagggccagaccgttaccaaaaagagcgcagctgaagcatctaaaaaaccgcgacagaaacgtaccgcgactaaagaatacaatgtaacacaggccttcggtcgtcgaggtccggagcaaactcaaggaaactttggcgatcaggatttaaataaacttgggaccgactacaaacactggccgcaaattgcccagttcgccccatccgctagtgcattcttcggtatgagccgcatcagtacggaagaaacgccaagtggtacgtggctgacctacaccggtgctatcaagcttgataaaaaggacccgaactttaaagaccaggttattctgcttaacaaacatattgatgcctataaaactttcccgccgaccgaacccaaaaaggacaaaaagaaaaaagctgatgaaacccaggctctaccgcagcgtcagaaaaaacagcaaactgtgactctgctgccagctgcggacctggatgatttttccaagcagctgcaacagtctatgagctctgcggactctacgcaggcttaa

SEQ ID NO: 170 - DNA, 2016 bp, Artificial Sequence
  Description of Artificial Sequence: Synthetic polynucleotide
atgcaccatcatcaccatcatggtggttctggttcgccgatacttggttattggaagattaaaggactggttcagcccacacgcctcctgctagaatacttagaggaaaaatatgaagagcacctgtacgaacgtgatgagggggacaaatggcgaaacaagaaatttgaattgggcttagaatttccaaatttgccgtattatatcgatggcgacgtaaaactgacccaatcaatggccattattcgctacatcgcagataaacataacatgctgggtggctgccctaaagaacgggctgagatctccatgctggaaggtgcggtgctcgacattcgctacggcgtcagtagaattgcgtatagcaaggatttcgaaactttaaaagtggatttcctgagcaaacttccggagatgctgaaaatgtttgaggataggctttgtcataagacgtatctcaatggtgatcatgttacccacccggactttatgctgtacgacgcccttgatgtcgttctgtatatggatcccatgtgcctggacgccttcccgaaattagtgtgttttaaaaaacgtatcgaagcgattccacagatcgataaatacttgaagtcttctaaatatattgcttggcctctgcaaggctggcaggcaacgttcggtgggggagatcatccgccaaaatcagatctggtgccgcgtgggagccctggcatacaccgcgacggtggttctggtgagaacctgtactttcaaagctcagataatgggcctcaaaaccagcgcaacgctccacgtataaccttcggtggcccgtctgactccacaggcagcaaccagaatggtgagcgtagtggagccaggtctaagcagcgccgtccccagggtctgccgaacaacacggcgagctggtttactgcgcttacccaacacggtaaagaagacttaaaattcccgcgtggccagggcgtcccgatcaacactaactcttccccggatgatcagattggtacgtaccgcagagcaactcgtcggattcgcggcggcgacggtaaaatgaaagatttgtctccgcgttggtacttttactatctcggcaccggtccggaagctggactgccctacggggcaaacaaggacgggatcatttgggtggctaccgaaggtgccctgaatactccaaaagatcatatcggcacccgtaaccctgctaataacgctgcgatcgttctgcaactgcctcagggtacaactctgccaaaaggcttctatgcagaagggtcgcgtggtggcagccaggcgagtagccgtagcagctcccgctctcgcaactcgtcccgtaactccactccgggctcttctcgcggcacgtccccggctcgtatggcaggtaacggtggtgacgctgctctggcgctgctactgctggacaggctgaaccagctggagtcgaagatgagtggtaaaggccaacagcagcagggccagaccgttaccaaaaagagcgcagctgaagcatctaaaaaaccgcgacagaaacgtaccgcgactaaagcgtacaatgtaacacaggccttcggtcgtcgaggtccggagcaaactcaaggaaactttggcgatcaggaattaatccgccaggggaccgactacaaacactggccgcaaattgcccagttcgccccatccgctagtgcattcttcggtatgagccgcatcggcatggaagtaacgccaagtggtacgtggctgacctacaccggtgctatcaagcttgatgacaaggacccgaactttaaagaccaggttattctgcttaacaaacatattgatgcctataaaactttcccgccgaccgaacccaaaaaggacaaaaagaaaaaagctgatgaaacccaggctctaccgcagcgtcagaaaaaacagcaaactgtgactctgctgccagctgcggacctggatgatttttccaagcagctgcaacagtctatgagctctgcggactctacgcaggcttaa

SEQ ID NO: 171 - DNA, 2016 bp, Artificial Sequence
  Description of Artificial Sequence: Synthetic polynucleotide
atgcaccatcatcaccatcatggtggttctggttcgccgatacttggttattggaagattaaaggactggttcagcccacacgcctcctgctagaatacttagaggaaaaatatgaagagcacctgtacgaacgtgatgagggggacaaatggcgaaacaagaaatttgaattgggcttagaatttccaaatttgccgtattatatcgatggcgacgtaaaactgacccaatcaatggccattattcgctacatcgcagataaacataacatgctgggtggctgccctaaagaacgggctgagatctccatgctggaaggtgcggtgctcgacattcgctacggcgtcagtagaattgcgtatagcaaggatttcgaaactttaaaagtggatttcctgagcaaacttccggagatgctgaaaatgtttgaggataggctttgtcataagacgtatctcaatggtgatcatgttacccacccggactttatgctgtacgacgcccttgatgtcgttctgtatatggatcccatgtgcctggacgccttcccgaaattagtgtgttttaaaaaacgtatcgaagcgattccacagatcgataaatacttgaagtcttctaaatatattgcttggcctctgcaaggctggcaggcaacgttcggtgggggagatcatccgccaaaatcagatctggtgccgcgtgggagccctggcatacaccgcgacggtggttctggtgagaacctgtactttcaaagctcagataatgggcctcaaaaccagcgcaacgctccacgtataaccttcggtggcccgtctgactccacaggcagcaaccagaatggtgagcgtagtggagccaggtctaagcagcgccgtccccagggtctgccgaacaacacggcgagctggtttactgcgcttacccaacacggtaaagaagacttaaaattcccgcgtggccagggcgtcccgatcaacactaactcttccccggatgatcagattggttattaccgcagagcaactcgtcggattcgcggcggcgacggtaaaatgaaagatttgtctccgcgttggtacttttactatctcggcaccggtccggaagctggactgccctacggggcaaacaaggacgggatcatttgggtggctaccgaaggtgccctgaatactccaaaagatcatatcggcacccgtaaccctgctaataacgctgcgatcgttctgcaactgcctcagggtacaactctgccaaaaggcttctatgcagaagggtcgcgtggtggcagccaggcgagtagccgtagcagctcccgctctcgcaactcgtcccgtaactccactccgggctcttctcgcggcacgtccccggctcgtatggcaggtaacggtggtgacgctgctctggcgctgctactgctggacaggctgaaccagctggagtcgaagatgagtggtaaaggccaacagcagcagggccagaccgttaccaaaaagagcgcagctgaagcatctaaaaaaccgcgacagaaacgtaccgcgactaaagcgtacaatgtaacacaggccttcggtcgtcgaggtccggagcaaactcaaggaaactttggcgatcaggaattaaatcgccaggggaccgactacaaacactggccgcaaattgcccagttcgccccatccgctagtgcattcttcggtatgagccgcatcggcatggaagtaacgccaagtggtacgtggctgacctacaccggtgctatcaagcttgatgacaaggacccgaactttaaagaccaggttattctgcttaacaaacatattgatgcctataaaactttcccgccgaccgaacccaaaaaggacaaaaagaaaaaagctgatgaaacccaggctctaccgcagcgtcagaaaaaacagcaaactgtgactctgctgccagctgcggacctggatgatttttccaagcagctgcaacagtctatgagctctgcggactctacgcaggcttaa

SEQ ID NO: 172 - DNA, 2016 bp, Artificial Sequence
  Description of Artificial Sequence: Synthetic polynucleotide
atgcaccatcatcaccatcatggtggttctggttcgccgatacttggttattggaagattaaaggactggttcagcccacacgcctcctgctagaatacttagaggaaaaatatgaagagcacctgtacgaacgtgatgagggggacaaatggcgaaacaagaaatttgaattgggcttagaatttccaaatttgccgtattatatcgatggcgacgtaaaactgacccaatcaatggccattattcgctacatcgcagataaacataacatgctgggtggctgccctaaagaacgggctgagatctccatgctggaaggtgcggtgctcgacattcgctacggcgtcagtagaattgcgtatagcaaggatttcgaaactttaaaagtggatttcctgagcaaacttccggagatgctgaaaatgtttgaggataggctttgtcataagacgtatctcaatggtgatcatgttacccacccggactttatgctgtacgacgcccttgatgtcgttctgtatatggatcccatgtgcctggacgccttcccgaaattagtgtgttttaaaaaacgtatcgaagcgattccacagatcgataaatacttgaagtcttctaaatatattgcttggcctctgcaaggctggcaggcaacgttcggtgggggagatcatccgccaaaatcagatctggtgccgcgtgggagccctggcatacaccgcgacggtggttctggtgagaacctgtactttcaaagctcagataatgggcctcaaaaccagcgcaacgctccacgtataaccttcggtggcccgtctgactccacaggcagcaaccagaatggtgagcgtagtggagccaggtctaagcagcgccgtccccagggtctgccgaacaacacggcgagctggtttactgcgcttacccaacacggtaaagaagacttaaaattcccgcgtggccagggcgtcccgatcaacactaactcttccccggatgatcagattggtccataccgcagagcaactcgtcggattcgcggcggcgacggtaaaatgaaagatttgtctccgcgttggtacttttactatctcggcaccggtccggaagctggactgccctacggggcaaacaaggacgggatcatttgggtggctaccgaaggtgccctgaatactccaaaagatcatatcggcacccgtaaccctgctaataacgctgcgatcgttctgcaactgcctcagggtacaactctgccaaaaggcttctatgcagaagggtcgcgtggtggcagccaggcgagtagccgtagcagctcccgctctcgcaactcgtcccgtaactccactccgggctcttctcgcggcacgtccccggctcgtatggcaggtaacggtggtgacgctgctctggcgctgctactgctggacaggctgaaccagctggagtcgaagatgagtggtaaaggccaacagcagcagggccagaccgttaccaaaaagagcgcagctgaagcatctaaaaaaccgcgacagaaacgtaccgcgactaaagcgtacaatgtaacacaggccttcggtcgtcgaggtccggagcaaactcaaggaaactttggcgatcaggaattaatccgccaggggaccgactacaaacactggccgcaaattgcccagttcgccccatccgctagtgcattcttcggtatgagccgcatcggcatggaagtaacgccaagtggtacgtggctgacctacaccggtgctatcaagcttgatgacaaggacccgaactttaaagaccaggttattctgcttaacaaacatattgatgcctataaaactttcccgccgaccgaacccaaaaaggacaaaaagaaaaaagctgatgaaacccaggctctaccgcagcgtcagaaaaaacagcaaactgtgactctgctgccagctgcggacctggatgatttttccaagcagctgcaacagtctatgagctctgcggactctacgcaggcttaa

SEQ ID NO: 173 - DNA, 2016 bp, Artificial Sequence
  Description of Artificial Sequence: Synthetic polynucleotide
atgcaccatcatcaccatcatggtggttctggttcgccgatacttggttattggaagattaaaggactggttcagcccacacgcctcctgctagaatacttagaggaaaaatatgaagagcacctgtacgaacgtgatgagggggacaaatggcgaaacaagaaatttgaattgggcttagaatttccaaatttgccgtattatatcgatggcgacgtaaaactgacccaatcaatggccattattcgctacatcgcagataaacataacatgctgggtggctgccctaaagaacgggctgagatctccatgctggaaggtgcggtgctcgacattcgctacggcgtcagtagaattgcgtatagcaaggatttcgaaactttaaaagtggatttcctgagcaaacttccggagatgctgaaaatgtttgaggataggctttgtcataagacgtatctcaatggtgatcatgttacccacccggactttatgctgtacgacgcccttgatgtcgttctgtatatggatcccatgtgcctggacgccttcccgaaattagtgtgttttaaaaaacgtatcgaagcgattccacagatcgataaatacttgaagtcttctaaatatattgcttggcctctgcaaggctggcaggcaacgttcggtgggggagatcatccgccaaaatcagatctggtgccgcgtgggagccctggcatacaccgcgacggtggttctggtgagaacctgtactttcaaagctcagataatgggcctcaaaaccagcgcaacgctccacgtataaccttcggtggcccgtctgactccacaggcagcaaccagaatggtgagcgtagtggagccaggtctaagcagcgccgtccccagggtctgccgaacaacacggcgagctggtttactgcgcttacccaacacggtaaagaagacttaaaattcccgcgtggccagggcgtcccgatcaacactaactcttccccggatgatcagattggttattaccgcagagcaactcgtcggattcgcggcggcgacggtaaaatgaaagatttgtctccgcgttggtacttttactatctcggcaccggtccggaagctggactgccctacggggcaaacaaggacgggatcatttgggtggctaccgaaggtgccctgaatactccaaaagatcatatcggcacccgtaaccctgctaataacgctgcgatcgttctgcaactgcctcagggtacaactctgccaaaaggcttctatgcagaagggtcgcgtggtggcagccaggcgagtagccgtagcagctcccgctctcgcaactcgtcccgtaactccactccgggctcttctcgcggcacgtccccggctcgtatggcaggtaacggtggtgacgctgctctggcgctgctactgctggacaggctgaaccagctggagtcgaagatgagtggtaaaggccaacagcagcagggccagaccgttaccaaaaagagcgcagctgaagcatctaaaaaaccgcgacagaaacgtaccgcgactaaaaattacaatgtaacacaggccttcggtcgtcgaggtccggagcaaactcaaggaaactttggcgatcaggaattaatccgccaggggaccgactacaaacactggccgcaaattgcccagttcgccccatccgctagtgcattcttcggtatgagccgcatcggcatggaagtaacgccaagtggtacgtggctgacctacaccggtgctatcaagcttgatgacaaggacccgaactttaaagaccaggttattctgcttaacaaacatattgatgcctataaaactttcccgccgaccgaacccaaaaaggacaaaaagaaaaaagctgatgaaacccaggctctaccgcagcgtcagaaaaaacagcaaactgtgactctgctgccagctgcggacctggatgatttttccaagcagctgcaacagtctatgagctctgcggactctacgcaggcttaa

SEQ ID NO: 174 - DNA, 2016 bp, Artificial Sequence
  Description of Artificial Sequence: Synthetic polynucleotide
atgcaccatcatcaccatcatggtggttctggttcgccgatacttggttattggaagattaaaggactggttcagcccacacgcctcctgctagaatacttagaggaaaaatatgaagagcacctgtacgaacgtgatgagggggacaaatggcgaaacaagaaatttgaattgggcttagaatttccaaatttgccgtattatatcgatggcgacgtaaaactgacccaatcaatggccattattcgctacatcgcagataaacataacatgctgggtggctgccctaaagaacgggctgagatctccatgctggaaggtgcggtgctcgacattcgctacggcgtcagtagaattgcgtatagcaaggatttcgaaactttaaaagtggatttcctgagcaaacttccggagatgctgaaaatgtttgaggataggctttgtcataagacgtatctcaatggtgatcatgttacccacccggactttatgctgtacgacgcccttgatgtcgttctgtatatggatcccatgtgcctggacgccttcccgaaattagtgtgttttaaaaaacgtatcgaagcgattccacagatcgataaatacttgaagtcttctaaatatattgcttggcctctgcaaggctggcaggcaacgttcggtgggggagatcatccgccaaaatcagatctggtgccgcgtgggagccctggcatacaccgcgacggtggttctggtgagaacctgtactttcaaagctcagataatgggcctcaaaaccagcgcaacgctccacgtataaccttcggtggcccgtctgactccacaggcagcaaccagaatggtgagcgtagtggagccaggtctaagcagcgccgtccccagggtctgccgaacaacacggcgagctggtttactgcgcttacccaacacggtaaagaagacttaaaattcccgcgtggccagggcgtcccgatcaacactaactcttccccggatgatcagattggttattaccgcagagcaactcgtcggattcgcggcggcgacggtaaaatgaaagatttgtctccgcgttggtacttttactatctcggcaccggtccggaagctggactgccctacggggcaaacaaggacgggatcatttgggtggctaccgaaggtgccctgaatactccaaaagatcatatcggcacccgtaaccctgctaataacgctgcgatcgttctgcaactgcctcagggtacaactctgccaaaaggcttctatgcagaagggtcgcgtggtggcagccaggcgagtagccgtagcagctcccgctctcgcaactcgtcccgtaactccactccgggctcttctcgcggcacgtccccggctcgtatggcaggtaacggtggtgacgctgctctggcgctgctactgctggacaggctgaaccagctggagtcgaagatgagtggtaaaggccaacagcagcagggccagaccgttaccaaaaagagcgcagctgaagcatctaaaaaaccgcgacagaaacgtaccgcgactaaagcgtacaatgtaacacaggccttcggtcgtcgaggtccggagcaaactcaaggaaactttggcgatcaggaattaatccgccaggggaccgactacaaacactggccgcaaattgcccagttcgccccatccgctagtgcattcttcggtatgagccgcatcggcatggaagtaacgccaagtggtacgtggctgacctacaccggtgctatcaagcttgatgaaaaggacccgaactttaaagaccaggttattctgcttaacaaacatattgatgcctataaaactttcccgccgaccgaacccaaaaaggacaaaaagaaaaaagctgatgaaacccaggctctaccgcagcgtcagaaaaaacagcaaactgtgactctgctgccagctgcggacctggatgatttttccaagcagctgcaacagtctatgagctctgcggactctacgcaggcttaa

SEQ ID NO: 175 - DNA, 2016 bp, Artificial Sequence
  Description of Artificial Sequence: Synthetic polynucleotide
atgcaccatcatcaccatcatggtggttctggttcgccgatacttggttattggaagattaaaggactggttcagcccacacgcctcctgctagaatacttagaggaaaaatatgaagagcacctgtacgaacgtgatgagggggacaaatggcgaaacaagaaatttgaattgggcttagaatttccaaatttgccgtattatatcgatggcgacgtaaaactgacccaatcaatggccattattcgctacatcgcagataaacataacatgctgggtggctgccctaaagaacgggctgagatctccatgctggaaggtgcggtgctcgacattcgctacggcgtcagtagaattgcgtatagcaaggatttcgaaactttaaaagtggatttcctgagcaaacttccggagatgctgaaaatgtttgaggataggctttgtcataagacgtatctcaatggtgatcatgttacccacccggactttatgctgtacgacgcccttgatgtcgttctgtatatggatcccatgtgcctggacgccttcccgaaattagtgtgttttaaaaaacgtatcgaagcgattccacagatcgataaatacttgaagtcttctaaatatattgcttggcctctgcaaggctggcaggcaacgttcggtgggggagatcatccgccaaaatcagatctggtgccgcgtgggagccctggcatacaccgcgacggtggttctggtgagaacctgtactttcaaagctcagataatgggcctcaaaaccagcgcaacgctccacgtataaccttcggtggcccgtctgactccacaggcagcaaccagaatggtgagcgtagtggagccaggtctaagcagcgccgtccccagggtctgccgaacaacacggcgagctggtttactgcgcttacccaacacggtaaagaagacttaaaattcccgcgtggccagggcgtcccgatcaacactaactcttccccggatgatcagattggttattaccgcagagcaactcgtcggattcgcggcggcgacggtaaaatgaaagatttgtctccgcgttggtacttttactatctcggcaccggtccggaagctggactgccctacggggcaaacaaggacgggatcatttgggtggctaccgaaggtgccctgaatactccaaaagatcatatcggcacccgtaaccctgctaataacgctgcgatcgttctgcaactgcctcagggtacaactctgccaaaaggcttctatgcagaagggtcgcgtggtggcagccaggcgagtagccgtagcagctcccgctctcgcaactcgtcccgtaactccactccgggctcttctcgcggcacgtccccggctcgtatggcaggtaacggtggtgacgctgctctggcgctgctactgctggacaggctgaaccagctggagtcgaagatgagtggtaaaggccaacagcagcagggccagaccgttaccaaaaagagcgcagctgaaatgtctaaaaaaccgcgacagaaacgtaccgcgactaaaggatacaatgtaacacagtgtttcggtccccgaggtccggagcaaactcaaggaaactttggcgatgccgaattaatcaagaaagggaccgactacaaacactggccgcaaattgcccagttcgccccatccgctagtgcattcttcggtatgagccgcatctcgtcaaaagaaacgccaagtggtacgtggctgacctacaccggtgctatcaagcttgataaagatgacccgaactttaaagaccaggttattctgcttaacaaacatattgatgcctataaaactttcccgccgaccgaacccaaaaaggacaaaaagaaaaaagctgatgaaacccaggctctaccgcagcgtcagaaaaaacagcaaactgtgactctgctgccagctgcggacctggatgatttttccaagcagctgcaacagtctatgagctctgcggactctacgcaggcttaa

SEQ ID NO: 176 - DNA, 2016 bp, Artificial Sequence
  Description of Artificial Sequence: Synthetic polynucleotide
atgcaccatcatcaccatcatggtggttctggttcgccgatacttggttattggaagattaaaggactggttcagcccacacgcctcctgctagaatacttagaggaaaaatatgaagagcacctgtacgaacgtgatgagggggacaaatggcgaaacaagaaatttgaattgggcttagaatttccaaatttgccgtattatatcgatggcgacgtaaaactgacccaatcaatggccattattcgctacatcgcagataaacataacatgctgggtggctgccctaaagaacgggctgagatctccatgctggaaggtgcggtgctcgacattcgctacggcgtcagtagaattgcgtatagcaaggatttcgaaactttaaaagtggatttcctgagcaaacttccggagatgctgaaaatgtttgaggataggctttgtcataagacgtatctcaatggtgatcatgttacccacccggactttatgctgtacgacgcccttgatgtcgttctgtatatggatcccatgtgcctggacgccttcccgaaattagtgtgttttaaaaaacgtatcgaagcgattccacagatcgataaatacttgaagtcttctaaatatattgcttggcctctgcaaggctggcaggcaacgttcggtgggggagatcatccgccaaaatcagatctggtgccgcgtgggagccctggcatacaccgcgacggtggttctggtgagaacctgtactttcaaagctcagataatgggcctcaaaaccagcgcaacgctccacgtataaccttcggtggcccgtctgactccacaggcagcaaccagaatggtgagcgtagtggagccaggtctaagcagcgccgtccccagggtctgccgaacaacacggcgagctggtttactgcgcttacccaacacggtaaagaagacttaaaattcccgcgtggccagggcgtcccgatcaacactaactcttccccggatgatcagattggttattaccgcagagcaactcgtcggattcgcggcggcgacggtaaaatgaaagatttgtctccgcgttggtacttttactatctcggcaccggtccggaagctggactgccctacggggcaaacaaggacgggatcatttgggtggctaccgaaggtgccctgaatactccaaaagatcatatcggcacccgtaaccctgctaataacgctgcgagcgttctgcaactgcctcagggtacaactctgccaaaaggcttctatgcagaagggtcgcgtggtggcagccaggcgagtagccgtagcagctcccgctctcgcaactcgtcccgtaactccactccgggctcttctcgcggcacgtccccggctcgtatggcaggtaacggtggtgacgctgctctggcgctgctactgctggacaggctgaaccagctggagtcgaagatgagtggtaaaggccaacagcagcagggccagaccgttaccaaaaagagcgcagctgaagcatctaaaaaaccgcgacagaaacgtaccgcgactaaagcgtacaatgtaacacaggccttcggtcgtcgaggtccggagcaaactcaaggaaactttggcgatcaggaattaatccgccaggggaccgactacaaacactggccgcaaattgcccagttcgccccatccgctagtgcattcttcggtatgagccgcatcggcatggaagtaacgccaagtggtacgtggctgacctacaccggtgctatcaagcttgatgacaaggacccgaactttaaagaccaggttattctgcttaacaaacatattgatgcctataaaactttcccgccgaccgaacccaaaaaggacaaaaagaaaaaagctgatgaaacccaggctctaccgcagcgtcagaaaaaacagcaaactgtgactctgctgccagctgcggacctggatgatttttccaagcagctgcaacagtctatgagctctgcggactctacgcaggcttaa

SEQ ID NO: 177 - DNA, 2016 bp, Artificial Sequence
  Description of Artificial Sequence: Synthetic polynucleotide
atgcaccatcatcaccatcatggtggttctggttcgccgatacttggttattggaagattaaaggactggttcagcccacacgcctcctgctagaatacttagaggaaaaatatgaagagcacctgtacgaacgtgatgagggggacaaatggcgaaacaagaaatttgaattgggcttagaatttccaaatttgccgtattatatcgatggcgacgtaaaactgacccaatcaatggccattattcgctacatcgcagataaacataacatgctgggtggctgccctaaagaacgggctgagatctccatgctggaaggtgcggtgctcgacattcgctacggcgtcagtagaattgcgtatagcaaggatttcgaaactttaaaagtggatttcctgagcaaacttccggagatgctgaaaatgtttgaggataggctttgtcataagacgtatctcaatggtgatcatgttacccacccggactttatgctgtacgacgcccttgatgtcgttctgtatatggatcccatgtgcctggacgccttcccgaaattagtgtgttttaaaaaacgtatcgaagcgattccacagatcgataaatacttgaagtcttctaaatatattgcttggcctctgcaaggctggcaggcaacgttcggtgggggagatcatccgccaaaatcagatctggtgccgcgtgggagccctggcatacaccgcgacggtggttctggtgagaacctgtactttcaaagctcagataatgggcctcaaaaccagcgcaacgctccacgtataaccttcggtggcccgtctgactccacaggcagcaaccagaatggtgagcgtagtggagccaggtctaagcagcgccgtccccagggtctgccgaacaacacggcgagctggtttactgcgcttacccaacacggtaaagaagacttaaaattcccgcgtggccagggcgtcccgatcaacactaactcttccccggatgatcagattggttattaccgcagagcaactcgtcggattcgcggcggcgacggtaaaatgaaagatttgtctccgcgttggtacttttactatctcggcaccggtccggaagctggactgccctacggggcaaacaaggacgggatcatttgggtggctaccgaaggtgccctgaatactccaaaagatcatatcggcacccgtaaccctgctaataacccagcgatcgttctgcaactgcctcagggtacaactctgccaaaaggcttctatgcagaagggtcgcgtggtggcagccaggcgagtagccgtagcagctcccgctctcgcaactcgtcccgtaactccactccgggctcttctcgcggcacgtccccggctcgtatggcaggtaacggtggtgacgctgctctggcgctgctactgctggacaggctgaaccagctggagtcgaagatgagtggtaaaggccaacagcagcagggccagaccgttaccaaaaagagcgcagctgaagcatctaaaaaaccgcgacagaaacgtaccgcgactaaagcgtacaatgtaacacaggccttcggtcgtcgaggtccggagcaaactcaaggaaactttggcgatcaggaattaatccgccaggggaccgactacaaacactggccgcaaattgcccagttcgccccatccgctagtgcattcttcggtatgagccgcatcggcatggaagtaacgccaagtggtacgtggctgacctacaccggtgctatcaagcttgatgacaaggacccgaactttaaagaccaggttattctgcttaacaaacatattgatgcctataaaactttcccgccgaccgaacccaaaaaggacaaaaagaaaaaagctgatgaaacccaggctctaccgcagcgtcagaaaaaacagcaaactgtgactctgctgccagctgcggacctggatgatttttccaagcagctgcaacagtctatgagctctgcggactctacgcaggcttaa

SEQ ID NO: 178 - DNA, 2016 bp, Artificial Sequence
  Description of Artificial Sequence: Synthetic polynucleotide
atgcaccatcatcaccatcatggtggttctggttcgccgatacttggttattggaagattaaaggactggttcagcccacacgcctcctgctagaatacttagaggaaaaatatgaagagcacctgtacgaacgtgatgagggggacaaatggcgaaacaagaaatttgaattgggcttagaatttccaaatttgccgtattatatcgatggcgacgtaaaactgacccaatcaatggccattattcgctacatcgcagataaacataacatgctgggtggctgccctaaagaacgggctgagatctccatgctggaaggtgcggtgctcgacattcgctacggcgtcagtagaattgcgtatagcaaggatttcgaaactttaaaagtggatttcctgagcaaacttccggagatgctgaaaatgtttgaggataggctttgtcataagacgtatctcaatggtgatcatgttacccacccggactttatgctgtacgacgcccttgatgtcgttctgtatatggatcccatgtgcctggacgccttcccgaaattagtgtgttttaaaaaacgtatcgaagcgattccacagatcgataaatacttgaagtcttctaaatatattgcttggcctctgcaaggctggcaggcaacgttcggtgggggagatcatccgccaaaatcagatctggtgccgcgtgggagccctggcatacaccgcgacggtggttctggtgagaacctgtactttcaaagctcagataatgggcctcaaaaccagcgcaacgctccacgtataaccttcggtggcccgtctgactccacaggcagcaaccagaatggtgagcgtagtggagccaggtctaagcagcgccgtccccagggtctgccgaacaacacggcgagctggtttactgcgcttacccaacacggtaaagaagacttaaaattcccgcgtggccagggcgtcccgatcaacactaactcttccccggatgatcagattggttattaccgcagagcaactcgtcggattcgcggcggcgacggtaaaatgaaagatttgtctccgcgttggtacttttactatctcggcaccggtccggaagctggactgccctacggggcaaacaaggacgggatcatttgggtggctaccgaaggtgccctgaatactccaaaagatcatatcggcacccgtaaccctgctaataacgctgcgaaagttctgcaactgcctcagggtacaactctgccaaaaggcttctatgcagaagggtcgcgtggtggcagccaggcgagtagccgtagcagctcccgctctcgcaactcgtcccgtaactccactccgggctcttctcgcggcacgtccccggctcgtatggcaggtaacggtggtgacgctgctctggcgctgctactgctggacaggctgaaccagctggagtcgaagatgagtggtaaaggccaacagcagcagggccagaccgttaccaaaaagagcgcagctgaagcatctaaaaaaccgcgacagaaacgtaccgcgactaaagcgtacaatgtaacacaggccttcggtcgtcgaggtccggagcaaactcaaggaaactttggcgatcaggaattaatccgccaggggaccgactacaaacactggccgcaaattgcccagttcgccccatccgctagtgcattcttcggtatgagccgcatcggcatggaagtaacgccaagtggtacgtggctgacctacaccggtgctatcaagcttgatgacaaggacccgaactttaaagaccaggttattctgcttaacaaacatattgatgcctataaaactttcccgccgaccgaacccaaaaaggacaaaaagaaaaaagctgatgaaacccaggctctaccgcagcgtcagaaaaaacagcaaactgtgactctgctgccagctgcggacctggatgatttttccaagcagctgcaacagtctatgagctctgcggactctacgcaggcttaa

SEQ ID NO: 179 - DNA, 2016 bp, Artificial Sequence
  Description of Artificial Sequence: Synthetic polynucleotide
atgcaccatcatcaccatcatggtggttctggttcgccgatacttggttattggaagattaaaggactggttcagcccacacgcctcctgctagaatacttagaggaaaaatatgaagagcacctgtacgaacgtgatgagggggacaaatggcgaaacaagaaatttgaattgggcttagaatttccaaatttgccgtattatatcgatggcgacgtaaaactgacccaatcaatggccattattcgctacatcgcagataaacataacatgctgggtggctgccctaaagaacgggctgagatctccatgctggaaggtgcggtgctcgacattcgctacggcgtcagtagaattgcgtatagcaaggatttcgaaactttaaaagtggatttcctgagcaaacttccggagatgctgaaaatgtttgaggataggctttgtcataagacgtatctcaatggtgatcatgttacccacccggactttatgctgtacgacgcccttgatgtcgttctgtatatggatcccatgtgcctggacgccttcccgaaattagtgtgttttaaaaaacgtatcgaagcgattccacagatcgataaatacttgaagtcttctaaatatattgcttggcctctgcaaggctggcaggcaacgttcggtgggggagatcatccgccaaaatcagatctggtgccgcgtgggagccctggcatacaccgcgacggtggttctggtgagaacctgtactttcaaagctcagataatgggcctcaaaaccagcgcaacgctccacgtataaccttcggtggcccgtctgactccacaggcagcaaccagaatggtgagcgtagtggagccaggtctaagcagcgccgtccccagggtctgccgaacaacacggcgagctggtttactgcgcttacccaacacggtaaagaagacttaaaattcccgcgtggccagggcgtcccgatcaacactaactcttccccggatgatcagattggttattaccgcagagcaactcgtcggattcgcggcggcgacggtaaaaggaaagatttgtctccgcgttggtacttttactatctcggcaccggtccggaagctggactgccctacggggcaaacaaggacgggatcatttgggtggctaccgaaggtgccctgaatactccaaaagatcatatcggcacccgtaaccctgctaataacgctgcgatcgttctgcaactgcctcagggtacaactctgccaaaaggcttctatgcagaagggtcgcgtggtggcagccaggcgagtagccgtagcagctcccgctctcgcaactcgtcccgtaactccactccgggctcttctcgcggcacgtccccggctcgtatggcaggtaacggtggtgacgctgctctggcgctgctactgctggacaggctgaaccagctggagtcgaagatgagtggtaaaggccaacagcagcagggccagaccgttaccaaaaagagcgcagctgaagcatctaaaaaaccgcgacagaaacgtaccgcgactaaagcgtacaatgtaacacaggccttcggtcgtcgaggtccggagcaaactcaaggaaactttggcgatcaggaattaatccgccaggggaccgactacaaacactggccgcaaattgcccagttcgccccatccgctagtgcattcttcggtatgagccgcatcggcatggaagtaacgccaagtggtacgtggctgacctacaccggtgctatcaagcttgatgacaaggacccgaactttaaagaccaggttattctgcttaacaaacatattgatgcctataaaactttcccgccgaccgaacccaaaaaggacaaaaagaaaaaagctgatgaaacccaggctctaccgcagcgtcagaaaaaacagcaaactgtgactctgctgccagctgcggacctggatgatttttccaagcagctgcaacagtctatgagctctgcggactctacgcaggcttaa

SEQ ID NO: 180 - DNA, 2016 bp, Artificial Sequence
  Description of Artificial Sequence: Synthetic polynucleotide
atgcaccatcatcaccatcatggtggttctggttcgccgatacttggttattggaagattaaaggactggttcagcccacacgcctcctgctagaatacttagaggaaaaatatgaagagcacctgtacgaacgtgatgagggggacaaatggcgaaacaagaaatttgaattgggcttagaatttccaaatttgccgtattatatcgatggcgacgtaaaactgacccaatcaatggccattattcgctacatcgcagataaacataacatgctgggtggctgccctaaagaacgggctgagatctccatgctggaaggtgcggtgctcgacattcgctacggcgtcagtagaattgcgtatagcaaggatttcgaaactttaaaagtggatttcctgagcaaacttccggagatgctgaaaatgtttgaggataggctttgtcataagacgtatctcaatggtgatcatgttacccacccggactttatgctgtacgacgcccttgatgtcgttctgtatatggatcccatgtgcctggacgccttcccgaaattagtgtgttttaaaaaacgtatcgaagcgattccacagatcgataaatacttgaagtcttctaaatatattgcttggcctctgcaaggctggcaggcaacgttcggtgggggagatcatccgccaaaatcagatctggtgccgcgtgggagccctggcatacaccgcgacggtggttctggtgagaacctgtactttcaaagctcagataatgggcctcaaaaccagcgcaacgctccacgtataaccttcggtggcccgtctgactccacaggcagcaaccagaatggtgagcgtagtggagccaggtctaagcagcgccgtccccagggtctgccgaacaacacggcgagctggtttactgcgcttacccaacacggtaaagaagacttaaaattcccgcgtggccagggcgtcccgatcaacactaactcttccccggatgatcagattggttattaccgcagagcaactcgtcggattcgcggcggcgacggtaaaatgaaagatttgtctccgcgttggtacttttactatctcggcaccggtccggaagctggactgccctacggggcaaacaaggacgggatcatttgggtggctaccgaaggtgccctgaatactccaaaagatcatatcggcacccgtaaccctgctaataacgctgcgatcgttctgcaactgcctcagggtacaactctgccaaaaggcttctatgcagaagggtcgcgtggtggcagccaggcgagtagccgtagcagctcccgctctcgcaactcgtcccgtaactccactccgggctcttctcgcggcacgtccccggctcgtatggcaggtaacggtggtgacgctgctctggcgctgctactgctggacaggctgaaccagctggagtcgaagatgagtggtaaaggccaacagcagcagggccagaccgttaccaaaaagagcgcagctgaagcatctaaaaaaccgcgacagaaacgtaccgcgactaaagcgtacaatgtaacacaggccttcggtcgtcgaggtccggagcaaactcaaggaaactttggcgatcaggaattaatccgccaggggaccgactacaaacactggccgcaaattgcccagttcgccccatccgctagtgcattcttcggtatgagccgcatcggcatggaagtaacgccaagtggtacgtggctgacctacaccggtgctatcaagcttgatgacaagaatccgaactttaaagaccaggttattctgcttaacaaacatattgatgcctataaaactttcccgccgaccgaacccaaaaaggacaaaaagaaaaaagctgatgaaacccaggctctaccgcagcgtcagaaaaaacagcaaactgtgactctgctgccagctgcggacctggatgatttttccaagcagctgcaacagtctatgagctctgcggactctacgcaggcttaa

SEQ ID NO: 181 - DNA, 2016 bp, Artificial Sequence
  Description of Artificial Sequence: Synthetic polynucleotide
atgcaccatcatcaccatcatggtggttctggttcgccgatacttggttattggaagattaaaggactggttcagcccacacgcctcctgctagaatacttagaggaaaaatatgaagagcacctgtacgaacgtgatgagggggacaaatggcgaaacaagaaatttgaattgggcttagaatttccaaatttgccgtattatatcgatggcgacgtaaaactgacccaatcaatggccattattcgctacatcgcagataaacataacatgctgggtggctgccctaaagaacgggctgagatctccatgctggaaggtgcggtgctcgacattcgctacggcgtcagtagaattgcgtatagcaaggatttcgaaactttaaaagtggatttcctgagcaaacttccggagatgctgaaaatgtttgaggataggctttgtcataagacgtatctcaatggtgatcatgttacccacccggactttatgctgtacgacgcccttgatgtcgttctgtatatggatcccatgtgcctggacgccttcccgaaattagtgtgttttaaaaaacgtatcgaagcgattccacagatcgataaatacttgaagtcttctaaatatattgcttggcctctgcaaggctggcaggcaacgttcggtgggggagatcatccgccaaaatcagatctggtgccgcgtgggagccctggcatacaccgcgacggtggttctggtgagaacctgtactttcaaagctcagataatgggcctcaaaaccagcgcaacgctccacgtataaccttcggtggcccgtctgactccacaggcagcaaccagaatggtgagcgtagtggagccaggtctaagcagcgccgtccccagggtctgccgaacaacacggcgagctggtttactgcgcttacccaacacggtaaagaagacttaaaattcccgcgtggccagggcgtcccgatcaacactaactcttccccggatgatcagattggttattaccgcagagcaactcgtcggattcgcggcggcgacggtaaaatgaaagatttgtctccgcgttggtacttttactatctcggcaccggtccggaagctgaactgccctacggggcaaacaaggacgggatcatttgggtggctaccgaaggtgccctgaatactccaaaagatcatatcggcacccgtaaccctgctaataacgctgcgatcgttctgcaactgcctcagggtacaactctgccaaaaggcttctatgcagaagggtcgcgtggtggcagccaggcgagtagccgtagcagctcccgctctcgcaactcgtcccgtaactccactccgggctcttctcgcggcacgtccccggctcgtatggcaggtaacggtggtgacgctgctctggcgctgctactgctggacaggctgaaccagctggagtcgaagatgagtggtaaaggccaacagcagcagggccagaccgttaccaaaaagagcgcagctgaagcatctaaaaaaccgcgacagaaacgtaccgcgactaaagcgtacaatgtaacacaggccttcggtcgtcgaggtccggagcaaactcaaggaaactttggcgatcaggaattaatccgccaggggaccgactacaaacactggccgcaaattgcccagttcgccccatccgctagtgcattcttcggtatgagccgcatcggcatggaagtaacgccaagtggtacgtggctgacctacaccggtgctatcaagcttgatgacaaggacccgaactttaaagaccaggttattctgcttaacaaacatattgatgcctataaaactttcccgccgaccgaacccaaaaaggacaaaaagaaaaaagctgatgaaacccaggctctaccgcagcgtcagaaaaaacagcaaactgtgactctgctgccagctgcggacctggatgatttttccaagcagctgcaacagtctatgagctctgcggactctacgcaggcttaa

SEQ ID NO: 182 - DNA, 2016 bp, Artificial Sequence
  Description of Artificial Sequence: Synthetic polynucleotide
atgcaccatcatcaccatcatggtggttctggttcgccgatacttggttattggaagattaaaggactggttcagcccacacgcctcctgctagaatacttagaggaaaaatatgaagagcacctgtacgaacgtgatgagggggacaaatggcgaaacaagaaatttgaattgggcttagaatttccaaatttgccgtattatatcgatggcgacgtaaaactgacccaatcaatggccattattcgctacatcgcagataaacataacatgctgggtggctgccctaaagaacgggctgagatctccatgctggaaggtgcggtgctcgacattcgctacggcgtcagtagaattgcgtatagcaaggatttcgaaactttaaaagtggatttcctgagcaaacttccggagatgctgaaaatgtttgaggataggctttgtcataagacgtatctcaatggtgatcatgttacccacccggactttatgctgtacgacgcccttgatgtcgttctgtatatggatcccatgtgcctggacgccttcccgaaattagtgtgttttaaaaaacgtatcgaagcgattccacagatcgataaatacttgaagtcttctaaatatattgcttggcctctgcaaggctggcaggcaacgttcggtgggggagatcatccgccaaaatcagatctggtgccgcgtgggagccctggcatacaccgcgacggtggttctggtgagaacctgtactttcaaagctcagataatgggcctcaaaaccagcgcaacgctccacgtataaccttcggtggcccgtctgactccacaggcagcaaccagaatggtgagcgtagtggagccaggtctaagcagcgccgtccccagggtctgccgaacaacacggcgagctggtttactgcgcttacccaacacggtaaagaagacttaaaattcccgcgtggccagggcgtcccgatcaacactaactcttccccggatgatcagattggttattaccgcagagcacaacgtcggattcgcggcggcgacggtaaaatgaaagatttgtctccgcgttggtacttttactatctcggcaccggtccggaagctggactgccctacggggcaaacaaggacgggatcatttgggtggctaccgaaggtgccctgaatactccaaaagatcatatcggcacccgtaaccctgctaataacgctgcgatcgttctgcaactgcctcagggtacaactctgccaaaaggcttctatgcagaagggtcgcgtggtggcagccaggcgagtagccgtagcagctcccgctctcgcaactcgtcccgtaactccactccgggctcttctcgcggcacgtccccggctcgtatggcaggtaacggtggtgacgctgctctggcgctgctactgctggacaggctgaaccagctggagtcgaagatgagtggtaaaggccaacagcagcagggccagaccgttaccaaaaagagcgcagctgaagcatctaaaaaaccgcgacagaaacgtaccgcgactaaagcgtacaatgtaacacaggccttcggtcgtcgaggtccggagcaaactcaaggaaactttggcgatcaggaattaatccgccaggggaccgactacaaacactggccgcaaattgcccagttcgccccatccgctagtgcattcttcggtatgagccgcatcggcatggaagtaacgccaagtggtacgtggctgacctacaccggtgctatcaagcttgatgacaaggacccgaactttaaagaccaggttattctgcttaacaaacatattgatgcctataaaactttcccgccgaccgaacccaaaaaggacaaaaagaaaaaagctgatgaaacccaggctctaccgcagcgtcagaaaaaacagcaaactgtgactctgctgccagctgcggacctggatgatttttccaagcagctgcaacagtctatgagctctgcggactctacgcaggcttaa

SEQ ID NO: 183 - DNA, 2016 bp, Artificial Sequence
  Description of Artificial Sequence: Synthetic polynucleotide
atgcaccatcatcaccatcatggtggttctggttcgccgatacttggttattggaagattaaaggactggttcagcccacacgcctcctgctagaatacttagaggaaaaatatgaagagcacctgtacgaacgtgatgagggggacaaatggcgaaacaagaaatttgaattgggcttagaatttccaaatttgccgtattatatcgatggcgacgtaaaactgacccaatcaatggccattattcgctacatcgcagataaacataacatgctgggtggctgccctaaagaacgggctgagatctccatgctggaaggtgcggtgctcgacattcgctacggcgtcagtagaattgcgtatagcaaggatttcgaaactttaaaagtggatttcctgagcaaacttccggagatgctgaaaatgtttgaggataggctttgtcataagacgtatctcaatggtgatcatgttacccacccggactttatgctgtacgacgcccttgatgtcgttctgtatatggatcccatgtgcctggacgccttcccgaaattagtgtgttttaaaaaacgtatcgaagcgattccacagatcgataaatacttgaagtcttctaaatatattgcttggcctctgcaaggctggcaggcaacgttcggtgggggagatcatccgccaaaatcagatctggtgccgcgtgggagccctggcatacaccgcgacggtggttctggtgagaacctgtactttcaaagctcagataatgggcctcaaaaccagcgcaacgctccacgtataaccttcggtggcccgtctgactccacaggcagcaaccagaatggtgagcgtagtggagccaggtctaagcagcgccgtccccagggtctgccgaacaacacggcgagctggtttactgcgcttacccaacacggtaaagaagacttaaaattcccgcgtggccagggcgtcccgatcaacactaactcttccccggatgatcagattggttattaccgcagagcaactcgtcggattcgcggcggcgacggtaaaatgaaagatttgtctccgcgttggtacttttactatctcggcaccggtccggaagctggactgccctacggggcaaacaaggacgggatcatttgggtggctaccgaaggtgccctgaatactccaaaagatcatatcggcacccgtaaccctgctaataacgctgcgatcgttctgcaactgcctcagggtacaactctgccaaaaggcttctatgcagaagggtcgcgtggtggcagccaggcgagtagccgtagcagctcccgctctcgcaactcgtcccgtaactccactccgggctcttctcgcggcacgtccccggctcgtatggcaggtaacggtggtgacgctgctctggcgctgctactgctggacaggctgaaccagctggagtcgaagatgagtggtaaaggccaacagcagcagggccagaccgttaccaaaaagagcgcagctgaagcatctaaaaaaccgcgacagaaacgtaccgcgactaaagcgtacaatgtaacacaggccttcggtcgtcgaggtccggagcaaactcaaggaaactttggcgatcaggaattaatccgccaggggaccgactacaaacactggccgcaaattgcccagttcgccccatccgctagtgcattcttcggtatgagccgcatcggcatggaagtaacgccaagtggtacgtggctgacctacaccggtgctatcaagcttgatgacaaggacccgaactttcgcgaccaggttattctgcttaacaaacatattgatgcctataaaactttcccgccgaccgaacccaaaaaggacaaaaagaaaaaagctgatgaaacccaggctctaccgcagcgtcagaaaaaacagcaaactgtgactctgctgccagctgcggacctggatgatttttccaagcagctgcaacagtctatgagctctgcggactctacgcaggcttaa

SEQ ID NO: 184 - DNA, 2016 bp, Artificial Sequence
  Description of Artificial Sequence: Synthetic polynucleotide
atgcaccatcatcaccatcatggtggttctggttcgccgatacttggttattggaagattaaaggactggttcagcccacacgcctcctgctagaatacttagaggaaaaatatgaagagcacctgtacgaacgtgatgagggggacaaatggcgaaacaagaaatttgaattgggcttagaatttccaaatttgccgtattatatcgatggcgacgtaaaactgacccaatcaatggccattattcgctacatcgcagataaacataacatgctgggtggctgccctaaagaacgggctgagatctccatgctggaaggtgcggtgctcgacattcgctacggcgtcagtagaattgcgtatagcaaggatttcgaaactttaaaagtggatttcctgagcaaacttccggagatgctgaaaatgtttgaggataggctttgtcataagacgtatctcaatggtgatcatgttacccacccggactttatgctgtacgacgcccttgatgtcgttctgtatatggatcccatgtgcctggacgccttcccgaaattagtgtgttttaaaaaacgtatcgaagcgattccacagatcgataaatacttgaagtcttctaaatatattgcttggcctctgcaaggctggcaggcaacgttcggtgggggagatcatccgccaaaatcagatctggtgccgcgtgggagccctggcatacaccgcgacggtggttctggtgagaacctgtactttcaaagctcagataatgggcctcaaaaccagcgcaacgctccacgtataaccttcggtggcccgtctgactccacaggcagcaaccagaatggtgagcgtagtggagccaggtctaagcagcgccgtccccagggtctgccgaacaacacggcgagctggtttactgcgcttacccaacacggtaaagaagacttaaaattcccgcgtggccagggcgtcccgatcaacactaactcttccccggatgatcagattggttattaccgcagagcaactcgtcggattcgcggcggcgacggtaaaatgaaagatttgtctccgcgttggtacttttactatctcggcaccggtccggaagctggactgccctacggggcaaacaaggacgggatcatttgggtggctaccgaaggtgccctgaatactccaaaagatcatatcggcacccgtaaccctgctaataaccaagcgatcgttctgcaactgcctcagggtacaactctgccaaaaggcttctatgcagaagggtcgcgtggtggcagccaggcgagtagccgtagcagctcccgctctcgcaactcgtcccgtaactccactccgggctcttctcgcggcacgtccccggctcgtatggcaggtaacggtggtgacgctgctctggcgctgctactgctggacaggctgaaccagctggagtcgaagatgagtggtaaaggccaacagcagcagggccagaccgttaccaaaaagagcgcagctgaagcatctaaaaaaccgcgacagaaacgtaccgcgactaaagcgtacaatgtaacacaggccttcggtcgtcgaggtccggagcaaactcaaggaaactttggcgatcaggaattaatccgccaggggaccgactacaaacactggccgcaaattgcccagttcgccccatccgctagtgcattcttcggtatgagccgcatcggcatggaagtaacgccaagtggtacgtggctgacctacaccggtgctatcaagcttgatgacaaggacccgaactttaaagaccaggttattctgcttaacaaacatattgatgcctataaaactttcccgccgaccgaacccaaaaaggacaaaaagaaaaaagctgatgaaacccaggctctaccgcagcgtcagaaaaaacagcaaactgtgactctgctgccagctgcggacctggatgatttttccaagcagctgcaacagtctatgagctctgcggactctacgcaggcttaa

SEQ ID NO: 185 - DNA, 2016 bp, Artificial Sequence
  Description of Artificial Sequence: Synthetic polynucleotide
atgcaccatcatcaccatcatggtggttctggttcgccgatacttggttattggaagattaaaggactggttcagcccacacgcctcctgctagaatacttagaggaaaaatatgaagagcacctgtacgaacgtgatgagggggacaaatggcgaaacaagaaatttgaattgggcttagaatttccaaatttgccgtattatatcgatggcgacgtaaaactgacccaatcaatggccattattcgctacatcgcagataaacataacatgctgggtggctgccctaaagaacgggctgagatctccatgctggaaggtgcggtgctcgacattcgctacggcgtcagtagaattgcgtatagcaaggatttcgaaactttaaaagtggatttcctgagcaaacttccggagatgctgaaaatgtttgaggataggctttgtcataagacgtatctcaatggtgatcatgttacccacccggactttatgctgtacgacgcccttgatgtcgttctgtatatggatcccatgtgcctggacgccttcccgaaattagtgtgttttaaaaaacgtatcgaagcgattccacagatcgataaatacttgaagtcttctaaatatattgcttggcctctgcaaggctggcaggcaacgttcggtgggggagatcatccgccaaaatcagatctggtgccgcgtgggagccctggcatacaccgcgacggtggttctggtgagaacctgtactttcaaagctcagataatgggcctcaaaaccagcgcaacgctccacgtataaccttcggtggcccgtctgactccacaggcagcaaccagaatggtgagcgtagtggagccaggtctaagcagcgccgtccccagggtctgccgaacaacacggcgagctggtttactgcgcttacccaacacggtaaagaagacttaaaattcccgcgtggccagggcgtcccgatcaacactaactcttccccggatgatcagattggttattaccgcagagcaactcgtcggattcgcggcggcgacggtaaaatgaaagatttgtctccgcgttggtacttttactatctcggcaccggtccggaagctggactgccctacggggcaaacaaggacgggatcatttgggtggctaccgaaggtgccctgaatactccaaaagatcatatcggcacccgtaaccctgctaataacgctgcgatcgttctgcaactgcctcagggtacaactctgccaaaaggcttctatgcagaagggtcgcgtggtggcagccaggcgagtagccgtagcagctcccgctctcgcaactcgtcccgtaactccactccgggctcttctcgcggcacgtccccggctcgtatggcaggtaacggtggtgacgctgctctggcgctgctactgctggacaggctgaaccagctggagtcgaagatgagtggtaaaggccaacagcagcagggccagaccgttaccaaaaagagcgcagctgaagcatctaaaaaaccgcgacagaaacgtaccgcgactaaagcgtacaatgtaacacaggccttcggtttacgaggtccggagcaaactcaaggaaactttggcgatcaggaattaatccgccaggggaccgactacaaacactggccgcaaattgcccagttcgccccatccgctagtgcattcttcggtatgagccgcatcggcatggaagtaacgccaagtggtacgtggctgacctacaccggtgctatcaagcttgatgacaaggacccgaactttaaagaccaggttattctgcttaacaaacatattgatgcctataaaactttcccgccgaccgaacccaaaaaggacaaaaagaaaaaagctgatgaaacccaggctctaccgcagcgtcagaaaaaacagcaaactgtgactctgctgccagctgcggacctggatgatttttccaagcagctgcaacagtctatgagctctgcggactctacgcaggcttaa

SEQ ID NO: 186 - DNA, 2016 bp, Artificial Sequence
  Description of Artificial Sequence: Synthetic polynucleotide
atgcaccatcatcaccatcatggtggttctggttcgccgatacttggttattggaagattaaaggactggttcagcccacacgcctcctgctagaatacttagaggaaaaatatgaagagcacctgtacgaacgtgatgagggggacaaatggcgaaacaagaaatttgaattgggcttagaatttccaaatttgccgtattatatcgatggcgacgtaaaactgacccaatcaatggccattattcgctacatcgcagataaacataacatgctgggtggctgccctaaagaacgggctgagatctccatgctggaaggtgcggtgctcgacattcgctacggcgtcagtagaattgcgtatagcaaggatttcgaaactttaaaagtggatttcctgagcaaacttccggagatgctgaaaatgtttgaggataggctttgtcataagacgtatctcaatggtgatcatgttacccacccggactttatgctgtacgacgcccttgatgtcgttctgtatatggatcccatgtgcctggacgccttcccgaaattagtgtgttttaaaaaacgtatcgaagcgattccacagatcgataaatacttgaagtcttctaaatatattgcttggcctctgcaaggctggcaggcaacgttcggtgggggagatcatccgccaaaatcagatctggtgccgcgtgggagccctggcatacaccgcgacggtggttctggtgagaacctgtactttcaaagctcagataatgggcctcaaaaccagcgcaacgctccacgtataaccttcggtggcccgtctgactccacaggcagcaaccagaatggtgagcgtagtggagccaggtctaagcagcgccgtccccagggtctgccgaacaacacggcgagctggtttactgcgcttacccaacacggtaaagaagacttaaaattcccgcgtggccagggcgtcccgatcaacactaactcttccccggatgatcagattggttattaccgcagagcaactcgtcggattcgcggcggcgacggtaaaatgaaagatttgtctccgcgttggtacttttactatctcggcaccggtccggaagctggactgccctacggggaaaacaaggacgggatcatttgggtggctaccgaaggtgccctgaatactccaaaagatcatatcggcacccgtaaccctgctaataacgctgcgatcgttctgcaactgcctcagggtacaactctgccaaaaggcttctatgcagaagggtcgcgtggtggcagccaggcgagtagccgtagcagctcccgctctcgcaactcgtcccgtaactccactccgggctcttctcgcggcacgtccccggctcgtatggcaggtaacggtggtgacgctgctctggcgctgctactgctggacaggctgaaccagctggagtcgaagatgagtggtaaaggccaacagcagcagggccagaccgttaccaaaaagagcgcagctgaagcatctaaaaaaccgcgacagaaacgtaccgcgactaaagcgtacaatgtaacacaggccttcggtcgtcgaggtccggagcaaactcaaggaaactttggcgatcaggaattaatccgccaggggaccgactacaaacactggccgcaaattgcccagttcgccccatccgctagtgcattcttcggtatgagccgcatcggcatggaagtaacgccaagtggtacgtggctgacctacaccggtgctatcaagcttgatgacaaggacccgaactttaaagaccaggttattctgcttaacaaacatattgatgcctataaaactttcccgccgaccgaacccaaaaaggacaaaaagaaaaaagctgatgaaacccaggctctaccgcagcgtcagaaaaaacagcaaactgtgactctgctgccagctgcggacctggatgatttttccaagcagctgcaacagtctatgagctctgcggactctacgcaggcttaa

SEQ ID NO: 187 - DNA, 2016 bp, Artificial Sequence
  Description of Artificial Sequence: Synthetic polynucleotide
atgcaccatcatcaccatcatggtggttctggttcgccgatacttggttattggaagattaaaggactggttcagcccacacgcctcctgctagaatacttagaggaaaaatatgaagagcacctgtacgaacgtgatgagggggacaaatggcgaaacaagaaatttgaattgggcttagaatttccaaatttgccgtattatatcgatggcgacgtaaaactgacccaatcaatggccattattcgctacatcgcagataaacataacatgctgggtggctgccctaaagaacgggctgagatctccatgctggaaggtgcggtgctcgacattcgctacggcgtcagtagaattgcgtatagcaaggatttcgaaactttaaaagtggatttcctgagcaaacttccggagatgctgaaaatgtttgaggataggctttgtcataagacgtatctcaatggtgatcatgttacccacccggactttatgctgtacgacgcccttgatgtcgttctgtatatggatcccatgtgcctggacgccttcccgaaattagtgtgttttaaaaaacgtatcgaagcgattccacagatcgataaatacttgaagtcttctaaatatattgcttggcctctgcaaggctggcaggcaacgttcggtgggggagatcatccgccaaaatcagatctggtgccgcgtgggagccctggcatacaccgcgacggtggttctggtgagaacctgtactttcaaagctcagataatgggcctcaaaaccagcgcaacgctccacgtataaccttcggtggcccgtctgactccacaggcagcaaccagaatggtgagcgtagtggagccaggtctaagcagcgccgtccccagggtctgccgaacaacacggcgagctggtttactgcgcttacccaacacggtaaagaagacttaaaattcccgcgtggccagggcgtcccgatcaacactaactcttccccggatgatcagattggttattaccgcagagcaactcgtcgggtgcgcggcggcgacggtaaaatgaaagatttgtctccgcgttggtacttttactatctcggcaccggtccggaagctggactgccctacggggcaaacaaggacgggatcatttgggtggctaccgaaggtgccctgaatactccaaaagatcatatcggcacccgtaaccctgctaataacgctgcgatcgttctgcaactgcctcagggtacaactctgccaaaaggcttctatgcagaagggtcgcgtggtggcagccaggcgagtagccgtagcagctcccgctctcgcaactcgtcccgtaactccactccgggctcttctcgcggcacgtccccggctcgtatggcaggtaacggtggtgacgctgctctggcgctgctactgctggacaggctgaaccagctggagtcgaagatgagtggtaaaggccaacagcagcagggccagaccgttaccaaaaagagcgcagctgaagcatctaaaaaaccgcgacagaaacgtaccgcgactaaagcgtacaatgtaacacaggccttcggtcgtcgaggtccggagcaaactcaaggaaactttggcgatcaggaattaatccgccaggggaccgactacaaacactggccgcaaattgcccagttcgccccatccgctagtgcattcttcggtatgagccgcatcggcatggaagtaacgccaagtggtacgtggctgacctacaccggtgctatcaagcttgatgacaaggacccgaactttaaagaccaggttattctgcttaacaaacatattgatgcctataaaactttcccgccgaccgaacccaaaaaggacaaaaagaaaaaagctgatgaaacccaggctctaccgcagcgtcagaaaaaacagcaaactgtgactctgctgccagctgcggacctggatgatttttccaagcagctgcaacagtctatgagctctgcggactctacgcaggcttaa

SEQ ID NO: 188 - DNA, 2016 bp, Artificial Sequence
  Description of Artificial Sequence: Synthetic polynucleotide
atgcaccatcatcaccatcatggtggttctggttcgccgatacttggttattggaagattaaaggactggttcagcccacacgcctcctgctagaatacttagaggaaaaatatgaagagcacctgtacgaacgtgatgagggggacaaatggcgaaacaagaaatttgaattgggcttagaatttccaaatttgccgtattatatcgatggcgacgtaaaactgacccaatcaatggccattattcgctacatcgcagataaacataacatgctgggtggctgccctaaagaacgggctgagatctccatgctggaaggtgcggtgctcgacattcgctacggcgtcagtagaattgcgtatagcaaggatttcgaaactttaaaagtggatttcctgagcaaacttccggagatgctgaaaatgtttgaggataggctttgtcataagacgtatctcaatggtgatcatgttacccacccggactttatgctgtacgacgcccttgatgtcgttctgtatatggatcccatgtgcctggacgccttcccgaaattagtgtgttttaaaaaacgtatcgaagcgattccacagatcgataaatacttgaagtcttctaaatatattgcttggcctctgcaaggctggcaggcaacgttcggtgggggagatcatccgccaaaatcagatctggtgccgcgtgggagccctggcatacaccgcgacggtggttctggtgagaacctgtactttcaaagctcagataatgggcctcaaaaccagcgcaacgctccacgtataaccttcggtggcccgtctgactccacaggcagcaaccagaatggtgagcgtagtggagccaggtctaagcagcgccgtccccagggtctgccgaacaacacggcgagctggtttactgcgcttacccaacacggtaaagaagacttaaaattcccgcgtggccagggcgtcccgatcaacactaactcttccccggatgatcagattggttattaccgcagagcaactcgtcggattcgcggcggcgacggtaaaatgaaagatttgtctccgcgttggtacttttactatctcggcaccggtccggaagctggactgccctacggggcaaacaaggacgggatcatttgggtggctaccgaaggtgccaaaaatactccaaaagatcatatcggcacccgtaaccctgctaataacgctgcgatcgttctgcaactgcctcagggtacaactctgccaaaaggcttctatgcagaagggtcgcgtggtggcagccaggcgagtagccgtagcagctcccgctctcgcaactcgtcccgtaactccactccgggctcttctcgcggcacgtccccggctcgtatggcaggtaacggtggtgacgctgctctggcgctgctactgctggacaggctgaaccagctggagtcgaagatgagtggtaaaggccaacagcagcagggccagaccgttaccaaaaagagcgcagctgaagcatctaaaaaaccgcgacagaaacgtaccgcgactaaagcgtacaatgtaacacaggccttcggtcgtcgaggtccggagcaaactcaaggaaactttggcgatcaggaattaatccgccaggggaccgactacaaacactggccgcaaattgcccagttcgccccatccgctagtgcattcttcggtatgagccgcatcggcatggaagtaacgccaagtggtacgtggctgacctacaccggtgctatcaagcttgatgacaaggacccgaactttaaagaccaggttattctgcttaacaaacatattgatgcctataaaactttcccgccgaccgaacccaaaaaggacaaaaagaaaaaagctgatgaaacccaggctctaccgcagcgtcagaaaaaacagcaaactgtgactctgctgccagctgcggacctggatgatttttccaagcagctgcaacagtctatgagctctgcggactctacgcaggcttaa

SEQ ID NO: 189 - DNA, 2016 bp, Artificial Sequence
  Description of Artificial Sequence: Synthetic polynucleotide
atgcaccatcatcaccatcatggtggttctggttcgccgatacttggttattggaagattaaaggactggttcagcccacacgcctcctgctagaatacttagaggaaaaatatgaagagcacctgtacgaacgtgatgagggggacaaatggcgaaacaagaaatttgaattgggcttagaatttccaaatttgccgtattatatcgatggcgacgtaaaactgacccaatcaatggccattattcgctacatcgcagataaacataacatgctgggtggctgccctaaagaacgggctgagatctccatgctggaaggtgcggtgctcgacattcgctacggcgtcagtagaattgcgtatagcaaggatttcgaaactttaaaagtggatttcctgagcaaacttccggagatgctgaaaatgtttgaggataggctttgtcataagacgtatctcaatggtgatcatgttacccacccggactttatgctgtacgacgcccttgatgtcgttctgtatatggatcccatgtgcctggacgccttcccgaaattagtgtgttttaaaaaacgtatcgaagcgattccacagatcgataaatacttgaagtcttctaaatatattgcttggcctctgcaaggctggcaggcaacgttcggtgggggagatcatccgccaaaatcagatctggtgccgcgtgggagccctggcatacaccgcgacggtggttctggtgagaacctgtactttcaaagctcagataatgggcctcaaaaccagcgcaacgctccacgtataaccttcggtggcccgtctgactccacaggcagcaaccagaatggtgagcgtagtggagccaggtctaagcagcgccgtccccagggtctgccgaacaacacggcgagctggtttactgcgcttacccaacacggtaaagaagacttaaaattcccgcgtggccagggcgtcccgatcaacactaactcttccccggatgatcagattggttattaccgcagagcaactcgtcggattcgcggcggcgacggtaaaatgaaagatttgtctccgcgttggtacttttactatctcggcaccggtccggaagctggactgccctacggggcaaacaaggacgggatcatttgggtggctaccgaaggtgccctgaatactccaaaagatcatatcggcacccgtaaccctgctaataacgctgcgatcgttctgcaactgcctcagggtacaactctgccaaaaggcttctatgcagaagggtcgcgtggtggcagccaggcgagtagccgtagcagctcccgctctcgcaactcgtcccgtaactccactccgggctcttctcgcggcacgtccccggctcgtatggcaggtaacggtggtgacgctgctctggcgctgctactgctggacaggctgaaccagctggagtcgaagatgagtggtaaaggccaacagcagcagggccagaccgttaccaaaaagagcgcagctgaagcatctaaaaaaccgcgacagaaacgtaccgcgactaaagattacaatgtaacacaggccttcggtcgtcgaggtccggagcaaactcaaggaaactttggcgatcaggatttaaataaattggggaccgactacaaacactggccgcaaattgcccagttcgccccatccgctagtgcattcttcggtatgagccgcatctcaacgcgcgaaacgccaagtggtacgtggctgacctacaccggtgctatcaagcttgataaaaaggacccgaactttaaagaccaggttattctgcttaacaaacatattgatgcctataaaactttcccgccgaccgaacccaaaaaggacaaaaagaaaaaagctgatgaaacccaggctctaccgcagcgtcagaaaaaacagcaaactgtgactctgctgccagctgcggacctggatgatttttccaagcagctgcaacagtctatgagctctgcggactctacgcaggcttaa

SEQ ID NO: 190 - DNA, 2016 bp, Artificial Sequence
  Description of Artificial Sequence: Synthetic polynucleotide
atgcaccatcatcaccatcatggtggttctggttcgccgatacttggttattggaagattaaaggactggttcagcccacacgcctcctgctagaatacttagaggaaaaatatgaagagcacctgtacgaacgtgatgagggggacaaatggcgaaacaagaaatttgaattgggcttagaatttccaaatttgccgtattatatcgatggcgacgtaaaactgacccaatcaatggccattattcgctacatcgcagataaacataacatgctgggtggctgccctaaagaacgggctgagatctccatgctggaaggtgcggtgctcgacattcgctacggcgtcagtagaattgcgtatagcaaggatttcgaaactttaaaagtggatttcctgagcaaacttccggagatgctgaaaatgtttgaggataggctttgtcataagacgtatctcaatggtgatcatgttacccacccggactttatgctgtacgacgcccttgatgtcgttctgtatatggatcccatgtgcctggacgccttcccgaaattagtgtgttttaaaaaacgtatcgaagcgattccacagatcgataaatacttgaagtcttctaaatatattgcttggcctctgcaaggctggcaggcaacgttcggtgggggagatcatccgccaaaatcagatctggtgccgcgtgggagccctggcatacaccgcgacggtggttctggtgagaacctgtactttcaaagctcagataatgggcctcaaaaccagcgcaacgctccacgtataaccttcggtggcccgtctgactccacaggcagcaaccagaatggtgagcgtagtggagccaggtctaagcagcgccgtccccagggtctgccgaacaacacggcgagctggtttactgcgcttacccaacacggtaaagaagacttaaaattcccgcgtggccagggcgtcccgatcaacactaactcttccccggatgatcagattggtcgataccgcagagcaactcgtcggattcgcggcggcgacggtaaaatgaaagatttgtctccgcgttggtacttttactatctcggcaccggtccggaagctggactgccctacggggcaaacaaggacgggatcatttgggtggctaccgaaggtgccctgaatactccaaaagatcatatcggcacccgtaaccctgctaataacgctgcgatcgttctgcaactgcctcagggtacaactctgccaaaaggcttctatgcagaagggtcgcgtggtggcagccaggcgagtagccgtagcagctcccgctctcgcaactcgtcccgtaactccactccgggctcttctcgcggcacgtccccggctcgtatggcaggtaacggtggtgacgctgctctggcgctgctactgctggacaggctgaaccagctggagtcgaagatgagtggtaaaggccaacagcagcagggccagaccgttaccaaaaagagcgcagctgaagcatctaaaaaaccgcgacagaaacgtaccgcgactaaagcgtacaatgtaacacaggccttcggtcgtcgaggtccggagcaaactcaaggaaactttggcgatcaggaattaatccgccaggggaccgactacaaacactggccgcaaattgcccagttcgccccatccgctagtgcattcttcggtatgagccgcatcggcatggaagtaacgccaagtggtacgtggctgacctacaccggtgctatcaagcttgatgacaaggacccgaactttaaagaccaggttattctgcttaacaaacatattgatgcctataaaactttcccgccgaccgaacccaaaaaggacaaaaagaaaaaagctgatgaaacccaggctctaccgcagcgtcagaaaaaacagcaaactgtgactctgctgccagctgcggacctggatgatttttccaagcagctgcaacagtctatgagctctgcggactctacgcaggcttaa

SEQ ID NO: 191 - DNA, 2016 bp, Artificial Sequence
  Description of Artificial Sequence: Synthetic polynucleotide
atgcaccatcatcaccatcatggtggttctggttcgccgatacttggttattggaagattaaaggactggttcagcccacacgcctcctgctagaatacttagaggaaaaatatgaagagcacctgtacgaacgtgatgagggggacaaatggcgaaacaagaaatttgaattgggcttagaatttccaaatttgccgtattatatcgatggcgacgtaaaactgacccaatcaatggccattattcgctacatcgcagataaacataacatgctgggtggctgccctaaagaacgggctgagatctccatgctggaaggtgcggtgctcgacattcgctacggcgtcagtagaattgcgtatagcaaggatttcgaaactttaaaagtggatttcctgagcaaacttccggagatgctgaaaatgtttgaggataggctttgtcataagacgtatctcaatggtgatcatgttacccacccggactttatgctgtacgacgcccttgatgtcgttctgtatatggatcccatgtgcctggacgccttcccgaaattagtgtgttttaaaaaacgtatcgaagcgattccacagatcgataaatacttgaagtcttctaaatatattgcttggcctctgcaaggctggcaggcaacgttcggtgggggagatcatccgccaaaatcagatctggtgccgcgtgggagccctggcatacaccgcgacggtggttctggtgagaacctgtactttcaaagctcagataatgggcctcaaaaccagcgcaacgctccacgtataaccttcggtggcccgtctgactccacaggcagcaaccagaatggtgagcgtagtggagccaggtctaagcagcgccgtccccagggtctgccgaacaacacggcgagctggtttactccgcttacccaacacggtaaagaagacttaaaattcccgccaggccagggcgtcccgatcaacactaactcttccccggatgatcagattggttattaccgcagagcaactcgtcggattcgcggcggcgacggtaaaatgaaagatttgcctccgcgttggtacttttactatctcggcaccggtccggaagctgatctgccctacgggcaagtgaagcctgggatcttttgggtggctgaagaaggtgccctgaatactccaaaagatcatatcggcacccgtaaccctgctaataacgctgcgatcccactgcaactgcctccgggtacaactctgccaaaaggcttctatgcagaagggtcgcgtggtggcagccaggcgagtagccgtagcagctcccgctctcgcaactcgtcccgtaactccactccgggctcttctcgcggcacgtccccggctcgtatggcaggtaacggtggtgacgctgctctggcgctgctactgctggacaggctgaaccagctggagtcgaagatgagtggtaaaggccaacagcagcagggccagaccgttaccaaaaagagcgcagctgaagcatctaaaaaaccgcgacagaaacgtaccgcgactaaagcgtacaatgtaacacaggccttcggtcgtcgaggtccggagcaaactcaaggaaactttggcgatcaggaattaatccgccaggggaccgactacaaacactggccgcaaattgcccagttcgccccatccgctagtgcattcttcggtatgagccgcatcggcatggaagtaacgccaagtggtacgtggctgacctacaccggtgctatcaagcttgatgacaaggacccgaactttaaagaccaggttattctgcttaacaaacatattgatgcctataaaactttcccgccgaccgaacccaaaaaggacaaaaagaaaaaagctgatgaaacccaggctctaccgcagcgtcagaaaaaacagcaaactgtgactctgctgccagctgcggacctggatgatttttccaagcagctgcaacagtctatgagctctgcggactctacgcaggcttaa

SEQ ID NO: 192 - DNA, 2016 bp, Artificial Sequence
  Description of Artificial Sequence: Synthetic polynucleotide
atgcaccatcatcaccatcatggtggttctggttcgccgatacttggttattggaagattaaaggactggttcagcccacacgcctcctgctagaatacttagaggaaaaatatgaagagcacctgtacgaacgtgatgagggggacaaatggcgaaacaagaaatttgaattgggcttagaatttccaaatttgccgtattatatcgatggcgacgtaaaactgacccaatcaatggccattattcgctacatcgcagataaacataacatgctgggtggctgccctaaagaacgggctgagatctccatgctggaaggtgcggtgctcgacattcgctacggcgtcagtagaattgcgtatagcaaggatttcgaaactttaaaagtggatttcctgagcaaacttccggagatgctgaaaatgtttgaggataggctttgtcataagacgtatctcaatggtgatcatgttacccacccggactttatgctgtacgacgcccttgatgtcgttctgtatatggatcccatgtgcctggacgccttcccgaaattagtgtgttttaaaaaacgtatcgaagcgattccacagatcgataaatacttgaagtcttctaaatatattgcttggcctctgcaaggctggcaggcaacgttcggtgggggagatcatccgccaaaatcagatctggtgccgcgtgggagccctggcatacaccgcgacggtggttctggtgagaacctgtactttcaaagctcagataatgggcctcaaaaccagcgcaacgctccacgtataaccttcggtggcccgtctgactccacaggcagcaaccagaatggtgagcgtagtggagccaggtctaagcagcgccgtccccagggtctgccgaacaacacggcgagctggtttactgcgcttacccaacacggtaaagaagacttaaaattcccgcgtggccagggcgtcccgatcaacactaactcttccccggatgatcagattggttattaccgcagagcaactcgtcggattcgcggcggcgacggtaaaatgaaagatttgtctccgcgttggtacttttactatctcggcaccggtccggaagctggactgccctacggggcaaacaaggacgggatcatttgggtggctaccgaaggtgccctgaatactccaaaagatcatatcggcacccgtaaccctgctaataacgctgcgatcgttctgcaactgcctcagggtacaactctgccaaaaggcttctatgcagaagggtcgcgtggtggcagccaggcgagtagccgtagcagctcccgctctcgcaactcgtcccgtaactccactccgggctcttctcgcggcacgtccccggctcgtatggcaggtaacggtggtgacgctgctctggcgctgctactgctggacaggctgaaccagctggagtcgaagatgagtggtaaaggccaacagcagcagggccagaccgttaccaaaaagagcgcagctgaagcatctaaaaaaccgcgacagaaacgtaccgcgactaaagcgtacaatgtaacacaggccttcggtcgtcgaggtccggagcaaactcaaggaaactttggcgatcaggaattaatccgccaggggaccgactacaaacaatggccgcaaattgcccagttcgccccatccgctagtgcattcttcggtatgagccgcatcggcatggaagtaacgccaagtggtacgtggctgacctacaccggtgctatcaagcttgatgacaaggacccgaactttaaagaccaggttattctgcttaacaaacatattgatgcctataaaactttcccgccgaccgaacccaaaaaggacaaaaagaaaaaagctgatgaaacccaggctctaccgcagcgtcagaaaaaacagcaaactgtgactctgctgccagctgcggacctggatgatttttccaagcagctgcaacagtctatgagctctgcggactctacgcaggcttaa

SEQ ID NO: 193 - DNA, 2016 bp, Artificial Sequence
  Description of Artificial Sequence: Synthetic polynucleotide
atgcaccatcatcaccatcatggtggttctggttcgccgatacttggttattggaagattaaaggactggttcagcccacacgcctcctgctagaatacttagaggaaaaatatgaagagcacctgtacgaacgtgatgagggggacaaatggcgaaacaagaaatttgaattgggcttagaatttccaaatttgccgtattatatcgatggcgacgtaaaactgacccaatcaatggccattattcgctacatcgcagataaacataacatgctgggtggctgccctaaagaacgggctgagatctccatgctggaaggtgcggtgctcgacattcgctacggcgtcagtagaattgcgtatagcaaggatttcgaaactttaaaagtggatttcctgagcaaacttccggagatgctgaaaatgtttgaggataggctttgtcataagacgtatctcaatggtgatcatgttacccacccggactttatgctgtacgacgcccttgatgtcgttctgtatatggatcccatgtgcctggacgccttcccgaaattagtgtgttttaaaaaacgtatcgaagcgattccacagatcgataaatacttgaagtcttctaaatatattgcttggcctctgcaaggctggcaggcaacgttcggtgggggagatcatccgccaaaatcagatctggtgccgcgtgggagccctggcatacaccgcgacggtggttctggtgagaacctgtactttcaaagctcagataatgggcctcaaaaccagcgcaacgctccacgtataaccttcggtggcccgtctgactccacaggcagcaaccagaatggtgagcgtagtggagccaggtctaagcagcgccgtccccagggtctgccgaacaacacggcgagctggtttactgcgcttacccaacacggtaaagaagacttaaaattcccgcgtggccagggcgtcccgatcaacactaactcttccccggatgatcagattggttattaccgcagagcaactcgtcggattcgcggcggcgacggtaaaatgaaagatttgtctccgcgttggtacttttactatctcggcaccggtccggaagctggactgccctacggggcaaacaaggacgggatcatttgggtggctaccgaaggtgccctgaatactccaaaagatcatatcggcacccgtaaccctgctaataacgctgcgcaagttctgcaactgcctcagggtacaactctgccaaaaggcttctatgcagaagggtcgcgtggtggcagccaggcgagtagccgtagcagctcccgctctcgcaactcgtcccgtaactccactccgggctcttctcgcggcacgtccccggctcgtatggcaggtaacggtggtgacgctgctctggcgctgctactgctggacaggctgaaccagctggagtcgaagatgagtggtaaaggccaacagcagcagggccagaccgttaccaaaaagagcgcagctgaagcatctaaaaaaccgcgacagaaacgtaccgcgactaaagcgtacaatgtaacacaggccttcggtcgtcgaggtccggagcaaactcaaggaaactttggcgatcaggaattaatccgccaggggaccgactacaaacactggccgcaaattgcccagttcgccccatccgctagtgcattcttcggtatgagccgcatcggcatggaagtaacgccaagtggtacgtggctgacctacaccggtgctatcaagcttgatgacaaggacccgaactttaaagaccaggttattctgcttaacaaacatattgatgcctataaaactttcccgccgaccgaacccaaaaaggacaaaaagaaaaaagctgatgaaacccaggctctaccgcagcgtcagaaaaaacagcaaactgtgactctgctgccagctgcggacctggatgatttttccaagcagctgcaacagtctatgagctctgcggactctacgcaggcttaa

SEQ ID NO: 194 - DNA, 2016 bp, Artificial Sequence
  Description of Artificial Sequence: Synthetic polynucleotide
atgcaccatcatcaccatcatggtggttctggttcgccgatacttggttattggaagattaaaggactggttcagcccacacgcctcctgctagaatacttagaggaaaaatatgaagagcacctgtacgaacgtgatgagggggacaaatggcgaaacaagaaatttgaattgggcttagaatttccaaatttgccgtattatatcgatggcgacgtaaaactgacccaatcaatggccattattcgctacatcgcagataaacataacatgctgggtggctgccctaaagaacgggctgagatctccatgctggaaggtgcggtgctcgacattcgctacggcgtcagtagaattgcgtatagcaaggatttcgaaactttaaaagtggatttcctgagcaaacttccggagatgctgaaaatgtttgaggataggctttgtcataagacgtatctcaatggtgatcatgttacccacccggactttatgctgtacgacgcccttgatgtcgttctgtatatggatcccatgtgcctggacgccttcccgaaattagtgtgttttaaaaaacgtatcgaagcgattccacagatcgataaatacttgaagtcttctaaatatattgcttggcctctgcaaggctggcaggcaacgttcggtgggggagatcatccgccaaaatcagatctggtgccgcgtgggagccctggcatacaccgcgacggtggttctggtgagaacctgtactttcaaagctcagataatgggcctcaaaaccagcgcaacgctccacgtataaccttcggtggcccgtctgactccacaggcagcaaccagaatggtgagcgtagtggagccaggtctaagcagcgccgtccccagggtctgccgaacaacacggcgagctggtttactgcgcttacccaacacggtaaagaagacttaaaattcccgcgtggccagggcgtcccgatcaacactaactcttccccggatgatcagattggttattaccgcagagcaactcgtcggattcgcggcggcgacggtaaaatgaaagatttgtctccggcgtggtacttttactatctcggcaccggtccggaagctggactgccctacggggcaaacaaggacgggatcatttgggtggctaccgaaggtgccctgaatactccaaaagatcatatcggcacccgtaaccctgctaataacgctgcgatcgttctgcaactgcctcagggtacaactctgccaaaaggcttctatgcagaagggtcgcgtggtggcagccaggcgagtagccgtagcagctcccgctctcgcaactcgtcccgtaactccactccgggctcttctcgcggcacgtccccggctcgtatggcaggtaacggtggtgacgctgctctggcgctgctactgctggacaggctgaaccagctggagtcgaagatgagtggtaaaggccaacagcagcagggccagaccgttaccaaaaagagcgcagctgaagcatctaaaaaaccgcgacagaaacgtaccgcgactaaagcgtacaatgtaacacaggccttcggtcgtcgaggtccggagcaaactcaaggaaactttggcgatcaggaattaatccgccaggggaccgactacaaacactggccgcaaattgcccagttcgccccatccgctagtgcattcttcggtatgagccgcatcggcatggaagtaacgccaagtggtacgtggctgacctacaccggtgctatcaagcttgatgacaaggacccgaactttaaagaccaggttattctgcttaacaaacatattgatgcctataaaactttcccgccgaccgaacccaaaaaggacaaaaagaaaaaagctgatgaaacccaggctctaccgcagcgtcagaaaaaacagcaaactgtgactctgctgccagctgcggacctggatgatttttccaagcagctgcaacagtctatgagctctgcggactctacgcaggcttaa

SEQ ID NO: 195 - DNA, 2016 bp, Artificial Sequence
  Description of Artificial Sequence: Synthetic polynucleotide
atgcaccatcatcaccatcatggtggttctggttcgccgatacttggttattggaagattaaaggactggttcagcccacacgcctcctgctagaatacttagaggaaaaatatgaagagcacctgtacgaacgtgatgagggggacaaatggcgaaacaagaaatttgaattgggcttagaatttccaaatttgccgtattatatcgatggcgacgtaaaactgacccaatcaatggccattattcgctacatcgcagataaacataacatgctgggtggctgccctaaagaacgggctgagatctccatgctggaaggtgcggtgctcgacattcgctacggcgtcagtagaattgcgtatagcaaggatttcgaaactttaaaagtggatttcctgagcaaacttccggagatgctgaaaatgtttgaggataggctttgtcataagacgtatctcaatggtgatcatgttacccacccggactttatgctgtacgacgcccttgatgtcgttctgtatatggatcccatgtgcctggacgccttcccgaaattagtgtgttttaaaaaacgtatcgaagcgattccacagatcgataaatacttgaagtcttctaaatatattgcttggcctctgcaaggctggcaggcaacgttcggtgggggagatcatccgccaaaatcagatctggtgccgcgtgggagccctggcatacaccgcgacggtggttctggtgagaacctgtactttcaaagctcagataatgggcctcaaaaccagcgcaacgctccacgtataaccttcggtggcccgtctgactccacaggcagcaaccagaatggtgagcgtagtggagccaggtctaagcagcgccgtccccagggtctgccgaacaacacggcgagctggtttactccgcttacccaacacggtaaagaagacttaaaattcccgcctggccagggcgtcccgatcaacactaactcttccccggatgatcagattggttattaccgcagagcaactcgtcggattcgcggcggcgacggtaaaatgaaagatttgccaccgcgttggtacttttactatctcggcaccggtccggaagctgatctgccctacgggcaagtaaaggacgggatcttttgggtggctgccgaaggtgccctgaatactccaaaagatcatatcggcacccgtaaccctgctaataacgctgcgatcccactgcaactgcctccgggtacaactctgccaaaaggcttctatgcagaagggtcgcgtggtggcagccaggcgagtagccgtagcagctcccgctctcgcaactcgtcccgtaactccactccgggctcttctcgcggcacgtccccggctcgtatggcaggtaacggtggtgacgctgctctggcgctgctactgctggacaggctgaaccagctggagtcgaagatgagtggtaaaggccaacagcagcagggccagaccgttaccaaaaagagcgcagctgaagcatctaaaaaaccgcgacagaaacgtaccgcgactaaagcgtacaatgtaacacaggccttcggtcgtcgaggtccggagcaaactcaaggaaactttggcgatcaggaattaatccgccaggggaccgactacaaacactggccgcaaattgcccagttcgccccatccgctagtgcattcttcggtatgagccgcatcggcatggaagtaacgccaagtggtacgtggctgacctacaccggtgctatcaagcttgatgacaaggacccgaactttaaagaccaggttattctgcttaacaaacatattgatgcctataaaactttcccgccgaccgaacccaaaaaggacaaaaagaaaaaagctgatgaaacccaggctctaccgcagcgtcagaaaaaacagcaaactgtgactctgctgccagctgcggacctggatgatttttccaagcagctgcaacagtctatgagctctgcggactctacgcaggcttaa

SEQ ID NO: 196 - DNA, 2016 bp, Artificial Sequence
  Description of Artificial Sequence: Synthetic polynucleotide
atgcaccatcatcaccatcatggtggttctggttcgccgatacttggttattggaagattaaaggactggttcagcccacacgcctcctgctagaatacttagaggaaaaatatgaagagcacctgtacgaacgtgatgagggggacaaatggcgaaacaagaaatttgaattgggcttagaatttccaaatttgccgtattatatcgatggcgacgtaaaactgacccaatcaatggccattattcgctacatcgcagataaacataacatgctgggtggctgccctaaagaacgggctgagatctccatgctggaaggtgcggtgctcgacattcgctacggcgtcagtagaattgcgtatagcaaggatttcgaaactttaaaagtggatttcctgagcaaacttccggagatgctgaaaatgtttgaggataggctttgtcataagacgtatctcaatggtgatcatgttacccacccggactttatgctgtacgacgcccttgatgtcgttctgtatatggatcccatgtgcctggacgccttcccgaaattagtgtgttttaaaaaacgtatcgaagcgattccacagatcgataaatacttgaagtcttctaaatatattgcttggcctctgcaaggctggcaggcaacgttcggtgggggagatcatccgccaaaatcagatctggtgccgcgtgggagccctggcatacaccgcgacggtggttctggtgagaacctgtactttcaaagctcagataatgggcctcaaaaccagcgcaacgctccacgtataaccttcggtggcccgtctgactccacaggcagcaaccagaatggtgagcgtagtggagccaggtctaagcagcgccgtccccagggtctgccgaacaacacggcgagctggtttactgcgcttacccaacacggtaaagaagacttaaaattcccgcgtggccagggcgtcccgatcaacactaactcttccccggatgatcagattggttattaccgcagagcaactcgtcggtttcgcggcggcgacggtaaaatgaaagatttgtctccgcgttggtacttttactatctcggcaccggtccggaagctggactgccctacggggcaaacaaggacgggatcatttgggtggctaccgaaggtgccctgaatactccaaaagatcatatcggcacccgtaaccctgctaataacgctgcgatcgttctgcaactgcctcagggtacaactctgccaaaaggcttctatgcagaagggtcgcgtggtggcagccaggcgagtagccgtagcagctcccgctctcgcaactcgtcccgtaactccactccgggctcttctcgcggcacgtccccggctcgtatggcaggtaacggtggtgacgctgctctggcgctgctactgctggacaggctgaaccagctggagtcgaagatgagtggtaaaggccaacagcagcagggccagaccgttaccaaaaagagcgcagctgaagcatctaaaaaaccgcgacagaaacgtaccgcgactaaagcgtacaatgtaacacaggccttcggtcgtcgaggtccggagcaaactcaaggaaactttggcgatcaggaattaatccgccaggggaccgactacaaacactggccgcaaattgcccagttcgccccatccgctagtgcattcttcggtatgagccgcatcggcatggaagtaacgccaagtggtacgtggctgacctacaccggtgctatcaagcttgatgacaaggacccgaactttaaagaccaggttattctgcttaacaaacatattgatgcctataaaactttcccgccgaccgaacccaaaaaggacaaaaagaaaaaagctgatgaaacccaggctctaccgcagcgtcagaaaaaacagcaaactgtgactctgctgccagctgcggacctggatgatttttccaagcagctgcaacagtctatgagctctgcggactctacgcaggcttaa

SEQ ID NO: 197 - DNA, 2016 bp, Artificial Sequence
  Description of Artificial Sequence: Synthetic polynucleotide
atgcaccatcatcaccatcatggtggttctggttcgccgatacttggttattggaagattaaaggactggttcagcccacacgcctcctgctagaatacttagaggaaaaatatgaagagcacctgtacgaacgtgatgagggggacaaatggcgaaacaagaaatttgaattgggcttagaatttccaaatttgccgtattatatcgatggcgacgtaaaactgacccaatcaatggccattattcgctacatcgcagataaacataacatgctgggtggctgccctaaagaacgggctgagatctccatgctggaaggtgcggtgctcgacattcgctacggcgtcagtagaattgcgtatagcaaggatttcgaaactttaaaagtggatttcctgagcaaacttccggagatgctgaaaatgtttgaggataggctttgtcataagacgtatctcaatggtgatcatgttacccacccggactttatgctgtacgacgcccttgatgtcgttctgtatatggatcccatgtgcctggacgccttcccgaaattagtgtgttttaaaaaacgtatcgaagcgattccacagatcgataaatacttgaagtcttctaaatatattgcttggcctctgcaaggctggcaggcaacgttcggtgggggagatcatccgccaaaatcagatctggtgccgcgtgggagccctggcatacaccgcgacggtggttctggtgagaacctgtactttcaaagctcagataatgggcctcaaaaccagcgcaacgctccacgtataaccttcggtggcccgtctgactccacaggcagcaaccagaatggtgagcgtagtggagccaggtctaagcagcgccgtccccagggtctgccgaacaacacggcgagctggtttactggccttgtacaatttggtaaagaagacttaaaattcccgcccggccagggcgtcccgatcaacactaactcttccccggatgatcagattggttattaccgcagagcaactcgtcggattcgcggcggcgacggtaaaatgaaagatttgccaccgaagtggtacttttactatctcggcaccggtccgcatgctgatctgccctacgggcaaaaacaagacggggtgttctgggtggctcgtcctggtgccctgaatactccaaaagatcatatcggcacccgtaaccctgctaataacgctgcgatcccgctgcaactgcctccgggtacaaaactgccaaaaggcttctatgcagaagggtcgcgtggtggcagccaggcgagtagccgtagcagctcccgctctcgcaactcgtcccgtaactccactccgggctcttctcgcggcacgtccccggctcgtatggcaggtaacggtggtgacgctgctctggcgctgctactgctggacaggctgaaccagctggagtcgaagatgagtggtaaaggccaacagcagcagggccagaccgttaccaaaaagagcgcagctgaagcatctaaaaaaccgcgacagaaacgtaccgcgactaaagcgtacaatgtaacacaggccttcggtcgtcgaggtccggagcaaactcaaggaaactttggcgatcaggaattaatccgccaggggaccgactacaaacactggccgcaaattgcccagttcgccccatccgctagtgcattcttcggtatgagccgcatcggcatggaagtaacgccaagtggtacgtggctgacctacaccggtgctatcaagcttgatgacaaggacccgaactttaaagaccaggttattctgcttaacaaacatattgatgcctataaaactttcccgccgaccgaacccaaaaaggacaaaaagaaaaaagctgatgaaacccaggctctaccgcagcgtcagaaaaaacagcaaactgtgactctgctgccagctgcggacctggatgatttttccaagcagctgcaacagtctatgagctctgcggactctacgcaggcttaa

SEQ ID NO: 198 - DNA, 2016 bp, Artificial Sequence
  Description of Artificial Sequence: Synthetic polynucleotide
atgcaccatcatcaccatcatggtggttctggttcgccgatacttggttattggaagattaaaggactggttcagcccacacgcctcctgctagaatacttagaggaaaaatatgaagagcacctgtacgaacgtgatgagggggacaaatggcgaaacaagaaatttgaattgggcttagaatttccaaatttgccgtattatatcgatggcgacgtaaaactgacccaatcaatggccattattcgctacatcgcagataaacataacatgctgggtggctgccctaaagaacgggctgagatctccatgctggaaggtgcggtgctcgacattcgctacggcgtcagtagaattgcgtatagcaaggatttcgaaactttaaaagtggatttcctgagcaaacttccggagatgctgaaaatgtttgaggataggctttgtcataagacgtatctcaatggtgatcatgttacccacccggactttatgctgtacgacgcccttgatgtcgttctgtatatggatcccatgtgcctggacgccttcccgaaattagtgtgttttaaaaaacgtatcgaagcgattccacagatcgataaatacttgaagtcttctaaatatattgcttggcctctgcaaggctggcaggcaacgttcggtgggggagatcatccgccaaaatcagatctggtgccgcgtgggagccctggcatacaccgcgacggtggttctggtgagaacctgtactttcaaagctcagataatgggcctcaaaaccagcgcaacgctccacgtataaccttcggtggcccgtctgactccacaggcagcaaccagaatggtgagcgtagtggagccaggtctaagcagcgccgtccccagggtctgccgaacaacacggcgagctggtttactgcgcttacccaacacggtaaagaagacttaaaattcccgcgtggccagggcgtcccgatcaacactaactcttccccggatgatcagattggttattaccgcagagcaactcgtcggattcgcggcggcgacggtaaaatgaaagatttgtctccgcgttggtacttttactatctcggcaccggtccggaagctggactgccctacggggcaaacaaggacgggatcatttgggtggctaccgaaggtgccctgaatactccaaaagatcatatcggcacccgtaaccctgctaataacgctgcgatggttctgcaactgcctcagggtacaactctgccaaaaggcttctatgcagaagggtcgcgtggtggcagccaggcgagtagccgtagcagctcccgctctcgcaactcgtcccgtaactccactccgggctcttctcgcggcacgtccccggctcgtatggcaggtaacggtggtgacgctgctctggcgctgctactgctggacaggctgaaccagctggagtcgaagatgagtggtaaaggccaacagcagcagggccagaccgttaccaaaaagagcgcagctgaagcatctaaaaaaccgcgacagaaacgtaccgcgactaaagcgtacaatgtaacacaggccttcggtcgtcgaggtccggagcaaactcaaggaaactttggcgatcaggaattaatccgccaggggaccgactacaaacactggccgcaaattgcccagttcgccccatccgctagtgcattcttcggtatgagccgcatcggcatggaagtaacgccaagtggtacgtggctgacctacaccggtgctatcaagcttgatgacaaggacccgaactttaaagaccaggttattctgcttaacaaacatattgatgcctataaaactttcccgccgaccgaacccaaaaaggacaaaaagaaaaaagctgatgaaacccaggctctaccgcagcgtcagaaaaaacagcaaactgtgactctgctgccagctgcggacctggatgatttttccaagcagctgcaacagtctatgagctctgcggactctacgcaggcttaa

SEQ ID NO: 199 - DNA, 2016 bp, Artificial Sequence
  Description of Artificial Sequence: Synthetic polynucleotide
atgcaccatcatcaccatcatggtggttctggttcgccgatacttggttattggaagattaaaggactggttcagcccacacgcctcctgctagaatacttagaggaaaaatatgaagagcacctgtacgaacgtgatgagggggacaaatggcgaaacaagaaatttgaattgggcttagaatttccaaatttgccgtattatatcgatggcgacgtaaaactgacccaatcaatggccattattcgctacatcgcagataaacataacatgctgggtggctgccctaaagaacgggctgagatctccatgctggaaggtgcggtgctcgacattcgctacggcgtcagtagaattgcgtatagcaaggatttcgaaactttaaaagtggatttcctgagcaaacttccggagatgctgaaaatgtttgaggataggctttgtcataagacgtatctcaatggtgatcatgttacccacccggactttatgctgtacgacgcccttgatgtcgttctgtatatggatcccatgtgcctggacgccttcccgaaattagtgtgttttaaaaaacgtatcgaagcgattccacagatcgataaatacttgaagtcttctaaatatattgcttggcctctgcaaggctggcaggcaacgttcggtgggggagatcatccgccaaaatcagatctggtgccgcgtgggagccctggcatacaccgcgacggtggttctggtgagaacctgtactttcaaagctcagataatgggcctcaaaaccagcgcaacgctccacgtataaccttcggtggcccgtctgactccacaggcagcaaccagaatggtgagcgtagtggagccaggtctaagcagcgccgtccccagggtctgccgaacaacacggcgagctggtttactgcgcttacccaacacggtaaagaagacttaaaattcccgcgtggccagggcgtcccgatcaacactaactcttccccggatgatcagattggttattaccgcagagcaactcgtcggattcgcggcggcgacggtaaaatgaaagatttgtctccgcgttggtacttttactatctcggcaccggtccggaagctggactgccctacggggcaaacaagcctgggatcatttgggtggctaccgaaggtgccctgaatactccaaaagatcatatcggcacccgtaaccctgctaataacgctgcgatcgttctgcaactgcctcagggtacaactctgccaaaaggcttctatgcagaagggtcgcgtggtggcagccaggcgagtagccgtagcagctcccgctctcgcaactcgtcccgtaactccactccgggctcttctcgcggcacgtccccggctcgtatggcaggtaacggtggtgacgctgctctggcgctgctactgctggacaggctgaaccagctggagtcgaagatgagtggtaaaggccaacagcagcagggccagaccgttaccaaaaagagcgcagctgaagcatctaaaaaaccgcgacagaaacgtaccgcgactaaagcgtacaatgtaacacaggccttcggtcgtcgaggtccggagcaaactcaaggaaactttggcgatcaggaattaatccgccaggggaccgactacaaacactggccgcaaattgcccagttcgccccatccgctagtgcattcttcggtatgagccgcatcggcatggaagtaacgccaagtggtacgtggctgacctacaccggtgctatcaagcttgatgacaaggacccgaactttaaagaccaggttattctgcttaacaaacatattgatgcctataaaactttcccgccgaccgaacccaaaaaggacaaaaagaaaaaagctgatgaaacccaggctctaccgcagcgtcagaaaaaacagcaaactgtgactctgctgccagctgcggacctggatgatttttccaagcagctgcaacagtctatgagctctgcggactctacgcaggcttaa

SEQ ID NO: 200 - DNA, 2016 bp, Artificial Sequence
  Description of Artificial Sequence: Synthetic polynucleotide
atgcaccatcatcaccatcatggtggttctggttcgccgatacttggttattggaagattaaaggactggttcagcccacacgcctcctgctagaatacttagaggaaaaatatgaagagcacctgtacgaacgtgatgagggggacaaatggcgaaacaagaaatttgaattgggcttagaatttccaaatttgccgtattatatcgatggcgacgtaaaactgacccaatcaatggccattattcgctacatcgcagataaacataacatgctgggtggctgccctaaagaacgggctgagatctccatgctggaaggtgcggtgctcgacattcgctacggcgtcagtagaattgcgtatagcaaggatttcgaaactttaaaagtggatttcctgagcaaacttccggagatgctgaaaatgtttgaggataggctttgtcataagacgtatctcaatggtgatcatgttacccacccggactttatgctgtacgacgcccttgatgtcgttctgtatatggatcccatgtgcctggacgccttcccgaaattagtgtgttttaaaaaacgtatcgaagcgattccacagatcgataaatacttgaagtcttctaaatatattgcttggcctctgcaaggctggcaggcaacgttcggtgggggagatcatccgccaaaatcagatctggtgccgcgtgggagccctggcatacaccgcgacggtggttctggtgagaacctgtactttcaaagctcagataatgggcctcaaaaccagcgcaacgctccacgtataaccttcggtggcccgtctgactccacaggcagcaaccagaatggtgagcgtagtggagccaggtctaagcagcgccgtccccagggtctgccgaacaacacggcgagctggtttactgcgcttacccaacacggtaaagaagacttaaaattcccgcgtggccagggcgtcccgatcaacactaactcttccccggatgatcagattggttattaccgcagagcaactcgtcggattcgcggcggcgacggtaaaatgaaagatttgtctccgcgttggtacttttactatctcggcaccggtccggaagctggactgccctacggggcaaacaaggacgggatcatttgggtggctaccgaaggtgccctgaatactccaaaagatcatatcggcacccgtaaccctgctaataacgctgcgatcgttctgcaactgcctcagggtacaactctgccaaaaggcttctatgcagaagggtcgcgtggtggcagccaggcgagtagccgtagcagctcccgctctcgcaactcgtcccgtaactccactccgggctcttctcgcggcacgtccccggctcgtatggcaggtaacggtggtgacgctgctctggcgctgctactgctggacaggctgaaccagctggagtcgaagatgagtggtaaaggccaacagcagcagggccagaccgttaccaaaaagagcgcagctgaagcatctaaaaaaccgcgacagaaacgtaccgcgactaaagcgtacaatgtaacacaggccttcggtcgtcgaggtccggagcaaactcaaggaaactttggcgatcaggaattaatccgccaggggaccgactacaaaaattggccgcaaattgcccagttcgccccatccgctagtgcattcttcggtatgagccgcatcggcatggaagtaacgccaagtggtacgtggctgacctacaccggtgctatcaagcttgatgacaaggacccgaactttaaagaccaggttattctgcttaacaaacatattgatgcctataaaactttcccgccgaccgaacccaaaaaggacaaaaagaaaaaagctgatgaaacccaggctctaccgcagcgtcagaaaaaacagcaaactgtgactctgctgccagctgcggacctggatgatttttccaagcagctgcaacagtctatgagctctgcggactctacgcaggcttaa

SEQ ID NO: 201 - DNA, 2016 bp, Artificial Sequence
  Description of Artificial Sequence: Synthetic polynucleotide
atgcaccatcatcaccatcatggtggttctggttcgccgatacttggttattggaagattaaaggactggttcagcccacacgcctcctgctagaatacttagaggaaaaatatgaagagcacctgtacgaacgtgatgagggggacaaatggcgaaacaagaaatttgaattgggcttagaatttccaaatttgccgtattatatcgatggcgacgtaaaactgacccaatcaatggccattattcgctacatcgcagataaacataacatgctgggtggctgccctaaagaacgggctgagatctccatgctggaaggtgcggtgctcgacattcgctacggcgtcagtagaattgcgtatagcaaggatttcgaaactttaaaagtggatttcctgagcaaacttccggagatgctgaaaatgtttgaggataggctttgtcataagacgtatctcaatggtgatcatgttacccacccggactttatgctgtacgacgcccttgatgtcgttctgtatatggatcccatgtgcctggacgccttcccgaaattagtgtgttttaaaaaacgtatcgaagcgattccacagatcgataaatacttgaagtcttctaaatatattgcttggcctctgcaaggctggcaggcaacgttcggtgggggagatcatccgccaaaatcagatctggtgccgcgtgggagccctggcatacaccgcgacggtggttctggtgagaacctgtactttcaaagctcagataatgggcctcaaaaccagcgcaacgctccacgtataaccttcggtggcccgtctgactccacaggcagcaaccagaatggtgagcgtagtggagccaggtctaagcagcgccgtccccagggtctgccgaacaacacggcgagctggtttactgcgcttacccaacacggtaaagaagacttaaaattcccgaaaggccagggcgtcccgatcaacactaactctaaaccggatgatcagattggttattaccgcagacaaactcgtcggtatcgcggcggcgacggtcaaatgaaagatttggatccgcgttggtacttttactatctcggcaccggtccggaagctggactgccctacggggcaaacaaggacgggatcatttgggtggctaccgaaggtgccctgaatactccaaaagatcatatcggcacccgtaaccctgctaataacgctgcgatcgttctgcaactgcctcagggtacaactctgccaaaaggcttctatgcagaagggtcgcgtggtggcagccaggcgagtagccgtagcagctcccgctctcgcaactcgtcccgtaactccactccgggctcttctcgcggcacgtccccggctcgtatggcaggtaacggtggtgacgctgctctggcgctgctactgctggacaggctgaaccagctggagtcgaagatgagtggtaaaggccaacagcagcagggccagaccgttaccaaaaagagcgcagctgaagcatctaaaaaaccgcgacagaaacgtaccgcgactaaagcgtacaatgtaacacaggccttcggtcgtcgaggtccggagcaaactcaaggaaactttggcgatcaggaattaatccgccaggggaccgactacaaacactggccgcaaattgcccagttcgccccatccgctagtgcattcttcggtatgagccgcatcggcatggaagtaacgccaagtggtacgtggctgacctacaccggtgctatcaagcttgatgacaaggacccgaactttaaagaccaggttattctgcttaacaaacatattgatgcctataaaactttcccgccgaccgaacccaaaaaggacaaaaagaaaaaagctgatgaaacccaggctctaccgcagcgtcagaaaaaacagcaaactgtgactctgctgccagctgcggacctggatgatttttccaagcagctgcaacagtctatgagctctgcggactctacgcaggcttaa

SEQ ID NO: 202 - DNA, 2016 bp, Artificial Sequence
  Description of Artificial Sequence: Synthetic polynucleotide
atgcaccatcatcaccatcatggtggttctggttcgccgatacttggttattggaagattaaaggactggttcagcccacacgcctcctgctagaatacttagaggaaaaatatgaagagcacctgtacgaacgtgatgagggggacaaatggcgaaacaagaaatttgaattgggcttagaatttccaaatttgccgtattatatcgatggcgacgtaaaactgacccaatcaatggccattattcgctacatcgcagataaacataacatgctgggtggctgccctaaagaacgggctgagatctccatgctggaaggtgcggtgctcgacattcgctacggcgtcagtagaattgcgtatagcaaggatttcgaaactttaaaagtggatttcctgagcaaacttccggagatgctgaaaatgtttgaggataggctttgtcataagacgtatctcaatggtgatcatgttacccacccggactttatgctgtacgacgcccttgatgtcgttctgtatatggatcccatgtgcctggacgccttcccgaaattagtgtgttttaaaaaacgtatcgaagcgattccacagatcgataaatacttgaagtcttctaaatatattgcttggcctctgcaaggctggcaggcaacgttcggtgggggagatcatccgccaaaatcagatctggtgccgcgtgggagccctggcatacaccgcgacggtggttctggtgagaacctgtactttcaaagctcagataatgggcctcaaaaccagcgcaacgctccacgtataaccttcggtggcccgtctgactccacaggcagcaaccagaatggtgagcgtagtggagccaggtctaagcagcgccgtccccagggtctgccgaacaacacggcgagctggtttactgcgcttacccaacacggtaaagaagacttaaaattcccgcgtggccagggcgtcccgatcaacactaactcttccccggatgatcagattggttattaccgcagagcaactcgtcggattcgcggcggcgacggtaaaatgaaagatttgtctccgcgttggtacttttactatctcggcaccggtccggaagctggactgccctacggggcaaacaaggacgggatcatttgggtggctaccgaaggtgccctgaatactccaaaagatcatatcggcacccgtaaccctgctaataacgctgcgatcgttctgcaactgcctcagggtacaactctgccaaaaggcttctatgcagaagggtcgcgtggtggcagccaggcgagtagccgtagcagctcccgctctcgcaactcgtcccgtaactccactccgggctcttctcgcggcacgtccccggctcgtatggcaggtaacggtggtgacgctgctctggcgctgctactgctggacaggctgaaccagctggagtcgaagatgagtggtaaaggccaacagcagcagggccagaccgttaccaaaaagagcgcagctgaagcatctaaaaaaccgcgacagaaacgtaccgcgactaaagcgtacaatgtaacacaggccttcggtcgtcgaggtccggagcaaactcaaggaaactttggcgatcaggaattaatccgccaggggaccgactacaaacactggccgcaaattgcccagttcgccccatccgctagtgcattcttcggtatgagccgcatcggcatggaatgtacgccaagtggtacgtggctgacctacaccggtgctatcaagcttgatgacaaggacccgaactttaaagaccaggttattctgcttaacaaacatattgatgcctataaaactttcccgccgaccgaacccaaaaaggacaaaaagaaaaaagctgatgaaacccaggctctaccgcagcgtcagaaaaaacagcaaactgtgactctgctgccagctgcggacctggatgatttttccaagcagctgcaacagtctatgagctctgcggactctacgcaggcttaa

SEQ ID NO: 203 - DNA, 2016 bp, Artificial Sequence
  Description of Artificial Sequence: Synthetic polynucleotide
atgcaccatcatcaccatcatggtggttctggttcgccgatacttggttattggaagattaaaggactggttcagcccacacgcctcctgctagaatacttagaggaaaaatatgaagagcacctgtacgaacgtgatgagggggacaaatggcgaaacaagaaatttgaattgggcttagaatttccaaatttgccgtattatatcgatggcgacgtaaaactgacccaatcaatggccattattcgctacatcgcagataaacataacatgctgggtggctgccctaaagaacgggctgagatctccatgctggaaggtgcggtgctcgacattcgctacggcgtcagtagaattgcgtatagcaaggatttcgaaactttaaaagtggatttcctgagcaaacttccggagatgctgaaaatgtttgaggataggctttgtcataagacgtatctcaatggtgatcatgttacccacccggactttatgctgtacgacgcccttgatgtcgttctgtatatggatcccatgtgcctggacgccttcccgaaattagtgtgttttaaaaaacgtatcgaagcgattccacagatcgataaatacttgaagtcttctaaatatattgcttggcctctgcaaggctggcaggcaacgttcggtgggggagatcatccgccaaaatcagatctggtgccgcgtgggagccctggcatacaccgcgacggtggttctggtgagaacctgtactttcaaagctcagataatgggcctcaaaaccagcgcaacgctccacgtataaccttcggtggcccgtctgactccacaggcagcaaccagaatggtgagcgtagtggagccaggtctaagcagcgccgtccccagggtctgccgaacaacacggcgagctggtttactccgcttacccaatttggtaaagaagacttaaaattcccgccgggccagggcgtcccgatcaacactaactcttccccggatgatcagattggttattaccgcagagcaactcgtcggattcgcggcggcgacggtaaaatgaaagatttgccaccgaagtggtacttttactatctcggcaccggtccgcatgctgatctgccctacgggcacaaaatggacggggtagtgtgggtggctcggcctggtgccctgaatactccaaaagatcatatcggcacccgtaaccctgctaataacgctgcgatcccactgcaactgcctccgggtacaaaactgccaaaaggcttctatgcagaagggtcgcgtggtggcagccaggcgagtagccgtagcagctcccgctctcgcaactcgtcccgtaactccactccgggctcttctcgcggcacgtccccggctcgtatggcaggtaacggtggtgacgctgctctggcgctgctactgctggacaggctgaaccagctggagtcgaagatgagtggtaaaggccaacagcagcagggccagaccgttaccaaaaagagcgcagctgaagcatctaaaaaaccgcgacagaaacgtaccgcgactaaagcgtacaatgtaacacaggccttcggtcgtcgaggtccggagcaaactcaaggaaactttggcgatcaggaattaatccgccaggggaccgactacaaacactggccgcaaattgcccagttcgccccatccgctagtgcattcttcggtatgagccgcatcggcatggaagtaacgccaagtggtacgtggctgacctacaccggtgctatcaagcttgatgacaaggacccgaactttaaagaccaggttattctgcttaacaaacatattgatgcctataaaactttcccgccgaccgaacccaaaaaggacaaaaagaaaaaagctgatgaaacccaggctctaccgcagcgtcagaaaaaacagcaaactgtgactctgctgccagctgcggacctggatgatttttccaagcagctgcaacagtctatgagctctgcggactctacgcaggcttaa

SEQ ID NO: 204 - DNA, 2016 bp, Artificial Sequence
  Description of Artificial Sequence: Synthetic polynucleotide
atgcaccatcatcaccatcatggtggttctggttcgccgatacttggttattggaagattaaaggactggttcagcccacacgcctcctgctagaatacttagaggaaaaatatgaagagcacctgtacgaacgtgatgagggggacaaatggcgaaacaagaaatttgaattgggcttagaatttccaaatttgccgtattatatcgatggcgacgtaaaactgacccaatcaatggccattattcgctacatcgcagataaacataacatgctgggtggctgccctaaagaacgggctgagatctccatgctggaaggtgcggtgctcgacattcgctacggcgtcagtagaattgcgtatagcaaggatttcgaaactttaaaagtggatttcctgagcaaacttccggagatgctgaaaatgtttgaggataggctttgtcataagacgtatctcaatggtgatcatgttacccacccggactttatgctgtacgacgcccttgatgtcgttctgtatatggatcccatgtgcctggacgccttcccgaaattagtgtgttttaaaaaacgtatcgaagcgattccacagatcgataaatacttgaagtcttctaaatatattgcttggcctctgcaaggctggcaggcaacgttcggtgggggagatcatccgccaaaatcagatctggtgccgcgtgggagccctggcatacaccgcgacggtggttctggtgagaacctgtactttcaaagctcagataatgggcctcaaaaccagcgcaacgctccacgtataaccttcggtggcccgtctgactccacaggcagcaaccagaatggtgagcgtagtggagccaggtctaagcagcgccgtccccagggtctgccgaacaacacggcgagctggtttactgcgcttacccaacacggtaaagaagacttaaaattcccgcgtggccagggcgtcccgatcaacactaactcttccccggatgatcagattggttattaccgcagagtgactcgtcggattcgcggcggcgacggtaaaatgaaagatttgtctccgcgttggtacttttactatctcggcaccggtccggaagctggactgccctacggggcaaacaaggacgggatcatttgggtggctaccgaaggtgccctgaatactccaaaagatcatatcggcacccgtaaccctgctaataacgctgcgatcgttctgcaactgcctcagggtacaactctgccaaaaggcttctatgcagaagggtcgcgtggtggcagccaggcgagtagccgtagcagctcccgctctcgcaactcgtcccgtaactccactccgggctcttctcgcggcacgtccccggctcgtatggcaggtaacggtggtgacgctgctctggcgctgctactgctggacaggctgaaccagctggagtcgaagatgagtggtaaaggccaacagcagcagggccagaccgttaccaaaaagagcgcagctgaagcatctaaaaaaccgcgacagaaacgtaccgcgactaaagcgtacaatgtaacacaggccttcggtcgtcgaggtccggagcaaactcaaggaaactttggcgatcaggaattaatccgccaggggaccgactacaaacactggccgcaaattgcccagttcgccccatccgctagtgcattcttcggtatgagccgcatcggcatggaagtaacgccaagtggtacgtggctgacctacaccggtgctatcaagcttgatgacaaggacccgaactttaaagaccaggttattctgcttaacaaacatattgatgcctataaaactttcccgccgaccgaacccaaaaaggacaaaaagaaaaaagctgatgaaacccaggctctaccgcagcgtcagaaaaaacagcaaactgtgactctgctgccagctgcggacctggatgatttttccaagcagctgcaacagtctatgagctctgcggactctacgcaggcttaa

SEQ ID NO: 205 - DNA, 2016 bp, Artificial Sequence
  Description of Artificial Sequence: Synthetic polynucleotide
atgcaccatcatcaccatcatggtggttctggttcgccgatacttggttattggaagattaaaggactggttcagcccacacgcctcctgctagaatacttagaggaaaaatatgaagagcacctgtacgaacgtgatgagggggacaaatggcgaaacaagaaatttgaattgggcttagaatttccaaatttgccgtattatatcgatggcgacgtaaaactgacccaatcaatggccattattcgctacatcgcagataaacataacatgctgggtggctgccctaaagaacgggctgagatctccatgctggaaggtgcggtgctcgacattcgctacggcgtcagtagaattgcgtatagcaaggatttcgaaactttaaaagtggatttcctgagcaaacttccggagatgctgaaaatgtttgaggataggctttgtcataagacgtatctcaatggtgatcatgttacccacccggactttatgctgtacgacgcccttgatgtcgttctgtatatggatcccatgtgcctggacgccttcccgaaattagtgtgttttaaaaaacgtatcgaagcgattccacagatcgataaatacttgaagtcttctaaatatattgcttggcctctgcaaggctggcaggcaacgttcggtgggggagatcatccgccaaaatcagatctggtgccgcgtgggagccctggcatacaccgcgacggtggttctggtgagaacctgtactttcaaagctcagataatgggcctcaaaaccagcgcaacgctccacgtataaccttcggtggcccgtctgactccacaggcagcaaccagaatggtgagcgtagtggagccaggtctaagcagcgccgtccccagggtctgccgaacaacacggcgagctggtttactgcgcttacccaacacggtaaagaagacttaaaattcccgcgtggccagggcgtcccgatcaacactaactcttccccggatgatcagattggttattaccgcagagcaactcgtcggattcgcggcggcgacggtaaaatgaaagatttgtctccgtattggtacttttactatctcggcaccggtccggaagctggactgccctacggggcaaacaaggacgggatcatttgggtggctaccgaaggtgccctgaatactccaaaagatcatatcggcacccgtaaccctgctaataacgctgcgatcgttctgcaactgcctcagggtacaactctgccaaaaggcttctatgcagaagggtcgcgtggtggcagccaggcgagtagccgtagcagctcccgctctcgcaactcgtcccgtaactccactccgggctcttctcgcggcacgtccccggctcgtatggcaggtaacggtggtgacgctgctctggcgctgctactgctggacaggctgaaccagctggagtcgaagatgagtggtaaaggccaacagcagcagggccagaccgttaccaaaaagagcgcagctgaagcatctaaaaaaccgcgacagaaacgtaccgcgactaaagcgtacaatgtaacacaggccttcggtcgtcgaggtccggagcaaactcaaggaaactttggcgatcaggaattaatccgccaggggaccgactacaaacactggccgcaaattgcccagttcgccccatccgctagtgcattcttcggtatgagccgcatcggcatggaagtaacgccaagtggtacgtggctgacctacaccggtgctatcaagcttgatgacaaggacccgaactttaaagaccaggttattctgcttaacaaacatattgatgcctataaaactttcccgccgaccgaacccaaaaaggacaaaaagaaaaaagctgatgaaacccaggctctaccgcagcgtcagaaaaaacagcaaactgtgactctgctgccagctgcggacctggatgatttttccaagcagctgcaacagtctatgagctctgcggactctacgcaggcttaa

SEQ ID NO: 206 - DNA, 2016 bp, Artificial Sequence
  Description of Artificial Sequence: Synthetic polynucleotide
atgcaccatcatcaccatcatggtggttctggttcgccgatacttggttattggaagattaaaggactggttcagcccacacgcctcctgctagaatacttagaggaaaaatatgaagagcacctgtacgaacgtgatgagggggacaaatggcgaaacaagaaatttgaattgggcttagaatttccaaatttgccgtattatatcgatggcgacgtaaaactgacccaatcaatggccattattcgctacatcgcagataaacataacatgctgggtggctgccctaaagaacgggctgagatctccatgctggaaggtgcggtgctcgacattcgctacggcgtcagtagaattgcgtatagcaaggatttcgaaactttaaaagtggatttcctgagcaaacttccggagatgctgaaaatgtttgaggataggctttgtcataagacgtatctcaatggtgatcatgttacccacccggactttatgctgtacgacgcccttgatgtcgttctgtatatggatcccatgtgcctggacgccttcccgaaattagtgtgttttaaaaaacgtatcgaagcgattccacagatcgataaatacttgaagtcttctaaatatattgcttggcctctgcaaggctggcaggcaacgttcggtgggggagatcatccgccaaaatcagatctggtgccgcgtgggagccctggcatacaccgcgacggtggttctggtgagaacctgtactttcaaagctcagataatgggcctcaaaaccagcgcaacgctccacgtataaccttcggtggcccgtctgactccacaggcagcaaccagaatggtgagcgtagtggagccaggtctaagcagcgccgtccccagggtctgccgaacaacacggcgagctggtttactgcgcttacccaacacggtaaagaagacttaaaattcccgccaggccagggcgtcccgatcaaccccaactctaaaccggatgatcagattggttattaccgcagagaagttcgtcggtatcgcggcggcgacggtcaaatgaaagatttgcctccgcgttggtacttttactatctcggcaccggtccggaagctggactgccctacggggcaaacaaggacgggatcatttgggtggctaccgaaggtgccctgaatactccaaaagatcatatcggcacccgtaaccctgctaataacgctgcgatcgttctgcaactgcctcagggtacaactctgccaaaaggcttctatgcagaagggtcgcgtggtggcagccaggcgagtagccgtagcagctcccgctctcgcaactcgtcccgtaactccactccgggctcttctcgcggcacgtccccggctcgtatggcaggtaacggtggtgacgctgctctggcgctgctactgctggacaggctgaaccagctggagtcgaagatgagtggtaaaggccaacagcagcagggccagaccgttaccaaaaagagcgcagctgaagcatctaaaaaaccgcgacagaaacgtaccgcgactaaagcgtacaatgtaacacaggccttcggtcgtcgaggtccggagcaaactcaaggaaactttggcgatcaggaattaatccgccaggggaccgactacaaacactggccgcaaattgcccagttcgccccatccgctagtgcattcttcggtatgagccgcatcggcatggaagtaacgccaagtggtacgtggctgacctacaccggtgctatcaagcttgatgacaaggacccgaactttaaagaccaggttattctgcttaacaaacatattgatgcctataaaactttcccgccgaccgaacccaaaaaggacaaaaagaaaaaagctgatgaaacccaggctctaccgcagcgtcagaaaaaacagcaaactgtgactctgctgccagctgcggacctggatgatttttccaagcagctgcaacagtctatgagctctgcggactctacgcaggcttaa

SEQ ID NO: 207 - DNA, 2016 bp, Artificial Sequence
  Description of Artificial Sequence: Synthetic polynucleotide
atgcaccatcatcaccatcatggtggttctggttcgccgatacttggttattggaagattaaaggactggttcagcccacacgcctcctgctagaatacttagaggaaaaatatgaagagcacctgtacgaacgtgatgagggggacaaatggcgaaacaagaaatttgaattgggcttagaatttccaaatttgccgtattatatcgatggcgacgtaaaactgacccaatcaatggccattattcgctacatcgcagataaacataacatgctgggtggctgccctaaagaacgggctgagatctccatgctggaaggtgcggtgctcgacattcgctacggcgtcagtagaattgcgtatagcaaggatttcgaaactttaaaagtggatttcctgagcaaacttccggagatgctgaaaatgtttgaggataggctttgtcataagacgtatctcaatggtgatcatgttacccacccggactttatgctgtacgacgcccttgatgtcgttctgtatatggatcccatgtgcctggacgccttcccgaaattagtgtgttttaaaaaacgtatcgaagcgattccacagatcgataaatacttgaagtcttctaaatatattgcttggcctctgcaaggctggcaggcaacgttcggtgggggagatcatccgccaaaatcagatctggtgccgcgtgggagccctggcatacaccgcgacggtggttctggtgagaacctgtactttcaaagctcagataatgggcctcaaaaccagcgcaacgctccacgtataaccttcggtggcccgtctgactccacaggcagcaaccagaatggtgagcgtagtggagccaggtctaagcagcgccgtccccagggtctgccgaacaacacggcgagctggtttactgcgcttacccaacacggtaaagaagacttaaaattcccgcgtggccagggcgtcccgatcaacactaactcttccccggatgatcagattggttattaccgcagagcaactcgtcggattcgcggcggcgacggtaaaatgaaagatttgtctccgcgttggtacttttactatctcggcaccggtccggaagctggactgccctacggggcaaacaaggacgggatcatttgggtggctaccgaaggtgccctgaatactccaaaagatcatatcggcacccgtaaccctgctaataacgctgcgatcgttctgcaactgcctcagggtacaactctgccaaaaggcttctatgcagaagggtcgcgtggtggcagccaggcgagtagccgtagcagctcccgctctcgcaactcgtcccgtaactccactccgggctcttctcgcggcacgtccccggctcgtatggcaggtaacggtggtgacgctgctctggcgctgctactgctggacaggctgaaccagctggagtcgaagatgagtggtaaaggccaacagcagcagggccagaccgttaccaaaaagagcgcagctgaaatgtctaaaaaaccgcgacagaaacgtaccgcgactaaaggttgtaatgtaacacagtgcttcggtccccgaggtccggagcaaactcaaggaaactttggcgatgccgaattaatcaaaaaagggaccgactacaaacactggccgcaaattgcccagttcgccccatccgctagtgcattcttcggtatgagccgcatctcgagtaaggaacaaccaagtggtacgtggctgacctacaccggtgctatcaagcttgataaggatgacccgaactttaaagaccaggttattctgcttaacaaacatattgatgcctataaaactttcccgccgaccgaacccaaaaaggacaaaaagaaaaaagctgatgaaacccaggctctaccgcagcgtcagaaaaaacagcaaactgtgactctgctgccagctgcggacctggatgatttttccaagcagctgcaacagtctatgagctctgcggactctacgcaggcttaa

SEQ ID NO: 208 - DNA, 2016 bp, Artificial Sequence
  Description of Artificial Sequence: Synthetic polynucleotide
atgcaccatcatcaccatcatggtggttctggttcgccgatacttggttattggaagattaaaggactggttcagcccacacgcctcctgctagaatacttagaggaaaaatatgaagagcacctgtacgaacgtgatgagggggacaaatggcgaaacaagaaatttgaattgggcttagaatttccaaatttgccgtattatatcgatggcgacgtaaaactgacccaatcaatggccattattcgctacatcgcagataaacataacatgctgggtggctgccctaaagaacgggctgagatctccatgctggaaggtgcggtgctcgacattcgctacggcgtcagtagaattgcgtatagcaaggatttcgaaactttaaaagtggatttcctgagcaaacttccggagatgctgaaaatgtttgaggataggctttgtcataagacgtatctcaatggtgatcatgttacccacccggactttatgctgtacgacgcccttgatgtcgttctgtatatggatcccatgtgcctggacgccttcccgaaattagtgtgttttaaaaaacgtatcgaagcgattccacagatcgataaatacttgaagtcttctaaatatattgcttggcctctgcaaggctggcaggcaacgttcggtgggggagatcatccgccaaaatcagatctggtgccgcgtgggagccctggcatacaccgcgacggtggttctggtgagaacctgtactttcaaagctcagataatgggcctcaaaaccagcgcaacgctccacgtataaccttcggtggcccgtctgactccacaggcagcaaccagaatggtgagcgtagtggagccaggtctaagcagcgccgtccccagggtctgccgaacaacacggcgagctggtttactgcgcttacccaacacggtaaagaagacttaaaattcccgcgtggccagggcgtcccgatcaacactaactcttccccggatgatcagattggttattaccgcagagcaactcgtcggattcgcggcggcgacggtaaaatgaaagatttgtctccgcgttggtacttttactatctcggcaccggtccggaagctagtctgccctacggggcaaacaaggacgggatcatttgggtggctaccgaaggtgccctgaatactccaaaagatcatatcggcacccgtaaccctgctaataacgctgcgatcgttctgcaactgcctcagggtacaactctgccaaaaggcttctatgcagaagggtcgcgtggtggcagccaggcgagtagccgtagcagctcccgctctcgcaactcgtcccgtaactccactccgggctcttctcgcggcacgtccccggctcgtatggcaggtaacggtggtgacgctgctctggcgctgctactgctggacaggctgaaccagctggagtcgaagatgagtggtaaaggccaacagcagcagggccagaccgttaccaaaaagagcgcagctgaagcatctaaaaaaccgcgacagaaacgtaccgcgactaaagcgtacaatgtaacacaggccttcggtcgtcgaggtccggagcaaactcaaggaaactttggcgatcaggaattaatccgccaggggaccgactacaaacactggccgcaaattgcccagttcgccccatccgctagtgcattcttcggtatgagccgcatcggcatggaagtaacgccaagtggtacgtggctgacctacaccggtgctatcaagcttgatgacaaggacccgaactttaaagaccaggttattctgcttaacaaacatattgatgcctataaaactttcccgccgaccgaacccaaaaaggacaaaaagaaaaaagctgatgaaacccaggctctaccgcagcgtcagaaaaaacagcaaactgtgactctgctgccagctgcggacctggatgatttttccaagcagctgcaacagtctatgagctctgcggactctacgcaggcttaa

SEQ ID NO: 209 - DNA, 2016 bp, Artificial Sequence
  Description of Artificial Sequence: Synthetic polynucleotide
atgcaccatcatcaccatcatggtggttctggttcgccgatacttggttattggaagattaaaggactggttcagcccacacgcctcctgctagaatacttagaggaaaaatatgaagagcacctgtacgaacgtgatgagggggacaaatggcgaaacaagaaatttgaattgggcttagaatttccaaatttgccgtattatatcgatggcgacgtaaaactgacccaatcaatggccattattcgctacatcgcagataaacataacatgctgggtggctgccctaaagaacgggctgagatctccatgctggaaggtgcggtgctcgacattcgctacggcgtcagtagaattgcgtatagcaaggatttcgaaactttaaaagtggatttcctgagcaaacttccggagatgctgaaaatgtttgaggataggctttgtcataagacgtatctcaatggtgatcatgttacccacccggactttatgctgtacgacgcccttgatgtcgttctgtatatggatcccatgtgcctggacgccttcccgaaattagtgtgttttaaaaaacgtatcgaagcgattccacagatcgataaatacttgaagtcttctaaatatattgcttggcctctgcaaggctggcaggcaacgttcggtgggggagatcatccgccaaaatcagatctggtgccgcgtgggagccctggcatacaccgcgacggtggttctggtgagaacctgtactttcaaagctcagataatgggcctcaaaaccagcgcaacgctccacgtataaccttcggtggcccgtctgactccacaggcagcaaccagaatggtgagcgtagtggagccaggtctaagcagcgccgtccccagggtctgccgaacaacacggcgagctggtttactgcgcttacccaacacggtaaagaagacttaaaattcccgcgtggccagggcgtcccgatcaacactaactcttccccggatgatcagattggttattaccgcagagcaactcgtcggattcgcggcggcgacggtaaaatgaaagatttgtctccgcgttggtacttttactatctcggcaccggtccggaagctggactgccctacggggcaaacaaggacgggatcatttgggtggctaccgaaggtgccctgaatactccaaaagatcatatcggcacccgtaaccctgctaataacgctgcgatcgttattcaactgcctcagggtacaactctgccaaaaggcttctatgcagaagggtcgcgtggtggcagccaggcgagtagccgtagcagctcccgctctcgcaactcgtcccgtaactccactccgggctcttctcgcggcacgtccccggctcgtatggcaggtaacggtggtgacgctgctctggcgctgctactgctggacaggctgaaccagctggagtcgaagatgagtggtaaaggccaacagcagcagggccagaccgttaccaaaaagagcgcagctgaagcatctaaaaaaccgcgacagaaacgtaccgcgactaaagcgtacaatgtaacacaggccttcggtcgtcgaggtccggagcaaactcaaggaaactttggcgatcaggaattaatccgccaggggaccgactacaaacactggccgcaaattgcccagttcgccccatccgctagtgcattcttcggtatgagccgcatcggcatggaagtaacgccaagtggtacgtggctgacctacaccggtgctatcaagcttgatgacaaggacccgaactttaaagaccaggttattctgcttaacaaacatattgatgcctataaaactttcccgccgaccgaacccaaaaaggacaaaaagaaaaaagctgatgaaacccaggctctaccgcagcgtcagaaaaaacagcaaactgtgactctgctgccagctgcggacctggatgatttttccaagcagctgcaacagtctatgagctctgcggactctacgcaggcttaa

SEQ ID NO: 210 - DNA, 2016 bp, Artificial Sequence
  Description of Artificial Sequence: Synthetic polynucleotide
atgcaccatcatcaccatcatggtggttctggttcgccgatacttggttattggaagattaaaggactggttcagcccacacgcctcctgctagaatacttagaggaaaaatatgaagagcacctgtacgaacgtgatgagggggacaaatggcgaaacaagaaatttgaattgggcttagaatttccaaatttgccgtattatatcgatggcgacgtaaaactgacccaatcaatggccattattcgctacatcgcagataaacataacatgctgggtggctgccctaaagaacgggctgagatctccatgctggaaggtgcggtgctcgacattcgctacggcgtcagtagaattgcgtatagcaaggatttcgaaactttaaaagtggatttcctgagcaaacttccggagatgctgaaaatgtttgaggataggctttgtcataagacgtatctcaatggtgatcatgttacccacccggactttatgctgtacgacgcccttgatgtcgttctgtatatggatcccatgtgcctggacgccttcccgaaattagtgtgttttaaaaaacgtatcgaagcgattccacagatcgataaatacttgaagtcttctaaatatattgcttggcctctgcaaggctggcaggcaacgttcggtgggggagatcatccgccaaaatcagatctggtgccgcgtgggagccctggcatacaccgcgacggtggttctggtgagaacctgtactttcaaagctcagataatgggcctcaaaaccagcgcaacgctccacgtataaccttcggtggcccgtctgactccacaggcagcaaccagaatggtgagcgtagtggagccaggtctaagcagcgccgtccccagggtctgccgaacaacacggcgagctggtttactgcgcttacccaacacggtaaagaagacttaaaattcccgcgtggccagggcgtcccgatcaacactaactcttccccggatgatcagattggttattaccgcagagcaactcgtcggattcgcggcggcgacggtaaaatgaaagatttgtctccgcgttggtacttttactatctcggcaccggtccggaagctggactgccctacggggcaaacaaggacgggatcatttgggtggctaccgaaggtgccctgaatactccaaaagatcatatcggcacccgtaaccctgctaataacgctgcgatcgttctgcaactgcctcagggtacaactctgccaaaaggcttctatgcagaagggtcgcgtggtggcagccaggcgagtagccgtagcagctcccgctctcgcaactcgtcccgtaactccactccgggctcttctcgcggcacgtccccggctcgtatggcaggtaacggtggtgacgctgctctggcgctgctactgctggacaggctgaaccagctggagtcgaagatgagtggtaaaggccaacagcagcagggccagaccgttaccaaaaagagcgcagctgaaatgtctaaaaaaccgcgacagaaacgtaccgcgactaaagggtgcaatgtaacacagtgtttcggtccacgaggtccggagcaaactcaaggaaactttggcgatgccgaattaaataaaaaaggggtggactacaaacactggccgcaaattgcccagttcgccccatccgctagtgcattcttcggtatgagccgcatctcgagcaaggaacaaccaagtggtacgtggctgacctacaccggtgctatcaagcttgataaggatgacccgaactttaaagaccaggttattctgcttaacaaacatattgatgcctataaaactttcccgccgaccgaacccaaaaaggacaaaaagaaaaaagctgatgaaacccaggctctaccgcagcgtcagaaaaaacagcaaactgtgactctgctgccagctgcggacctggatgatttttccaagcagctgcaacagtctatgagctctgcggactctacgcaggcttaa

SEQ ID NO: 211 - DNA, 2016 bp, Artificial Sequence
  Description of Artificial Sequence: Synthetic polynucleotide
atgcaccatcatcaccatcatggtggttctggttcgccgatacttggttattggaagattaaaggactggttcagcccacacgcctcctgctagaatacttagaggaaaaatatgaagagcacctgtacgaacgtgatgagggggacaaatggcgaaacaagaaatttgaattgggcttagaatttccaaatttgccgtattatatcgatggcgacgtaaaactgacccaatcaatggccattattcgctacatcgcagataaacataacatgctgggtggctgccctaaagaacgggctgagatctccatgctggaaggtgcggtgctcgacattcgctacggcgtcagtagaattgcgtatagcaaggatttcgaaactttaaaagtggatttcctgagcaaacttccggagatgctgaaaatgtttgaggataggctttgtcataagacgtatctcaatggtgatcatgttacccacccggactttatgctgtacgacgcccttgatgtcgttctgtatatggatcccatgtgcctggacgccttcccgaaattagtgtgttttaaaaaacgtatcgaagcgattccacagatcgataaatacttgaagtcttctaaatatattgcttggcctctgcaaggctggcaggcaacgttcggtgggggagatcatccgccaaaatcagatctggtgccgcgtgggagccctggcatacaccgcgacggtggttctggtgagaacctgtactttcaaagctcagataatgggcctcaaaaccagcgcaacgctccacgtataaccttcggtggcccgtctgactccacaggcagcaaccagaatggtgagcgtagtggagccaggtctaagcagcgccgtccccagggtctgccgaacaacacggcgagctggtttactgcgcttacccaacacggtaaagaagacttaaaattcccgcgtggccagggcgtcccgatcaacactaactcttccccggatgatcagattggttattaccgcagagcaactcgtcggattcgcggcggcgacggtaaaatgaaagatttgtctccgcgttggtacttttactatctcggcaccggtccggaagctggactgccctacggggcaaacaaggacgggatcatttgggtggctaccgaaggtgccctgaatactccaaaagatcatatcggcacccgtaaccctgctaataacgctgcgatcgttctgcaactgcctcagggtacaactctgccaaaaggcttctatgcagaagggtcgcgtggtggcagccaggcgagtagccgtagcagctcccgctctcgcaactcgtcccgtaactccactccgggctcttctcgcggcacgtccccggctcgtatggcaggtaacggtggtgacgctgctctggcgctgctactgctggacaggctgaaccagctggagtcgaagatgagtggtaaaggccaacagcagcagggccagaccgttaccaaaaagagcgcagctgaagcatctaaaaaaccgcgacagaaacgtaccgcgactaaagcgtacaatgtaacacaggccttcggtcgtcgaggtccggagcaaactcaaggaaactttggcgatcaggatttaatccgccaggggaccgactacaaacactggccgcaaattgcccagttcgccccatccgctagtgcattcttcggtatgagccgcatcggcatggaagtaacgccaagtggtacgtggctgacctacaccggtgctatcaagcttgatgacaaggacccgaactttaaagaccaggttattctgcttaacaaacatattgatgcctataaaactttcccgccgaccgaacccaaaaaggacaaaaagaaaaaagctgatgaaacccaggctctaccgcagcgtcagaaaaaacagcaaactgtgactctgctgccagctgcggacctggatgatttttccaagcagctgcaacagtctatgagctctgcggactctacgcaggcttaa

SEQ ID NO: 212 - DNA, 2016 bp, Artificial Sequence
  Description of Artificial Sequence: Synthetic polynucleotide
atgcaccatcatcaccatcatggtggttctggttcgccgatacttggttattggaagattaaaggactggttcagcccacacgcctcctgctagaatacttagaggaaaaatatgaagagcacctgtacgaacgtgatgagggggacaaatggcgaaacaagaaatttgaattgggcttagaatttccaaatttgccgtattatatcgatggcgacgtaaaactgacccaatcaatggccattattcgctacatcgcagataaacataacatgctgggtggctgccctaaagaacgggctgagatctccatgctggaaggtgcggtgctcgacattcgctacggcgtcagtagaattgcgtatagcaaggatttcgaaactttaaaagtggatttcctgagcaaacttccggagatgctgaaaatgtttgaggataggctttgtcataagacgtatctcaatggtgatcatgttacccacccggactttatgctgtacgacgcccttgatgtcgttctgtatatggatcccatgtgcctggacgccttcccgaaattagtgtgttttaaaaaacgtatcgaagcgattccacagatcgataaatacttgaagtcttctaaatatattgcttggcctctgcaaggctggcaggcaacgttcggtgggggagatcatccgccaaaatcagatctggtgccgcgtgggagccctggcatacaccgcgacggtggttctggtgagaacctgtactttcaaagctcagataatgggcctcaaaaccagcgcaacgctccacgtataaccttcggtggcccgtctgactccacaggcagcaaccagaatggtgagcgtagtggagccaggtctaagcagcgccgtccccagggtctgccgaacaacacggcgagctggtttactgcgcttacccaacacggtaaagaagacttaaaattcccgcgtggccagggcgtcccgatcaacactaactcttccccggatgatcagattggttattaccgcagagcaactcgtcggattcgcggcggcgacggtaaaatgaaagatttgtctccgcgttggtacttttactatctcggcaccggtccggaagctggactgccctacggggcaaacaaggacgggatcatttgggtggctaccgaaggtgccctgaatactccaaaagatcatatcggcacccgtaaccctgctaataacgctgcgatcgttctgcaactgcctcagggtacaactctgccaaaaggcttctatgcagaagggtcgcgtggtggcagccaggcgagtagccgtagcagctcccgctctcgcaactcgtcccgtaactccactccgggctcttctcgcggcacgtccccggctcgtatggcaggtaacggtggtgacgctgctctggcgctgctactgctggacaggctgaaccagctggagtcgaagatgagtggtaaaggccaacagcagcagggccagaccgttaccaaaaagagcgcagctgaagcatctaaaaaaccgcgacagaaacgtaccgcgactaaagcgtacaatgtaacacaggccttcggtcgtcgaggtccggagcaaactcaaggaaactttggcgatcaggaattaatccgccaggggaccgactacaaacactggccgcaaattgcccagttcgccccatccgctagtgcattcttcggtatgagccgcatcggcatggaaggtacgccaagtggtacgtggctgacctacaccggtgctatcaagcttgatgacaaggacccgaactttaaagaccaggttattctgcttaacaaacatattgatgcctataaaactttcccgccgaccgaacccaaaaaggacaaaaagaaaaaagctgatgaaacccaggctctaccgcagcgtcagaaaaaacagcaaactgtgactctgctgccagctgcggacctggatgatttttccaagcagctgcaacagtctatgagctctgcggactctacgcaggcttaa

SEQ ID NO: 213 - DNA, 2016 bp, Artificial Sequence
  Description of Artificial Sequence: Synthetic polynucleotide
atgcaccatcatcaccatcatggtggttctggttcgccgatacttggttattggaagattaaaggactggttcagcccacacgcctcctgctagaatacttagaggaaaaatatgaagagcacctgtacgaacgtgatgagggggacaaatggcgaaacaagaaatttgaattgggcttagaatttccaaatttgccgtattatatcgatggcgacgtaaaactgacccaatcaatggccattattcgctacatcgcagataaacataacatgctgggtggctgccctaaagaacgggctgagatctccatgctggaaggtgcggtgctcgacattcgctacggcgtcagtagaattgcgtatagcaaggatttcgaaactttaaaagtggatttcctgagcaaacttccggagatgctgaaaatgtttgaggataggctttgtcataagacgtatctcaatggtgatcatgttacccacccggactttatgctgtacgacgcccttgatgtcgttctgtatatggatcccatgtgcctggacgccttcccgaaattagtgtgttttaaaaaacgtatcgaagcgattccacagatcgataaatacttgaagtcttctaaatatattgcttggcctctgcaaggctggcaggcaacgttcggtgggggagatcatccgccaaaatcagatctggtgccgcgtgggagccctggcatacaccgcgacggtggttctggtgagaacctgtactttcaaagctcagataatgggcctcaaaaccagcgcaacgctccacgtataaccttcggtggcccgtctgactccacaggcagcaaccagaatggtgagcgtagtggagccaggtctaagcagcgccgtccccagggtctgccgaacaacacggcgagctggtttactgcgcttacccaacacggtaaagaagacttaaaattcccgcgtggccagggcgtcccgatcaacactaactcttccccggatgatcagattggttattaccgcagagcaactcgtcggtggcgcggcggcgacggtaaaatgaaagatttgtctccgcgttggtacttttactatctcggcaccggtccggaagctggactgccctacggggcaaacaaggacgggatcatttgggtggctaccgaaggtgccctgaatactccaaaagatcatatcggcacccgtaaccctgctaataacgctgcgatcgttctgcaactgcctcagggtacaactctgccaaaaggcttctatgcagaagggtcgcgtggtggcagccaggcgagtagccgtagcagctcccgctctcgcaactcgtcccgtaactccactccgggctcttctcgcggcacgtccccggctcgtatggcaggtaacggtggtgacgctgctctggcgctgctactgctggacaggctgaaccagctggagtcgaagatgagtggtaaaggccaacagcagcagggccagaccgttaccaaaaagagcgcagctgaagcatctaaaaaaccgcgacagaaacgtaccgcgactaaagcgtacaatgtaacacaggccttcggtcgtcgaggtccggagcaaactcaaggaaactttggcgatcaggaattaatccgccaggggaccgactacaaacactggccgcaaattgcccagttcgccccatccgctagtgcattcttcggtatgagccgcatcggcatggaagtaacgccaagtggtacgtggctgacctacaccggtgctatcaagcttgatgacaaggacccgaactttaaagaccaggttattctgcttaacaaacatattgatgcctataaaactttcccgccgaccgaacccaaaaaggacaaaaagaaaaaagctgatgaaacccaggctctaccgcagcgtcagaaaaaacagcaaactgtgactctgctgccagctgcggacctggatgatttttccaagcagctgcaacagtctatgagctctgcggactctacgcaggcttaa

SEQ ID NO: 214 - DNA, 2016 bp, Artificial Sequence
  Description of Artificial Sequence: Synthetic polynucleotide
atgcaccatcatcaccatcatggtggttctggttcgccgatacttggttattggaagattaaaggactggttcagcccacacgcctcctgctagaatacttagaggaaaaatatgaagagcacctgtacgaacgtgatgagggggacaaatggcgaaacaagaaatttgaattgggcttagaatttccaaatttgccgtattatatcgatggcgacgtaaaactgacccaatcaatggccattattcgctacatcgcagataaacataacatgctgggtggctgccctaaagaacgggctgagatctccatgctggaaggtgcggtgctcgacattcgctacggcgtcagtagaattgcgtatagcaaggatttcgaaactttaaaagtggatttcctgagcaaacttccggagatgctgaaaatgtttgaggataggctttgtcataagacgtatctcaatggtgatcatgttacccacccggactttatgctgtacgacgcccttgatgtcgttctgtatatggatcccatgtgcctggacgccttcccgaaattagtgtgttttaaaaaacgtatcgaagcgattccacagatcgataaatacttgaagtcttctaaatatattgcttggcctctgcaaggctggcaggcaacgttcggtgggggagatcatccgccaaaatcagatctggtgccgcgtgggagccctggcatacaccgcgacggtggttctggtgagaacctgtactttcaaagctcagataatgggcctcaaaaccagcgcaacgctccacgtataaccttcggtggcccgtctgactccacaggcagcaaccagaatggtgagcgtagtggagccaggtctaagcagcgccgtccccagggtctgccgaacaacacggcgagctggtttactggccttacccaatttggtaaagaagacttaaaattcccgccgggccagggcgtcccgatcaacactaactcttccccggatgatcagattggttattaccgcagagcaactcgtcggattcgcggcggcgacggtaaaatgaaagatttgcccccgcgttggtacttttactatctcggcaccggtccgcacgctgatctgccctacgggcaaaagcagcctggggtagtgtgggtggctcgaccaggtgccctgaatactccaaaagatcatatcggcacccgtaaccctgctaataacgctgcgatcccgctgcaactgcctcctggtacaaaactgccaaaaggcttctatgcagaagggtcgcgtggtggcagccaggcgagtagccgtagcagctcccgctctcgcaactcgtcccgtaactccactccgggctcttctcgcggcacgtccccggctcgtatggcaggtaacggtggtgacgctgctctggcgctgctactgctggacaggctgaaccagctggagtcgaagatgagtggtaaaggccaacagcagcagggccagaccgttaccaaaaagagcgcagctgaagcatctaaaaaaccgcgacagaaacgtaccgcgactaaagcgtacaatgtaacacaggccttcggtcgtcgaggtccggagcaaactcaaggaaactttggcgatcaggaattaatccgccaggggaccgactacaaacactggccgcaaattgcccagttcgccccatccgctagtgcattcttcggtatgagccgcatcggcatggaagtaacgccaagtggtacgtggctgacctacaccggtgctatcaagcttgatgacaaggacccgaactttaaagaccaggttattctgcttaacaaacatattgatgcctataaaactttcccgccgaccgaacccaaaaaggacaaaaagaaaaaagctgatgaaacccaggctctaccgcagcgtcagaaaaaacagcaaactgtgactctgctgccagctgcggacctggatgatttttccaagcagctgcaacagtctatgagctctgcggactctacgcaggcttaa

SEQ ID NO: 215 - DNA, 2016 bp, Artificial Sequence
  Description of Artificial Sequence: Synthetic polynucleotide
atgcaccatcatcaccatcatggtggttctggttcgccgatacttggttattggaagattaaaggactggttcagcccacacgcctcctgctagaatacttagaggaaaaatatgaagagcacctgtacgaacgtgatgagggggacaaatggcgaaacaagaaatttgaattgggcttagaatttccaaatttgccgtattatatcgatggcgacgtaaaactgacccaatcaatggccattattcgctacatcgcagataaacataacatgctgggtggctgccctaaagaacgggctgagatctccatgctggaaggtgcggtgctcgacattcgctacggcgtcagtagaattgcgtatagcaaggatttcgaaactttaaaagtggatttcctgagcaaacttccggagatgctgaaaatgtttgaggataggctttgtcataagacgtatctcaatggtgatcatgttacccacccggactttatgctgtacgacgcccttgatgtcgttctgtatatggatcccatgtgcctggacgccttcccgaaattagtgtgttttaaaaaacgtatcgaagcgattccacagatcgataaatacttgaagtcttctaaatatattgcttggcctctgcaaggctggcaggcaacgttcggtgggggagatcatccgccaaaatcagatctggtgccgcgtgggagccctggcatacaccgcgacggtggttctggtgagaacctgtactttcaaagctcagataatgggcctcaaaaccagcgcaacgctccacgtataaccttcggtggcccgtctgactccacaggcagcaaccagaatggtgagcgtagtggagccaggtctaagcagcgccgtccccagggtctgccgaacaacacggcgagctggtttactgcgcttacccaacacggtaaagaagacttaaaattcccgcgtggccagggcgtcccgatcaacactaactcttccccggatgatcagattggttattaccgcagagcaactcgtcggattcgcggcggcgacggtaaaatgaaagatttgtctccgcgttggtacttttactatctcggcaccggtccggaagctggactgccctacggggcaaacaaggacgggatcatttgggtggctaccgaaggtgccctgaatactccaaaagatcatatcggcacccgtaaccctgctaataacgctgcgatcgttctgcaactgcctcagggtacaactctgccaaaaggcttctatgcagaagggtcgcgtggtggcagccaggcgagtagccgtagcagctcccgctctcgcaactcgtcccgtaactccactccgggctcttctcgcggcacgtccccggctcgtatggcaggtaacggtggtgacgctgctctggcgctgctactgctggacaggctgaaccagctggagtcgaagatgagtggtaaaggccaacagcagcagggccagaccgttaccaaaaagagcgcagctgaagcatctaaaaaaccgcgacagaaacgtaccgcgactaaagagtacaatgtaacacaggccttcggtcgtcgaggtccggagcaaactcaaggaaactttggcgatcaggaattaatccgccaggggaccgactacaaacactggccgcaaattgcccagttcgccccatccgctagtgcattcttcggtatgagccgcatcggcatggaagtaacgccaagtggtacgtggctgacctacaccggtgctatcaagcttgatgacaaggacccgaactttaaagaccaggttattctgcttaacaaacatattgatgcctataaaactttcccgccgaccgaacccaaaaaggacaaaaagaaaaaagctgatgaaacccaggctctaccgcagcgtcagaaaaaacagcaaactgtgactctgctgccagctgcggacctggatgatttttccaagcagctgcaacagtctatgagctctgcggactctacgcaggcttaa

SEQ ID NO: 216 - DNA, 2016 bp, Artificial Sequence
  Description of Artificial Sequence: Synthetic polynucleotide
atgcaccatcatcaccatcatggtggttctggttcgccgatacttggttattggaagattaaaggactggttcagcccacacgcctcctgctagaatacttagaggaaaaatatgaagagcacctgtacgaacgtgatgagggggacaaatggcgaaacaagaaatttgaattgggcttagaatttccaaatttgccgtattatatcgatggcgacgtaaaactgacccaatcaatggccattattcgctacatcgcagataaacataacatgctgggtggctgccctaaagaacgggctgagatctccatgctggaaggtgcggtgctcgacattcgctacggcgtcagtagaattgcgtatagcaaggatttcgaaactttaaaagtggatttcctgagcaaacttccggagatgctgaaaatgtttgaggataggctttgtcataagacgtatctcaatggtgatcatgttacccacccggactttatgctgtacgacgcccttgatgtcgttctgtatatggatcccatgtgcctggacgccttcccgaaattagtgtgttttaaaaaacgtatcgaagcgattccacagatcgataaatacttgaagtcttctaaatatattgcttggcctctgcaaggctggcaggcaacgttcggtgggggagatcatccgccaaaatcagatctggtgccgcgtgggagccctggcatacaccgcgacggtggttctggtgagaacctgtactttcaaagctcagataatgggcctcaaaaccagcgcaacgctccacgtataaccttcggtggcccgtctgactccacaggcagcaaccagaatggtgagcgtagtggagccaggtctaagcagcgccgtccccagggtctgccgaacaacacggcgagctggtttactggccttacccaaaaaggtaaagaagacttaaaattcccgccaggccagggcgtcccgatcaacactaactcttccccggatgatcagattggttattaccgcagagcaactcgtcggattcgcggcggcgacggtaaaatgaaagatttgcccccgcgttggtacttttactatctcggcaccggtccgcatgctgacctgccctacgggcaaaagcaagacggggtgttttgggtggctcgccctggtgccctgaatactccaaaagatcatatcggcacccgtaaccctgctaataacgctgcgatcccgctgcaactgcctccaggtacaaaactgccaaaaggcttctatgcagaagggtcgcgtggtggcagccaggcgagtagccgtagcagctcccgctctcgcaactcgtcccgtaactccactccgggctcttctcgcggcacgtccccggctcgtatggcaggtaacggtggtgacgctgctctggcgctgctactgctggacaggctgaaccagctggagtcgaagatgagtggtaaaggccaacagcagcagggccagaccgttaccaaaaagagcgcagctgaagcatctaaaaaaccgcgacagaaacgtaccgcgactaaagcgtacaatgtaacacaggccttcggtcgtcgaggtccggagcaaactcaaggaaactttggcgatcaggaattaatccgccaggggaccgactacaaacactggccgcaaattgcccagttcgccccatccgctagtgcattcttcggtatgagccgcatcggcatggaagtaacgccaagtggtacgtggctgacctacaccggtgctatcaagcttgatgacaaggacccgaactttaaagaccaggttattctgcttaacaaacatattgatgcctataaaactttcccgccgaccgaacccaaaaaggacaaaaagaaaaaagctgatgaaacccaggctctaccgcagcgtcagaaaaaacagcaaactgtgactctgctgccagctgcggacctggatgatttttccaagcagctgcaacagtctatgagctctgcggactctacgcaggcttaa

SEQ ID NO: 217 - DNA, 2016 bp, Artificial Sequence
  Description of Artificial Sequence: Synthetic polynucleotide
atgcaccatcatcaccatcatggtggttctggttcgccgatacttggttattggaagattaaaggactggttcagcccacacgcctcctgctagaatacttagaggaaaaatatgaagagcacctgtacgaacgtgatgagggggacaaatggcgaaacaagaaatttgaattgggcttagaatttccaaatttgccgtattatatcgatggcgacgtaaaactgacccaatcaatggccattattcgctacatcgcagataaacataacatgctgggtggctgccctaaagaacgggctgagatctccatgctggaaggtgcggtgctcgacattcgctacggcgtcagtagaattgcgtatagcaaggatttcgaaactttaaaagtggatttcctgagcaaacttccggagatgctgaaaatgtttgaggataggctttgtcataagacgtatctcaatggtgatcatgttacccacccggactttatgctgtacgacgcccttgatgtcgttctgtatatggatcccatgtgcctggacgccttcccgaaattagtgtgttttaaaaaacgtatcgaagcgattccacagatcgataaatacttgaagtcttctaaatatattgcttggcctctgcaaggctggcaggcaacgttcggtgggggagatcatccgccaaaatcagatctggtgccgcgtgggagccctggcatacaccgcgacggtggttctggtgagaacctgtactttcaaagctcagataatgggcctcaaaaccagcgcaacgctccacgtataaccttcggtggcccgtctgactccacaggcagcaaccagaatggtgagcgtagtggagccaggtctaagcagcgccgtccccagggtctgccgaacaacacggcgagctggtttactgcgcttacccaacacggtaaagaagacttaaaattcccgcgtggccagggcgtcccgatcaacactaactcttccccggatgatcagattggttattaccgcagagcaactcgtcggattcgcggcggcgacggtaaaatgaaagatttgtctccgcgttggtacttttactatctcggcaccggtccggaagctggactgccctacggggcaaacaaggacgggatcatttgggtggctaccgaaggtgccctgaatactccaaaagatcatatcggcacccgtaaccctgctaataacgctgcgatcgttctgcaactgcctcagggtacaactctgccaaaaggcttctatgcagaagggtcgcgtggtggcagccaggcgagtagccgtagcagctcccgctctcgcaactcgtcccgtaactccactccgggctcttctcgcggcacgtccccggctcgtatggcaggtaacggtggtgacgctgctctggcgctgctactgctggacaggctgaaccagctggagtcgaagatgagtggtaaaggccaacagcagcagggccagaccgttaccaaaaagagcgcagctgaagcatctaaaaaaccgcgacagaaacgtaccgcgactaaagcgtacaatgtaacacaggccttcggtcgtcgaggtccggagcaaactcaaggaaactttggcgatcttgaattaatccgccaggggaccgactacaaacactggccgcaaattgcccagttcgccccatccgctagtgcattcttcggtatgagccgcatcggcatggaagtaacgccaagtggtacgtggctgacctacaccggtgctatcaagcttgatgacaaggacccgaactttaaagaccaggttattctgcttaacaaacatattgatgcctataaaactttcccgccgaccgaacccaaaaaggacaaaaagaaaaaagctgatgaaacccaggctctaccgcagcgtcagaaaaaacagcaaactgtgactctgctgccagctgcggacctggatgatttttccaagcagctgcaacagtctatgagctctgcggactctacgcaggcttaa

SEQ ID NO: 218 - DNA, 2016 bp, Artificial Sequence
  Description of Artificial Sequence: Synthetic polynucleotide
atgcaccatcatcaccatcatggtggttctggttcgccgatacttggttattggaagattaaaggactggttcagcccacacgcctcctgctagaatacttagaggaaaaatatgaagagcacctgtacgaacgtgatgagggggacaaatggcgaaacaagaaatttgaattgggcttagaatttccaaatttgccgtattatatcgatggcgacgtaaaactgacccaatcaatggccattattcgctacatcgcagataaacataacatgctgggtggctgccctaaagaacgggctgagatctccatgctggaaggtgcggtgctcgacattcgctacggcgtcagtagaattgcgtatagcaaggatttcgaaactttaaaagtggatttcctgagcaaacttccggagatgctgaaaatgtttgaggataggctttgtcataagacgtatctcaatggtgatcatgttacccacccggactttatgctgtacgacgcccttgatgtcgttctgtatatggatcccatgtgcctggacgccttcccgaaattagtgtgttttaaaaaacgtatcgaagcgattccacagatcgataaatacttgaagtcttctaaatatattgcttggcctctgcaaggctggcaggcaacgttcggtgggggagatcatccgccaaaatcagatctggtgccgcgtgggagccctggcatacaccgcgacggtggttctggtgagaacctgtactttcaaagctcagataatgggcctcaaaaccagcgcaacgctccacgtataaccttcggtggcccgtctgactccacaggcagcaaccagaatggtgagcgtagtggagccaggtctaagcagcgccgtccccagggtctgccgaacaacacggcgagctggtttactgcgcttacccaacacggtaaagaagacttaaaattcccgcgtggccagggcgtcccgatcaacactaactcttccccggatgatcagattggttattaccgcagagcaactcgtcggattcgcggcggcgacggtaaaatgaaagatttgtctccgcgttggtacttttactatctcggcaccggtccggaagctggactgccctacggggcaaacaaggacgggatcatttgggtggctaccgaaggtgccctgaatactccaaaagatcatatcggcacccgtaaccctgctaataacgctgcgatcgttctgcaactgcctcagggtacaactctgccaaaaggcttctatgcagaagggtcgcgtggtggcagccaggcgagtagccgtagcagctcccgctctcgcaactcgtcccgtaactccactccgggctcttctcgcggcacgtccccggctcgtatggcaggtaacggtggtgacgctgctctggcgctgctactgctggacaggctgaaccagctggagtcgaagatgagtggtaaaggccaacagcagcagggccagaccgttaccaaaaagagcgcagctgaagcatctaaaaaaccgcgacagaaacgtaccgcgactaaagcgtacaatgtaacacaggccttcggtcgtcgaggtccggagcaaactcaaggaaactttggcgatcaggaattaatccgccagggggtggactacaaacactggccgcaaattgcccagttcgccccatccgctagtgcattcttcggtatgagccgcatcggcatggaagtaacgccaagtggtacgtggctgacctacaccggtgctatcaagcttgatgacaaggacccgaactttaaagaccaggttattctgcttaacaaacatattgatgcctataaaactttcccgccgaccgaacccaaaaaggacaaaaagaaaaaagctgatgaaacccaggctctaccgcagcgtcagaaaaaacagcaaactgtgactctgctgccagctgcggacctggatgatttttccaagcagctgcaacagtctatgagctctgcggactctacgcaggcttaa

SEQ ID NO: 219 - DNA, 2016 bp, Artificial Sequence
  Description of Artificial Sequence: Synthetic polynucleotide
atgcaccatcatcaccatcatggtggttctggttcgccgatacttggttattggaagattaaaggactggttcagcccacacgcctcctgctagaatacttagaggaaaaatatgaagagcacctgtacgaacgtgatgagggggacaaatggcgaaacaagaaatttgaattgggcttagaatttccaaatttgccgtattatatcgatggcgacgtaaaactgacccaatcaatggccattattcgctacatcgcagataaacataacatgctgggtggctgccctaaagaacgggctgagatctccatgctggaaggtgcggtgctcgacattcgctacggcgtcagtagaattgcgtatagcaaggatttcgaaactttaaaagtggatttcctgagcaaacttccggagatgctgaaaatgtttgaggataggctttgtcataagacgtatctcaatggtgatcatgttacccacccggactttatgctgtacgacgcccttgatgtcgttctgtatatggatcccatgtgcctggacgccttcccgaaattagtgtgttttaaaaaacgtatcgaagcgattccacagatcgataaatacttgaagtcttctaaatatattgcttggcctctgcaaggctggcaggcaacgttcggtgggggagatcatccgccaaaatcagatctggtgccgcgtgggagccctggcatacaccgcgacggtggttctggtgagaacctgtactttcaaagctcagataatgggcctcaaaaccagcgcaacgctccacgtataaccttcggtggcccgtctgactccacaggcagcaaccagaatggtgagcgtagtggagccaggtctaagcagcgccgtccccagggtctgccgaacaacacggcgagctggtttactgcgcttacccaacacggtaaagaagacttaaaattcccgcgtggccagggcgtcccgatcaacactaactcttccccggatgatcagattggttattaccgcagagcaactcgtcggattcgcggcggcgacggtaaaatgaaagatttgtctccgcgttggtacttttactatctcggcaccggtccggaagctggactgccctacggggcaaacaaggacgggatcatttgggtggctaccgaaggtgccctgaatactccaaaagatcatatcggcacccgtaaccctgctaataacgctgcgatccatctgcaactgcctcagggtacaactctgccaaaaggcttctatgcagaagggtcgcgtggtggcagccaggcgagtagccgtagcagctcccgctctcgcaactcgtcccgtaactccactccgggctcttctcgcggcacgtccccggctcgtatggcaggtaacggtggtgacgctgctctggcgctgctactgctggacaggctgaaccagctggagtcgaagatgagtggtaaaggccaacagcagcagggccagaccgttaccaaaaagagcgcagctgaagcatctaaaaaaccgcgacagaaacgtaccgcgactaaagcgtacaatgtaacacaggccttcggtcgtcgaggtccggagcaaactcaaggaaactttggcgatcaggaattaatccgccaggggaccgactacaaacactggccgcaaattgcccagttcgccccatccgctagtgcattcttcggtatgagccgcatcggcatggaagtaacgccaagtggtacgtggctgacctacaccggtgctatcaagcttgatgacaaggacccgaactttaaagaccaggttattctgcttaacaaacatattgatgcctataaaactttcccgccgaccgaacccaaaaaggacaaaaagaaaaaagctgatgaaacccaggctctaccgcagcgtcagaaaaaacagcaaactgtgactctgctgccagctgcggacctggatgatttttccaagcagctgcaacagtctatgagctctgcggactctacgcaggcttaa

SEQ ID NO: 220 - DNA, 2016 bp, Artificial Sequence
  Description of Artificial Sequence: Synthetic polynucleotide
atgcaccatcatcaccatcatggtggttctggttcgccgatacttggttattggaagattaaaggactggttcagcccacacgcctcctgctagaatacttagaggaaaaatatgaagagcacctgtacgaacgtgatgagggggacaaatggcgaaacaagaaatttgaattgggcttagaatttccaaatttgccgtattatatcgatggcgacgtaaaactgacccaatcaatggccattattcgctacatcgcagataaacataacatgctgggtggctgccctaaagaacgggctgagatctccatgctggaaggtgcggtgctcgacattcgctacggcgtcagtagaattgcgtatagcaaggatttcgaaactttaaaagtggatttcctgagcaaacttccggagatgctgaaaatgtttgaggataggctttgtcataagacgtatctcaatggtgatcatgttacccacccggactttatgctgtacgacgcccttgatgtcgttctgtatatggatcccatgtgcctggacgccttcccgaaattagtgtgttttaaaaaacgtatcgaagcgattccacagatcgataaatacttgaagtcttctaaatatattgcttggcctctgcaaggctggcaggcaacgttcggtgggggagatcatccgccaaaatcagatctggtgccgcgtgggagccctggcatacaccgcgacggtggttctggtgagaacctgtactttcaaagctcagataatgggcctcaaaaccagcgcaacgctccacgtataaccttcggtggcccgtctgactccacaggcagcaaccagaatggtgagcgtagtggagccaggtctaagcagcgccgtccccagggtctgccgaacaacacggcgagctggtttactgcgcttacccaacacggtaaagaagacttaaaattcccgcgtggccagggcgtcccgatcaacactaactcttccccggatgatcagattggttattaccgcagagcaactcgtcggattcgcggcggcgacggtaaaatgaaagatttgtctccgcgttggtacttttactatctcggcaccggtccggaagctggactgccctacggggcaaacaaggacgggatcatttgggtggctaccgaaggtgccctgaatactccaaaagatcatatcggcacccgtaaccctgctaataacgctgcgatcgttctgcaactgcctcagggtacaactctgccaaaaggcttctatgcagaagggtcgcgtggtggcagccaggcgagtagccgtagcagctcccgctctcgcaactcgtcccgtaactccactccgggctcttctcgcggcacgtccccggctcgtatggcaggtaacggtggtgacgctgctctggcgctgctactgctggacaggctgaaccagctggagtcgaagatgagtggtaaaggccaacagcagcagggccagaccgttaccaaaaagagcgcagctgaagcatctaaaaaaccgcgacagaaacgtaccgcgactaaagggtacaatgtaacacaggccttcggtcgtcgaggtccggagcaaactcaaggaaactttggcgatcaggatttaatcaaattagggaccgactacaaacactggccgcaaattgcccagttcgccccatccgctagtgcattcttcggtatgagccgcatctcgatggaagaaacgccaagtggtacgtggctgacctacaccggtgctatcaagcttgataaaaaggacccgaactttaaagaccaggttattctgcttaacaaacatattgatgcctataaaactttcccgccgaccgaacccaaaaaggacaaaaagaaaaaagctgatgaaacccaggctctaccgcagcgtcagaaaaaacagcaaactgtgactctgctgccagctgcggacctggatgatttttccaagcagctgcaacagtctatgagctctgcggactctacgcaggcttaa

SEQ ID NO: 221 - DNA, 2016 bp, Artificial Sequence
  Description of Artificial Sequence: Synthetic polynucleotide
atgcaccatcatcaccatcatggtggttctggttcgccgatacttggttattggaagattaaaggactggttcagcccacacgcctcctgctagaatacttagaggaaaaatatgaagagcacctgtacgaacgtgatgagggggacaaatggcgaaacaagaaatttgaattgggcttagaatttccaaatttgccgtattatatcgatggcgacgtaaaactgacccaatcaatggccattattcgctacatcgcagataaacataacatgctgggtggctgccctaaagaacgggctgagatctccatgctggaaggtgcggtgctcgacattcgctacggcgtcagtagaattgcgtatagcaaggatttcgaaactttaaaagtggatttcctgagcaaacttccggagatgctgaaaatgtttgaggataggctttgtcataagacgtatctcaatggtgatcatgttacccacccggactttatgctgtacgacgcccttgatgtcgttctgtatatggatcccatgtgcctggacgccttcccgaaattagtgtgttttaaaaaacgtatcgaagcgattccacagatcgataaatacttgaagtcttctaaatatattgcttggcctctgcaaggctggcaggcaacgttcggtgggggagatcatccgccaaaatcagatctggtgccgcgtgggagccctggcatacaccgcgacggtggttctggtgagaacctgtactttcaaagctcagataatgggcctcaaaaccagcgcaacgctccacgtataaccttcggtggcccgtctgactccacaggcagcaaccagaatggtgagcgtagtggagccaggtctaagcagcgccgtccccagggtctgccgaacaacacggcgagctggtttactgcgcttacccaacacggtaaagaagacttaaaattcccgcgtggccagggcgtcccgatcaacactaactcttccccggatgatcagattggttattaccgcagagcaactcgtcggattcgcggcggcgacggtaaaatgaaagatttgtctccgcgttggtacttttactatctcggcaccggtccggaagctggactgccctacggggcaaacaaggacgggatcatttgggtggctaccgaaggtgccctgaatactccaaaagatcatatcggcacccgtaaccctgctaataacgctgcgatcgttctgcaactgcctcagggtacaactctgccaaaaggcttctatgcagaagggtcgcgtggtggcagccaggcgagtagccgtagcagctcccgctctcgcaactcgtcccgtaactccactccgggctcttctcgcggcacgtccccggctcgtatggcaggtaacggtggtgacgctgctctggcgctgctactgctggacaggctgaaccagctggagtcgaagatgagtggtaaaggccaacagcagcagggccagaccgttaccaaaaagagcgcagctgaagcatctaaaaaaccgcgacagaaacgtaccgcgactaaagcgtacaatgtaacacaggccttcggtcgtcgaggtccggagcaaactcaaggaaactttggcgatcaggaattaatccgccaggggaccgactacaaacactggccgcaaattgcccagttcgccccatccgctagtgcattcttcggtatgagccgcatcggcatggaagtaacgccaagtggtacgtggctgacctacaccggtgctatcaagcttgatgacaaggacccgaactttgatgaccaggttattctgcttaacaaacatattgatgcctataaaactttcccgccgaccgaacccaaaaaggacaaaaagaaaaaagctgatgaaacccaggctctaccgcagcgtcagaaaaaacagcaaactgtgactctgctgccagctgcggacctggatgatttttccaagcagctgcaacagtctatgagctctgcggactctacgcaggcttaa

SEQ ID NO: 222 - DNA, 2016 bp, Artificial Sequence
  Description of Artificial Sequence: Synthetic polynucleotide
atgcaccatcatcaccatcatggtggttctggttcgccgatacttggttattggaagattaaaggactggttcagcccacacgcctcctgctagaatacttagaggaaaaatatgaagagcacctgtacgaacgtgatgagggggacaaatggcgaaacaagaaatttgaattgggcttagaatttccaaatttgccgtattatatcgatggcgacgtaaaactgacccaatcaatggccattattcgctacatcgcagataaacataacatgctgggtggctgccctaaagaacgggctgagatctccatgctggaaggtgcggtgctcgacattcgctacggcgtcagtagaattgcgtatagcaaggatttcgaaactttaaaagtggatttcctgagcaaacttccggagatgctgaaaatgtttgaggataggctttgtcataagacgtatctcaatggtgatcatgttacccacccggactttatgctgtacgacgcccttgatgtcgttctgtatatggatcccatgtgcctggacgccttcccgaaattagtgtgttttaaaaaacgtatcgaagcgattccacagatcgataaatacttgaagtcttctaaatatattgcttggcctctgcaaggctggcaggcaacgttcggtgggggagatcatccgccaaaatcagatctggtgccgcgtgggagccctggcatacaccgcgacggtggttctggtgagaacctgtactttcaaagctcagataatgggcctcaaaaccagcgcaacgctccacgtataaccttcggtggcccgtctgactccacaggcagcaaccagaatggtgagcgtagtggagccaggtctaagcagcgccgtccccagggtctgccgaacaacacggcgagctggtttactgcgcttacccaacacggtaaagaagacttaaaattcccgcgtggccagggcgtcccgatcaacactaactcttccccggatgatcagattggttattaccgcagagcaactcgtcggattcgcggcggcgacggtaaaatgaaagatttgtctccgcgttggtacttttactatctcggcaccggtccggaagctggactgccctttggggcaaacaaggacgggatcatttgggtggctaccgaaggtgccctgaatactccaaaagatcatatcggcacccgtaaccctgctaataacgctgcgatcgttctgcaactgcctcagggtacaactctgccaaaaggcttctatgcagaagggtcgcgtggtggcagccaggcgagtagccgtagcagctcccgctctcgcaactcgtcccgtaactccactccgggctcttctcgcggcacgtccccggctcgtatggcaggtaacggtggtgacgctgctctggcgctgctactgctggacaggctgaaccagctggagtcgaagatgagtggtaaaggccaacagcagcagggccagaccgttaccaaaaagagcgcagctgaagcatctaaaaaaccgcgacagaaacgtaccgcgactaaagcgtacaatgtaacacaggccttcggtcgtcgaggtccggagcaaactcaaggaaactttggcgatcaggaattaatccgccaggggaccgactacaaacactggccgcaaattgcccagttcgccccatccgctagtgcattcttcggtatgagccgcatcggcatggaagtaacgccaagtggtacgtggctgacctacaccggtgctatcaagcttgatgacaaggacccgaactttaaagaccaggttattctgcttaacaaacatattgatgcctataaaactttcccgccgaccgaacccaaaaaggacaaaaagaaaaaagctgatgaaacccaggctctaccgcagcgtcagaaaaaacagcaaactgtgactctgctgccagctgcggacctggatgatttttccaagcagctgcaacagtctatgagctctgcggactctacgcaggcttaa

SEQ ID NO: 223 - DNA, 2016 bp, Artificial Sequence
  Description of Artificial Sequence: Synthetic polynucleotide
atgcaccatcatcaccatcatggtggttctggttcgccgatacttggttattggaagattaaaggactggttcagcccacacgcctcctgctagaatacttagaggaaaaatatgaagagcacctgtacgaacgtgatgagggggacaaatggcgaaacaagaaatttgaattgggcttagaatttccaaatttgccgtattatatcgatggcgacgtaaaactgacccaatcaatggccattattcgctacatcgcagataaacataacatgctgggtggctgccctaaagaacgggctgagatctccatgctggaaggtgcggtgctcgacattcgctacggcgtcagtagaattgcgtatagcaaggatttcgaaactttaaaagtggatttcctgagcaaacttccggagatgctgaaaatgtttgaggataggctttgtcataagacgtatctcaatggtgatcatgttacccacccggactttatgctgtacgacgcccttgatgtcgttctgtatatggatcccatgtgcctggacgccttcccgaaattagtgtgttttaaaaaacgtatcgaagcgattccacagatcgataaatacttgaagtcttctaaatatattgcttggcctctgcaaggctggcaggcaacgttcggtgggggagatcatccgccaaaatcagatctggtgccgcgtgggagccctggcatacaccgcgacggtggttctggtgagaacctgtactttcaaagctcagataatgggcctcaaaaccagcgcaacgctccacgtataaccttcggtggcccgtctgactccacaggcagcaaccagaatggtgagcgtagtggagccaggtctaagcagcgccgtccccagggtctgccgaacaacacggcgagctggtttactgcgcttacccaacacggtaaagaagacttaaaattcccgcgtggccagggcattccgatcaacactaactcttccccggatgatcagattggttattaccgcagagcaactcgtcggattcgcggcggcgacggtaaaatgaaagatttgtctccgcgttggtacttttactatctcggcaccggtccggaagctggactgccctacggggcaaacaaggacgggatcatttgggtggctaccgaaggtgccctgaatactccaaaagatcatatcggcacccgtaaccctgctaataacgctgcgatcgttctgcaactgcctcagggtacaactctgccaaaaggcttctatgcagaagggtcgcgtggtggcagccaggcgagtagccgtagcagctcccgctctcgcaactcgtcccgtaactccactccgggctcttctcgcggcacgtccccggctcgtatggcaggtaacggtggtgacgctgctctggcgctgctactgctggacaggctgaaccagctggagtcgaagatgagtggtaaaggccaacagcagcagggccagaccgttaccaaaaagagcgcagctgaagcatctaaaaaaccgcgacagaaacgtaccgcgactaaagcgtacaatgtaacacaggccttcggtcgtcgaggtccggagcaaactcaaggaaactttggcgatcaggaattaatccgccaggggaccgactacaaacactggccgcaaattgcccagttcgccccatccgctagtgcattcttcggtatgagccgcatcggcatggaagtaacgccaagtggtacgtggctgacctacaccggtgctatcaagcttgatgacaaggacccgaactttaaagaccaggttattctgcttaacaaacatattgatgcctataaaactttcccgccgaccgaacccaaaaaggacaaaaagaaaaaagctgatgaaacccaggctctaccgcagcgtcagaaaaaacagcaaactgtgactctgctgccagctgcggacctggatgatttttccaagcagctgcaacagtctatgagctctgcggactctacgcaggcttaa

SEQ ID NO: 224 - DNA, 2016 bp, Artificial Sequence
  Description of Artificial Sequence: Synthetic polynucleotide
atgcaccatcatcaccatcatggtggttctggttcgccgatacttggttattggaagattaaaggactggttcagcccacacgcctcctgctagaatacttagaggaaaaatatgaagagcacctgtacgaacgtgatgagggggacaaatggcgaaacaagaaatttgaattgggcttagaatttccaaatttgccgtattatatcgatggcgacgtaaaactgacccaatcaatggccattattcgctacatcgcagataaacataacatgctgggtggctgccctaaagaacgggctgagatctccatgctggaaggtgcggtgctcgacattcgctacggcgtcagtagaattgcgtatagcaaggatttcgaaactttaaaagtggatttcctgagcaaacttccggagatgctgaaaatgtttgaggataggctttgtcataagacgtatctcaatggtgatcatgttacccacccggactttatgctgtacgacgcccttgatgtcgttctgtatatggatcccatgtgcctggacgccttcccgaaattagtgtgttttaaaaaacgtatcgaagcgattccacagatcgataaatacttgaagtcttctaaatatattgcttggcctctgcaaggctggcaggcaacgttcggtgggggagatcatccgccaaaatcagatctggtgccgcgtgggagccctggcatacaccgcgacggtggttctggtgagaacctgtactttcaaagctcagataatgggcctcaaaaccagcgcaacgctccacgtataaccttcggtggcccgtctgactccacaggcagcaaccagaatggtgagcgtagtggagccaggtctaagcagcgccgtccccagggtctgccgaacaacacggcgagctggtttactgcgcttacccaacacggtaaagaagacttaaaattcccgcgtggccagggcgtcccgatcaacactaactcttccccggatgatcagattggttattaccgcagagcaactcgtcggattcgcggcggcgacggtaaaatgaaagatttgtctccgcgttggtacttttactatctcggcaccggtccggaagctggactgccctacggggcaaacaaggacgggatcatttgggtggctaccgaaggtgccctgaatactccaaaagatcatatcggcacccgtaaccctgctaataacgctgcgatcgttctgcaactgcctcagggtacaactctgccaaaaggcttctatgcagaagggtcgcgtggtggcagccaggcgagtagccgtagcagctcccgctctcgcaactcgtcccgtaactccactccgggctcttctcgcggcacgtccccggctcgtatggcaggtaacggtggtgacgctgctctggcgctgctactgctggacaggctgaaccagctggagtcgaagatgagtggtaaaggccaacagcagcagggccagaccgttaccaaaaagagcgcagctgaaatgtctaaaaaaccgcgacagaaacgtaccgcgactaaagggtgtaatgtaacacagtgcttcggtccgcgaggtccggagcaaactcaaggaaactttggcgatgcagatttagtgaagaaagggaccgactacaaacactggccgcaaattgcccagttcgccccatccgctagtgcattcttcggtatgagccgcatctcgtcaaaagaaacgccaagtggtacgtggctgacctacaccggtgctatcaagcttgataaagatgacccgaactttaaagaccaggttattctgcttaacaaacatattgatgcctataaaactttcccgccgaccgaacccaaaaaggacaaaaagaaaaaagctgatgaaacccaggctctaccgcagcgtcagaaaaaacagcaaactgtgactctgctgccagctgcggacctggatgatttttccaagcagctgcaacagtctatgagctctgcggactctacgcaggcttaa

SEQ ID NO: 225 - DNA, 2016 bp, Artificial Sequence
  Description of Artificial Sequence: Synthetic polynucleotide
atgcaccatcatcaccatcatggtggttctggttcgccgatacttggttattggaagattaaaggactggttcagcccacacgcctcctgctagaatacttagaggaaaaatatgaagagcacctgtacgaacgtgatgagggggacaaatggcgaaacaagaaatttgaattgggcttagaatttccaaatttgccgtattatatcgatggcgacgtaaaactgacccaatcaatggccattattcgctacatcgcagataaacataacatgctgggtggctgccctaaagaacgggctgagatctccatgctggaaggtgcggtgctcgacattcgctacggcgtcagtagaattgcgtatagcaaggatttcgaaactttaaaagtggatttcctgagcaaacttccggagatgctgaaaatgtttgaggataggctttgtcataagacgtatctcaatggtgatcatgttacccacccggactttatgctgtacgacgcccttgatgtcgttctgtatatggatcccatgtgcctggacgccttcccgaaattagtgtgttttaaaaaacgtatcgaagcgattccacagatcgataaatacttgaagtcttctaaatatattgcttggcctctgcaaggctggcaggcaacgttcggtgggggagatcatccgccaaaatcagatctggtgccgcgtgggagccctggcatacaccgcgacggtggttctggtgagaacctgtactttcaaagctcagataatgggcctcaaaaccagcgcaacgctccacgtataaccttcggtggcccgtctgactccacaggcagcaaccagaatggtgagcgtagtggagccaggtctaagcagcgccgtccccagggtctgccgaacaacacggcgagctggtttactgcgcttacccaacacggtaaagaagacttaaaattcccgcgtggccagggcgtcccgatcaacactaactcttccccggatgatcagattggttattaccgcagactgactcgtcggattcgcggcggcgacggtaaaatgaaagatttgtctccgcgttggtacttttactatctcggcaccggtccggaagctggactgccctacggggcaaacaaggacgggatcatttgggtggctaccgaaggtgccctgaatactccaaaagatcatatcggcacccgtaaccctgctaataacgctgcgatcgttctgcaactgcctcagggtacaactctgccaaaaggcttctatgcagaagggtcgcgtggtggcagccaggcgagtagccgtagcagctcccgctctcgcaactcgtcccgtaactccactccgggctcttctcgcggcacgtccccggctcgtatggcaggtaacggtggtgacgctgctctggcgctgctactgctggacaggctgaaccagctggagtcgaagatgagtggtaaaggccaacagcagcagggccagaccgttaccaaaaagagcgcagctgaagcatctaaaaaaccgcgacagaaacgtaccgcgactaaagcgtacaatgtaacacaggccttcggtcgtcgaggtccggagcaaactcaaggaaactttggcgatcaggaattaatccgccaggggaccgactacaaacactggccgcaaattgcccagttcgccccatccgctagtgcattcttcggtatgagccgcatcggcatggaagtaacgccaagtggtacgtggctgacctacaccggtgctatcaagcttgatgacaaggacccgaactttaaagaccaggttattctgcttaacaaacatattgatgcctataaaactttcccgccgaccgaacccaaaaaggacaaaaagaaaaaagctgatgaaacccaggctctaccgcagcgtcagaaaaaacagcaaactgtgactctgctgccagctgcggacctggatgatttttccaagcagctgcaacagtctatgagctctgcggactctacgcaggcttaa

SEQ ID NO: 226 - DNA, 2016 bp, Artificial Sequence
  Description of Artificial Sequence: Synthetic polynucleotide
atgcaccatcatcaccatcatggtggttctggttcgccgatacttggttattggaagattaaaggactggttcagcccacacgcctcctgctagaatacttagaggaaaaatatgaagagcacctgtacgaacgtgatgagggggacaaatggcgaaacaagaaatttgaattgggcttagaatttccaaatttgccgtattatatcgatggcgacgtaaaactgacccaatcaatggccattattcgctacatcgcagataaacataacatgctgggtggctgccctaaagaacgggctgagatctccatgctggaaggtgcggtgctcgacattcgctacggcgtcagtagaattgcgtatagcaaggatttcgaaactttaaaagtggatttcctgagcaaacttccggagatgctgaaaatgtttgaggataggctttgtcataagacgtatctcaatggtgatcatgttacccacccggactttatgctgtacgacgcccttgatgtcgttctgtatatggatcccatgtgcctggacgccttcccgaaattagtgtgttttaaaaaacgtatcgaagcgattccacagatcgataaatacttgaagtcttctaaatatattgcttggcctctgcaaggctggcaggcaacgttcggtgggggagatcatccgccaaaatcagatctggtgccgcgtgggagccctggcatacaccgcgacggtggttctggtgagaacctgtactttcaaagctcagataatgggcctcaaaaccagcgcaacgctccacgtataaccttcggtggcccgtctgactccacaggcagcaaccagaatggtgagcgtagtggagccaggtctaagcagcgccgtccccagggtctgccgaacaacacggcgagctggtttactgcgcttacccaacacggtaaagaagacttaaaattcccgcgtggccagggcgtcccgatcaacactaactcttccccggatgatcagattggttattaccgcagagcaactcgtcggattcgcggcggcgacggtaaaatgaaagatttgtctccgcgttggtacttttactatctcggcaccggtccggaagctggactgccctacggggcaaacaaggacgggatcatttgggtggctaccgaaggtgccctgaatactccaaaagatcatatcggcacccgtaaccctgctaataacgctgcgatcgttctgcaactgcctcagggtacaactctgccaaaaggcttctatgcagaagggtcgcgtggtggcagccaggcgagtagccgtagcagctcccgctctcgcaactcgtcccgtaactccactccgggctcttctcgcggcacgtccccggctcgtatggcaggtaacggtggtgacgctgctctggcgctgctactgctggacaggctgaaccagctggagtcgaagatgagtggtaaaggccaacagcagcagggccagaccgttaccaaaaagagcgcagctgaagcatctaaaaaaccgcgacagaaacgtaccgcgactaaagcgtacaatgtaacacaggccttcggtccacgaggtccggagcaaactcaaggaaactttggcgatcaggaattaatccgccaggggaccgactacaaacactggccgcaaattgcccagttcgccccatccgctagtgcattcttcggtatgagccgcatcggcatggaagtaacgccaagtggtacgtggctgacctacaccggtgctatcaagcttgatgacaaggacccgaactttaaagaccaggttattctgcttaacaaacatattgatgcctataaaactttcccgccgaccgaacccaaaaaggacaaaaagaaaaaagctgatgaaacccaggctctaccgcagcgtcagaaaaaacagcaaactgtgactctgctgccagctgcggacctggatgatttttccaagcagctgcaacagtctatgagctctgcggactctacgcaggcttaa

SEQ ID NO: 227 - DNA, 2016 bp, Artificial Sequence
  Description of Artificial Sequence: Synthetic polynucleotide
atgcaccatcatcaccatcatggtggttctggttcgccgatacttggttattggaagattaaaggactggttcagcccacacgcctcctgctagaatacttagaggaaaaatatgaagagcacctgtacgaacgtgatgagggggacaaatggcgaaacaagaaatttgaattgggcttagaatttccaaatttgccgtattatatcgatggcgacgtaaaactgacccaatcaatggccattattcgctacatcgcagataaacataacatgctgggtggctgccctaaagaacgggctgagatctccatgctggaaggtgcggtgctcgacattcgctacggcgtcagtagaattgcgtatagcaaggatttcgaaactttaaaagtggatttcctgagcaaacttccggagatgctgaaaatgtttgaggataggctttgtcataagacgtatctcaatggtgatcatgttacccacccggactttatgctgtacgacgcccttgatgtcgttctgtatatggatcccatgtgcctggacgccttcccgaaattagtgtgttttaaaaaacgtatcgaagcgattccacagatcgataaatacttgaagtcttctaaatatattgcttggcctctgcaaggctggcaggcaacgttcggtgggggagatcatccgccaaaatcagatctggtgccgcgtgggagccctggcatacaccgcgacggtggttctggtgagaacctgtactttcaaagctcagataatgggcctcaaaaccagcgcaacgctccacgtataaccttcggtggcccgtctgactccacaggcagcaaccagaatggtgagcgtagtggagccaggtctaagcagcgccgtccccagggtctgccgaacaacacggcgagctggtttactggccttacccaaaatggtaaagaagacttaaaattcccgccgggccagggcgtcccgatcaacactaactcttccccggatgatcagattggttattaccgcagagcaactcgtcggattcgcggcggcgacggtaaaatgaaagatttgccaccgaagtggtacttttactatctcggcaccggtccgcatgctgatctgccctacgggcaaaaacacgacggggtggtttgggtggctcgacctggtgccctgaatactccaaaagatcatatcggcacccgtaaccctgctaataacgctgcgatccccctgcaactgcctccgggtacaaaactgccaaaaggcttctatgcagaagggtcgcgtggtggcagccaggcgagtagccgtagcagctcccgctctcgcaactcgtcccgtaactccactccgggctcttctcgcggcacgtccccggctcgtatggcaggtaacggtggtgacgctgctctggcgctgctactgctggacaggctgaaccagctggagtcgaagatgagtggtaaaggccaacagcagcagggccagaccgttaccaaaaagagcgcagctgaagcatctaaaaaaccgcgacagaaacgtaccgcgactaaagcgtacaatgtaacacaggccttcggtcgtcgaggtccggagcaaactcaaggaaactttggcgatcaggaattaatccgccaggggaccgactacaaacactggccgcaaattgcccagttcgccccatccgctagtgcattcttcggtatgagccgcatcggcatggaagtaacgccaagtggtacgtggctgacctacaccggtgctatcaagcttgatgacaaggacccgaactttaaagaccaggttattctgcttaacaaacatattgatgcctataaaactttcccgccgaccgaacccaaaaaggacaaaaagaaaaaagctgatgaaacccaggctctaccgcagcgtcagaaaaaacagcaaactgtgactctgctgccagctgcggacctggatgatttttccaagcagctgcaacagtctatgagctctgcggactctacgcaggcttaa

SEQ ID NO: 228 - DNA, 2016 bp, Artificial Sequence
  Description of Artificial Sequence: Synthetic polynucleotide
atgcaccatcatcaccatcatggtggttctggttcgccgatacttggttattggaagattaaaggactggttcagcccacacgcctcctgctagaatacttagaggaaaaatatgaagagcacctgtacgaacgtgatgagggggacaaatggcgaaacaagaaatttgaattgggcttagaatttccaaatttgccgtattatatcgatggcgacgtaaaactgacccaatcaatggccattattcgctacatcgcagataaacataacatgctgggtggctgccctaaagaacgggctgagatctccatgctggaaggtgcggtgctcgacattcgctacggcgtcagtagaattgcgtatagcaaggatttcgaaactttaaaagtggatttcctgagcaaacttccggagatgctgaaaatgtttgaggataggctttgtcataagacgtatctcaatggtgatcatgttacccacccggactttatgctgtacgacgcccttgatgtcgttctgtatatggatcccatgtgcctggacgccttcccgaaattagtgtgttttaaaaaacgtatcgaagcgattccacagatcgataaatacttgaagtcttctaaatatattgcttggcctctgcaaggctggcaggcaacgttcggtgggggagatcatccgccaaaatcagatctggtgccgcgtgggagccctggcatacaccgcgacggtggttctggtgagaacctgtactttcaaagctcagataatgggcctcaaaaccagcgcaacgctccacgtataaccttcggtggcccgtctgactccacaggcagcaaccagaatggtgagcgtagtggagccaggtctaagcagcgccgtccccagggtctgccgaacaacacggcgagctggtttactgcgcttacccaacacggtaaagaagacttaaaattcccgcgtggccagggcgtcccgatcaacactaactcttccccggatgatcagattggttattaccgcagagcaactcgtcggattcgcggcggcgacggtaaaatgaaagatttgtctccgcgttggtacttttactatctcggcaccggtccggaagctggactgccctacggggcaaacaaggacgggatcatttgggtggctaccgaaggtgccctgaatactccaaaagatcatatcggcacccgtaaccctgctaataacgctgcgatcgttctgcaactgcctgagggtacaactctgccaaaaggcttctatgcagaagggtcgcgtggtggcagccaggcgagtagccgtagcagctcccgctctcgcaactcgtcccgtaactccactccgggctcttctcgcggcacgtccccggctcgtatggcaggtaacggtggtgacgctgctctggcgctgctactgctggacaggctgaaccagctggagtcgaagatgagtggtaaaggccaacagcagcagggccagaccgttaccaaaaagagcgcagctgaagcatctaaaaaaccgcgacagaaacgtaccgcgactaaagcgtacaatgtaacacaggccttcggtcgtcgaggtccggagcaaactcaaggaaactttggcgatcaggaattaatccgccaggggaccgactacaaacactggccgcaaattgcccagttcgccccatccgctagtgcattcttcggtatgagccgcatcggcatggaagtaacgccaagtggtacgtggctgacctacaccggtgctatcaagcttgatgacaaggacccgaactttaaagaccaggttattctgcttaacaaacatattgatgcctataaaactttcccgccgaccgaacccaaaaaggacaaaaagaaaaaagctgatgaaacccaggctctaccgcagcgtcagaaaaaacagcaaactgtgactctgctgccagctgcggacctggatgatttttccaagcagctgcaacagtctatgagctctgcggactctacgcaggcttaa

SEQ ID NO: 229 - DNA, 2016 bp, Artificial Sequence
  Description of Artificial Sequence: Synthetic polynucleotide
atgcaccatcatcaccatcatggtggttctggttcgccgatacttggttattggaagattaaaggactggttcagcccacacgcctcctgctagaatacttagaggaaaaatatgaagagcacctgtacgaacgtgatgagggggacaaatggcgaaacaagaaatttgaattgggcttagaatttccaaatttgccgtattatatcgatggcgacgtaaaactgacccaatcaatggccattattcgctacatcgcagataaacataacatgctgggtggctgccctaaagaacgggctgagatctccatgctggaaggtgcggtgctcgacattcgctacggcgtcagtagaattgcgtatagcaaggatttcgaaactttaaaagtggatttcctgagcaaacttccggagatgctgaaaatgtttgaggataggctttgtcataagacgtatctcaatggtgatcatgttacccacccggactttatgctgtacgacgcccttgatgtcgttctgtatatggatcccatgtgcctggacgccttcccgaaattagtgtgttttaaaaaacgtatcgaagcgattccacagatcgataaatacttgaagtcttctaaatatattgcttggcctctgcaaggctggcaggcaacgttcggtgggggagatcatccgccaaaatcagatctggtgccgcgtgggagccctggcatacaccgcgacggtggttctggtgagaacctgtactttcaaagctcagataatgggcctcaaaaccagcgcaacgctccacgtataaccttcggtggcccgtctgactccacaggcagcaaccagaatggtgagcgtagtggagccaggtctaagcagcgccgtccccagggtctgccgaacaacacggcgagctggtttactgcgcttacccaacacggtaaagaagacttaaaattcccgcgtggccagggcgtcccgatcaacactaactcttccccggatgatcagattggttattaccgcagagcaactcgtcggattcgcggcggcgacggtaaaatgaaagatttgtctccgcgttggtacttttactatctcggcaccggtccggaagctggactgccctacggggcaaacaaggacgggatcatttgggtggctaccgaaggtgccctgaatactccaaaagatcatatcggcacccgtaaccctgctaataacgctgcgatcgttctgcaactgcctcagggtacaactctgccaaaaggcttctatgcagaagggtcgcgtggtggcagccaggcgagtagccgtagcagctcccgctctcgcaactcgtcccgtaactccactccgggctcttctcgcggcacgtccccggctcgtatggcaggtaacggtggtgacgctgctctggcgctgctactgctggacaggctgaaccagctggagtcgaagatgagtggtaaaggccaacagcagcagggccagaccgttaccaaaaagagcgcagctgaagcatctaaaaaaccgcgacagaaacgtaccgcgactaaagcgtacaatgtaacacaggccttcggtcgtcgaggtccggagcccactcaaggaaactttggcgatcaggaattaatccgccaggggaccgactacaaacactggccgcaaattgcccagttcgccccatccgctagtgcattcttcggtatgagccgcatcggcatggaagtaacgccaagtggtacgtggctgacctacaccggtgctatcaagcttgatgacaaggacccgaactttaaagaccaggttattctgcttaacaaacatattgatgcctataaaactttcccgccgaccgaacccaaaaaggacaaaaagaaaaaagctgatgaaacccaggctctaccgcagcgtcagaaaaaacagcaaactgtgactctgctgccagctgcggacctggatgatttttccaagcagctgcaacagtctatgagctctgcggactctacgcaggcttaa

SEQ ID NO: 230 - DNA, 2016 bp, Artificial Sequence
  Description of Artificial Sequence: Synthetic polynucleotide
atgcaccatcatcaccatcatggtggttctggttcgccgatacttggttattggaagattaaaggactggttcagcccacacgcctcctgctagaatacttagaggaaaaatatgaagagcacctgtacgaacgtgatgagggggacaaatggcgaaacaagaaatttgaattgggcttagaatttccaaatttgccgtattatatcgatggcgacgtaaaactgacccaatcaatggccattattcgctacatcgcagataaacataacatgctgggtggctgccctaaagaacgggctgagatctccatgctggaaggtgcggtgctcgacattcgctacggcgtcagtagaattgcgtatagcaaggatttcgaaactttaaaagtggatttcctgagcaaacttccggagatgctgaaaatgtttgaggataggctttgtcataagacgtatctcaatggtgatcatgttacccacccggactttatgctgtacgacgcccttgatgtcgttctgtatatggatcccatgtgcctggacgccttcccgaaattagtgtgttttaaaaaacgtatcgaagcgattccacagatcgataaatacttgaagtcttctaaatatattgcttggcctctgcaaggctggcaggcaacgttcggtgggggagatcatccgccaaaatcagatctggtgccgcgtgggagccctggcatacaccgcgacggtggttctggtgagaacctgtactttcaaagctcagataatgggcctcaaaaccagcgcaacgctccacgtataaccttcggtggcccgtctgactccacaggcagcaaccagaatggtgagcgtagtggagccaggtctaagcagcgccgtccccagggtctgccgaacaacacggcgagctggtttactgcgcttacccaacacggtaaagaagacttaaaattcccgcgtggccagggcgtcccgatcaacactaactcttccccggatgatcagattggttattaccgcagagcaactcgtcggattcgcggcggcgacggtaaaatgaaagatttgtctccgcgttggtacttttactatctcggcaccggtccggaagctggactgccctacggggcaaacaaggacgggatcatttgggtggctaccgaaggtgccctgaatactccaaaagatcatatcggcacccgtaaccctgctaataacgctgcggccgttctgcaactgcctcagggtacaactctgccaaaaggcttctatgcagaagggtcgcgtggtggcagccaggcgagtagccgtagcagctcccgctctcgcaactcgtcccgtaactccactccgggctcttctcgcggcacgtccccggctcgtatggcaggtaacggtggtgacgctgctctggcgctgctactgctggacaggctgaaccagctggagtcgaagatgagtggtaaaggccaacagcagcagggccagaccgttaccaaaaagagcgcagctgaagcatctaaaaaaccgcgacagaaacgtaccgcgactaaagcgtacaatgtaacacaggccttcggtcgtcgaggtccggagcaaactcaaggaaactttggcgatcaggaattaatccgccaggggaccgactacaaacactggccgcaaattgcccagttcgccccatccgctagtgcattcttcggtatgagccgcatcggcatggaagtaacgccaagtggtacgtggctgacctacaccggtgctatcaagcttgatgacaaggacccgaactttaaagaccaggttattctgcttaacaaacatattgatgcctataaaactttcccgccgaccgaacccaaaaaggacaaaaagaaaaaagctgatgaaacccaggctctaccgcagcgtcagaaaaaacagcaaactgtgactctgctgccagctgcggacctggatgatttttccaagcagctgcaacagtctatgagctctgcggactctacgcaggcttaa

SEQ ID NO: 231 - DNA, 2016 bp, Artificial Sequence
  Description of Artificial Sequence: Synthetic polynucleotide
atgcaccatcatcaccatcatggtggttctggttcgccgatacttggttattggaagattaaaggactggttcagcccacacgcctcctgctagaatacttagaggaaaaatatgaagagcacctgtacgaacgtgatgagggggacaaatggcgaaacaagaaatttgaattgggcttagaatttccaaatttgccgtattatatcgatggcgacgtaaaactgacccaatcaatggccattattcgctacatcgcagataaacataacatgctgggtggctgccctaaagaacgggctgagatctccatgctggaaggtgcggtgctcgacattcgctacggcgtcagtagaattgcgtatagcaaggatttcgaaactttaaaagtggatttcctgagcaaacttccggagatgctgaaaatgtttgaggataggctttgtcataagacgtatctcaatggtgatcatgttacccacccggactttatgctgtacgacgcccttgatgtcgttctgtatatggatcccatgtgcctggacgccttcccgaaattagtgtgttttaaaaaacgtatcgaagcgattccacagatcgataaatacttgaagtcttctaaatatattgcttggcctctgcaaggctggcaggcaacgttcggtgggggagatcatccgccaaaatcagatctggtgccgcgtgggagccctggcatacaccgcgacggtggttctggtgagaacctgtactttcaaagctcagataatgggcctcaaaaccagcgcaacgctccacgtataaccttcggtggcccgtctgactccacaggcagcaaccagaatggtgagcgtagtggagccaggtctaagcagcgccgtccccagggtctgccgaacaacacggcgagctggtttactgcgcttaaacaacacggtaaagaagacttaaaattcccgcgtggccagggcgtcccgatcaacactaactcttccccggatgatcagattggttattaccgcagagcaactcgtcggattcgcggcggcgacggtaaaatgaaagatttgtctccgcgttggtacttttactatctcggcaccggtccggaagctggactgccctacggggcaaacaaggacgggatcatttgggtggctaccgaaggtgccctgaatactccaaaagatcatatcggcacccgtaaccctgctaataacgctgcgatcgttctgcaactgcctcagggtacaactctgccaaaaggcttctatgcagaagggtcgcgtggtggcagccaggcgagtagccgtagcagctcccgctctcgcaactcgtcccgtaactccactccgggctcttctcgcggcacgtccccggctcgtatggcaggtaacggtggtgacgctgctctggcgctgctactgctggacaggctgaaccagctggagtcgaagatgagtggtaaaggccaacagcagcagggccagaccgttaccaaaaagagcgcagctgaagcatctaaaaaaccgcgacagaaacgtaccgcgactaaagcgtacaatgtaacacaggccttcggtcgtcgaggtccggagcaaactcaaggaaactttggcgatcaggaattaatccgccaggggaccgactacaaacactggccgcaaattgcccagttcgccccatccgctagtgcattcttcggtatgagccgcatcggcatggaagtaacgccaagtggtacgtggctgacctacaccggtgctatcaagcttgatgacaaggacccgaactttaaagaccaggttattctgcttaacaaacatattgatgcctataaaactttcccgccgaccgaacccaaaaaggacaaaaagaaaaaagctgatgaaacccaggctctaccgcagcgtcagaaaaaacagcaaactgtgactctgctgccagctgcggacctggatgatttttccaagcagctgcaacagtctatgagctctgcggactctacgcaggcttaa

SEQ ID NO: 232 - DNA, 2016 bp, Artificial Sequence
  Description of Artificial Sequence: Synthetic polynucleotide
atgcaccatcatcaccatcatggtggttctggttcgccgatacttggttattggaagattaaaggactggttcagcccacacgcctcctgctagaatacttagaggaaaaatatgaagagcacctgtacgaacgtgatgagggggacaaatggcgaaacaagaaatttgaattgggcttagaatttccaaatttgccgtattatatcgatggcgacgtaaaactgacccaatcaatggccattattcgctacatcgcagataaacataacatgctgggtggctgccctaaagaacgggctgagatctccatgctggaaggtgcggtgctcgacattcgctacggcgtcagtagaattgcgtatagcaaggatttcgaaactttaaaagtggatttcctgagcaaacttccggagatgctgaaaatgtttgaggataggctttgtcataagacgtatctcaatggtgatcatgttacccacccggactttatgctgtacgacgcccttgatgtcgttctgtatatggatcccatgtgcctggacgccttcccgaaattagtgtgttttaaaaaacgtatcgaagcgattccacagatcgataaatacttgaagtcttctaaatatattgcttggcctctgcaaggctggcaggcaacgttcggtgggggagatcatccgccaaaatcagatctggtgccgcgtgggagccctggcatacaccgcgacggtggttctggtgagaacctgtactttcaaagctcagataatgggcctcaaaaccagcgcaacgctccacgtataaccttcggtggcccgtctgactccacaggcagcaaccagaatggtgagcgtagtggagccaggtctaagcagcgccgtccccagggtctgccgaacaacacggcgagctggtttactgcgcttacccaacacggtaaagaagacttaaaattcccgcgtggccagggcgtcccgatcaacactaactcttccccggatgatcagattggttattaccgcagagcaactcgtcggattcgcggcggcgacggtaaaatgaaagatttgtctccgcgttggtacttttactatctcggcaccggtccggaagctggactgccctacggggcaaacaaggacgggatcatttgggtggctaccgaaggtgccctgaatactccaaaagatcatatcggcacccgtaaccctgctaataacgctgcgatcgttctgcaactgcctcagggtacaactctgccaaaaggcttctatgcagaagggtcgcgtggtggcagccaggcgagtagccgtagcagctcccgctctcgcaactcgtcccgtaactccactccgggctcttctcgcggcacgtccccggctcgtatggcaggtaacggtggtgacgctgctctggcgctgctactgctggacaggctgaaccagctggagtcgaagatgagtggtaaaggccaacagcagcagggccagaccgttaccaaaaagagcgcagctgaagcatctaaaaaaccgcgacagaaacgtaccgcgactaaagggtacaatgtaacacaggccttcggtcgtcgaggtccggagcaaactcaaggaaactttggcgatcaggatttaatcaaattggggaccgactacaaacactggccgcaaattgcccagttcgccccatccgctagtgcattcttcggtatgagccgcatcggcatggaagaaacgccaagtggtacgtggctgacctacaccggtgctatcaagcttgataaaaaggacccgaactttaaagaccaggttattctgcttaacaaacatattgatgcctataaaactttcccgccgaccgaacccaaaaaggacaaaaagaaaaaagctgatgaaacccaggctctaccgcagcgtcagaaaaaacagcaaactgtgactctgctgccagctgcggacctggatgatttttccaagcagctgcaacagtctatgagctctgcggactctacgcaggcttaa

SEQ ID NO: 233 - DNA, 2016 bp, Artificial Sequence
  Description of Artificial Sequence: Synthetic polynucleotide
atgcaccatcatcaccatcatggtggttctggttcgccgatacttggttattggaagattaaaggactggttcagcccacacgcctcctgctagaatacttagaggaaaaatatgaagagcacctgtacgaacgtgatgagggggacaaatggcgaaacaagaaatttgaattgggcttagaatttccaaatttgccgtattatatcgatggcgacgtaaaactgacccaatcaatggccattattcgctacatcgcagataaacataacatgctgggtggctgccctaaagaacgggctgagatctccatgctggaaggtgcggtgctcgacattcgctacggcgtcagtagaattgcgtatagcaaggatttcgaaactttaaaagtggatttcctgagcaaacttccggagatgctgaaaatgtttgaggataggctttgtcataagacgtatctcaatggtgatcatgttacccacccggactttatgctgtacgacgcccttgatgtcgttctgtatatggatcccatgtgcctggacgccttcccgaaattagtgtgttttaaaaaacgtatcgaagcgattccacagatcgataaatacttgaagtcttctaaatatattgcttggcctctgcaaggctggcaggcaacgttcggtgggggagatcatccgccaaaatcagatctggtgccgcgtgggagccctggcatacaccgcgacggtggttctggtgagaacctgtactttcaaagctcagataatgggcctcaaaaccagcgcaacgctccacgtataaccttcggtggcccgtctgactccacaggcagcaaccagaatggtgagcgtagtggagccaggtctaagcagcgccgtccccagggtctgccgaacaacacggcgagctggtttactgcgcttacccaacacggtaaagaagacttaaaattcccgcgtggccagggcgtcccgctgaacactaactcttccccggatgatcagattggttattaccgcagagcaactcgtcggattcgcggcggcgacggtaaaatgaaagatttgtctccgcgttggtacttttactatctcggcaccggtccggaagctggactgccctacggggcaaacaaggacgggatcatttgggtggctaccgaaggtgccctgaatactccaaaagatcatatcggcacccgtaaccctgctaataacgctgcgatcgttctgcaactgcctcagggtacaactctgccaaaaggcttctatgcagaagggtcgcgtggtggcagccaggcgagtagccgtagcagctcccgctctcgcaactcgtcccgtaactccactccgggctcttctcgcggcacgtccccggctcgtatggcaggtaacggtggtgacgctgctctggcgctgctactgctggacaggctgaaccagctggagtcgaagatgagtggtaaaggccaacagcagcagggccagaccgttaccaaaaagagcgcagctgaagcatctaaaaaaccgcgacagaaacgtaccgcgactaaagcgtacaatgtaacacaggccttcggtcgtcgaggtccggagcaaactcaaggaaactttggcgatcaggaattaatccgccaggggaccgactacaaacactggccgcaaattgcccagttcgccccatccgctagtgcattcttcggtatgagccgcatcggcatggaagtaacgccaagtggtacgtggctgacctacaccggtgctatcaagcttgatgacaaggacccgaactttaaagaccaggttattctgcttaacaaacatattgatgcctataaaactttcccgccgaccgaacccaaaaaggacaaaaagaaaaaagctgatgaaacccaggctctaccgcagcgtcagaaaaaacagcaaactgtgactctgctgccagctgcggacctggatgatttttccaagcagctgcaacagtctatgagctctgcggactctacgcaggcttaa

SEQ ID NO: 234 - DNA, 2016 bp, Artificial Sequence
  Description of Artificial Sequence: Synthetic polynucleotide
atgcaccatcatcaccatcatggtggttctggttcgccgatacttggttattggaagattaaaggactggttcagcccacacgcctcctgctagaatacttagaggaaaaatatgaagagcacctgtacgaacgtgatgagggggacaaatggcgaaacaagaaatttgaattgggcttagaatttccaaatttgccgtattatatcgatggcgacgtaaaactgacccaatcaatggccattattcgctacatcgcagataaacataacatgctgggtggctgccctaaagaacgggctgagatctccatgctggaaggtgcggtgctcgacattcgctacggcgtcagtagaattgcgtatagcaaggatttcgaaactttaaaagtggatttcctgagcaaacttccggagatgctgaaaatgtttgaggataggctttgtcataagacgtatctcaatggtgatcatgttacccacccggactttatgctgtacgacgcccttgatgtcgttctgtatatggatcccatgtgcctggacgccttcccgaaattagtgtgttttaaaaaacgtatcgaagcgattccacagatcgataaatacttgaagtcttctaaatatattgcttggcctctgcaaggctggcaggcaacgttcggtgggggagatcatccgccaaaatcagatctggtgccgcgtgggagccctggcatacaccgcgacggtggttctggtgagaacctgtactttcaaagctcagataatgggcctcaaaaccagcgcaacgctccacgtataaccttcggtggcccgtctgactccacaggcagcaaccagaatggtgagcgtagtggagccaggtctaagcagcgccgtccccagggtctgccgaacaacacggcgagctggtttactgcgcttacccaacacggtaaagaagacttaaaattcccgcgtggccagggcgtcccgatcaacactaactcttccccggatgatcagattggttattaccgcagagcaactcgtcggattcgcggcggcgacggtaaaatgaaagatttgtctccgcgttggtacttttactatctcggcaccggtccggaagctggactgccctacggggcaaacaaggacgggatcatttgggtggctaccgaaggtgccctgaatactccaaaagatcatatcggcacccgtaaccctgctaataacgctgcgatcgttctgcaactgcctcagggtacaactctgccaaaaggcttctatgcagaagggtcgcgtggtggcagccaggcgagtagccgtagcagctcccgctctcgcaactcgtcccgtaactccactccgggctcttctcgcggcacgtccccggctcgtatggcaggtaacggtggtgacgctgctctggcgctgctactgctggacaggctgaaccagctggagtcgaagatgagtggtaaaggccaacagcagcagggccagaccgttaccaaaaagagcgcagctgaagcatctaaaaaaccgcgacagaaacgtaccgcgactaaagcgtacaatgtaacacaggccttcggtcgtcgaggtccggagcaaactcaaggaaactttggcgatcaggaattaatccgcaatgggaccgactacaaacactggccgcaaattgcccagttcgccccatccgctagtgcattcttcggtatgagccgcatcggcatggaagtaacgccaagtggtacgtggctgacctacaccggtgctatcaagcttgatgacaaggacccgaactttaaagaccaggttattctgcttaacaaacatattgatgcctataaaactttcccgccgaccgaacccaaaaaggacaaaaagaaaaaagctgatgaaacccaggctctaccgcagcgtcagaaaaaacagcaaactgtgactctgctgccagctgcggacctggatgatttttccaagcagctgcaacagtctatgagctctgcggactctacgcaggcttaa

SEQ ID NO: 235 - DNA, 2016 bp, Artificial Sequence
  Description of Artificial Sequence: Synthetic polynucleotide
atgcaccatcatcaccatcatggtggttctggttcgccgatacttggttattggaagattaaaggactggttcagcccacacgcctcctgctagaatacttagaggaaaaatatgaagagcacctgtacgaacgtgatgagggggacaaatggcgaaacaagaaatttgaattgggcttagaatttccaaatttgccgtattatatcgatggcgacgtaaaactgacccaatcaatggccattattcgctacatcgcagataaacataacatgctgggtggctgccctaaagaacgggctgagatctccatgctggaaggtgcggtgctcgacattcgctacggcgtcagtagaattgcgtatagcaaggatttcgaaactttaaaagtggatttcctgagcaaacttccggagatgctgaaaatgtttgaggataggctttgtcataagacgtatctcaatggtgatcatgttacccacccggactttatgctgtacgacgcccttgatgtcgttctgtatatggatcccatgtgcctggacgccttcccgaaattagtgtgttttaaaaaacgtatcgaagcgattccacagatcgataaatacttgaagtcttctaaatatattgcttggcctctgcaaggctggcaggcaacgttcggtgggggagatcatccgccaaaatcagatctggtgccgcgtgggagccctggcatacaccgcgacggtggttctggtgagaacctgtactttcaaagctcagataatgggcctcaaaaccagcgcaacgctccacgtataaccttcggtggcccgtctgactccacaggcagcaaccagaatggtgagcgtagtggagccaggtctaagcagcgccgtccccagggtctgccgaacaacacggcgagctggtttactgcgcttacccaacacggtaaagaagacttaaaattcccgcgtggccagggcgtcccgatcaacactaactcttccccggatgatcagattggttattaccgcagagcaactcgtcggattcgcggcggcgacggtaaaatgaaagatttgtctccgcgttggtacttttactatctcggcaccggtccggaagctggactgccctacggggcaaacaaggacgggatcatttgggtggctaccgaaggtgccctgaatactccaaaagatcatatcggcacccgtaaccctgctaataacgctgcgatcgtttgtcaactgcctcagggtacaactctgccaaaaggcttctatgcagaagggtcgcgtggtggcagccaggcgagtagccgtagcagctcccgctctcgcaactcgtcccgtaactccactccgggctcttctcgcggcacgtccccggctcgtatggcaggtaacggtggtgacgctgctctggcgctgctactgctggacaggctgaaccagctggagtcgaagatgagtggtaaaggccaacagcagcagggccagaccgttaccaaaaagagcgcagctgaagcatctaaaaaaccgcgacagaaacgtaccgcgactaaagcgtacaatgtaacacaggccttcggtcgtcgaggtccggagcaaactcaaggaaactttggcgatcaggaattaatccgccaggggaccgactacaaacactggccgcaaattgcccagttcgccccatccgctagtgcattcttcggtatgagccgcatcggcatggaagtaacgccaagtggtacgtggctgacctacaccggtgctatcaagcttgatgacaaggacccgaactttaaagaccaggttattctgcttaacaaacatattgatgcctataaaactttcccgccgaccgaacccaaaaaggacaaaaagaaaaaagctgatgaaacccaggctctaccgcagcgtcagaaaaaacagcaaactgtgactctgctgccagctgcggacctggatgatttttccaagcagctgcaacagtctatgagctctgcggactctacgcaggcttaa

SEQ ID NO: 236 - DNA, 2016 bp, Artificial Sequence
  Description of Artificial Sequence: Synthetic polynucleotide
atgcaccatcatcaccatcatggtggttctggttcgccgatacttggttattggaagattaaaggactggttcagcccacacgcctcctgctagaatacttagaggaaaaatatgaagagcacctgtacgaacgtgatgagggggacaaatggcgaaacaagaaatttgaattgggcttagaatttccaaatttgccgtattatatcgatggcgacgtaaaactgacccaatcaatggccattattcgctacatcgcagataaacataacatgctgggtggctgccctaaagaacgggctgagatctccatgctggaaggtgcggtgctcgacattcgctacggcgtcagtagaattgcgtatagcaaggatttcgaaactttaaaagtggatttcctgagcaaacttccggagatgctgaaaatgtttgaggataggctttgtcataagacgtatctcaatggtgatcatgttacccacccggactttatgctgtacgacgcccttgatgtcgttctgtatatggatcccatgtgcctggacgccttcccgaaattagtgtgttttaaaaaacgtatcgaagcgattccacagatcgataaatacttgaagtcttctaaatatattgcttggcctctgcaaggctggcaggcaacgttcggtgggggagatcatccgccaaaatcagatctggtgccgcgtgggagccctggcatacaccgcgacggtggttctggtgagaacctgtactttcaaagctcagataatgggcctcaaaaccagcgcaacgctccacgtataaccttcggtggcccgtctgactccacaggcagcaaccagaatggtgagcgtagtggagccaggtctaagcagcgccgtccccagggtctgccgaacaacacggcgagctggtttactgcgcttacccaacacggtaaagaagacttaaaattcccgcgtggccagggcgtcccgatcaacactaactcttccccggatgatcagattggttattaccgcagagcaactcgtcggattcgcggcggcgacggtaaaatgaaagatttgtctccgcgttggtacttttactatctcggcaccggtccggaagctggactgccctacggggcaaacaaggacgggatcatttgggtggctaccgaaggtgccctgaatactccaaaagatcatatcggcacccgtaaccctgctaataacgctgcgatcgttctgcaactgcctcagggtacaactctgccaaaaggcttctatgcagaagggtcgcgtggtggcagccaggcgagtagccgtagcagctcccgctctcgcaactcgtcccgtaactccactccgggctcttctcgcggcacgtccccggctcgtatggcaggtaacggtggtgacgctgctctggcgctgctactgctggacaggctgaaccagctggagtcgaagatgagtggtaaaggccaacagcagcagggccagaccgttaccaaaaagagcgcagctgaaaattctaaaaaaccgcgacagaaacgtaccgcgactaaagcgtacaatgtaacacaggccttcggtcgtcgaggtccggagcaaactcaaggaaactttggcgatcaggaattaatccgccaggggaccgactacaaacactggccgcaaattgcccagttcgccccatccgctagtgcattcttcggtatgagccgcatcggcatggaagtaacgccaagtggtacgtggctgacctacaccggtgctatcaagcttgatgacaaggacccgaactttaaagaccaggttattctgcttaacaaacatattgatgcctataaaactttcccgccgaccgaacccaaaaaggacaaaaagaaaaaagctgatgaaacccaggctctaccgcagcgtcagaaaaaacagcaaactgtgactctgctgccagctgcggacctggatgatttttccaagcagctgcaacagtctatgagctctgcggactctacgcaggcttaa

SEQ ID NO: 237 - DNA, 2016 bp, Artificial Sequence
  Description of Artificial Sequence: Synthetic polynucleotide
atgcaccatcatcaccatcatggtggttctggttcgccgatacttggttattggaagattaaaggactggttcagcccacacgcctcctgctagaatacttagaggaaaaatatgaagagcacctgtacgaacgtgatgagggggacaaatggcgaaacaagaaatttgaattgggcttagaatttccaaatttgccgtattatatcgatggcgacgtaaaactgacccaatcaatggccattattcgctacatcgcagataaacataacatgctgggtggctgccctaaagaacgggctgagatctccatgctggaaggtgcggtgctcgacattcgctacggcgtcagtagaattgcgtatagcaaggatttcgaaactttaaaagtggatttcctgagcaaacttccggagatgctgaaaatgtttgaggataggctttgtcataagacgtatctcaatggtgatcatgttacccacccggactttatgctgtacgacgcccttgatgtcgttctgtatatggatcccatgtgcctggacgccttcccgaaattagtgtgttttaaaaaacgtatcgaagcgattccacagatcgataaatacttgaagtcttctaaatatattgcttggcctctgcaaggctggcaggcaacgttcggtgggggagatcatccgccaaaatcagatctggtgccgcgtgggagccctggcatacaccgcgacggtggttctggtgagaacctgtactttcaaagctcagataatgggcctcaaaaccagcgcaacgctccacgtataaccttcggtggcccgtctgactccacaggcagcaaccagaatggtgagcgtagtggagccaggtctaagcagcgccgtccccagggtctgccgaacaacacggcgagctggtttactgcgcttacccaacacggtaaagaagacttaaaattcccgcgtggccagggcgtcccgatcaacactaactcttccccggatgatcagattggttattaccgcagagcaactcgtcggattcgcggcggcgacggtaaaatgaaagatttgtctccgcgttggtacttttactatctcggcaccggtccggaagctggactgccctacggggcaaacaaggacgggatcatttgggtggctaccgaaggtgccctgaatactccaaaagatcatatcggcacccgtaaccctgctaataacgctgcgatcgttctgcaactgcctcagggtacaactctgccaaaaggcttctatgcagaagggtcgcgtggtggcagccaggcgagtagccgtagcagctcccgctctcgcaactcgtcccgtaactccactccgggctcttctcgcggcacgtccccggctcgtatggcaggtaacggtggtgacgctgctctggcgctgctactgctggacaggctgaaccagctggagtcgaagatgagtggtaaaggccaacagcagcagggccagaccgttaccaaaaagagcgcagctgaagcatctaaaaaaccgcgacagaaacgtaccgcgactaaagcgtacaatgtaacacaggccttcggtcgtcgaggtccggagcaaactcaaggaaactttggcgatcaggaattaatccgccaggggaccgactacaaacactggccgcaaattgcccagttcgccccatccgctagtgcattcttcggtatgagccgcatcgagatggaagtaacgccaagtggtacgtggctgacctacaccggtgctatcaagcttgatgacaaggacccgaactttaaagaccaggttattctgcttaacaaacatattgatgcctataaaactttcccgccgaccgaacccaaaaaggacaaaaagaaaaaagctgatgaaacccaggctctaccgcagcgtcagaaaaaacagcaaactgtgactctgctgccagctgcggacctggatgatttttccaagcagctgcaacagtctatgagctctgcggactctacgcaggcttaa

SEQ ID NO: 238 - DNA, 2016 bp, Artificial Sequence
  Description of Artificial Sequence: Synthetic polynucleotide
atgcaccatcatcaccatcatggtggttctggttcgccgatacttggttattggaagattaaaggactggttcagcccacacgcctcctgctagaatacttagaggaaaaatatgaagagcacctgtacgaacgtgatgagggggacaaatggcgaaacaagaaatttgaattgggcttagaatttccaaatttgccgtattatatcgatggcgacgtaaaactgacccaatcaatggccattattcgctacatcgcagataaacataacatgctgggtggctgccctaaagaacgggctgagatctccatgctggaaggtgcggtgctcgacattcgctacggcgtcagtagaattgcgtatagcaaggatttcgaaactttaaaagtggatttcctgagcaaacttccggagatgctgaaaatgtttgaggataggctttgtcataagacgtatctcaatggtgatcatgttacccacccggactttatgctgtacgacgcccttgatgtcgttctgtatatggatcccatgtgcctggacgccttcccgaaattagtgtgttttaaaaaacgtatcgaagcgattccacagatcgataaatacttgaagtcttctaaatatattgcttggcctctgcaaggctggcaggcaacgttcggtgggggagatcatccgccaaaatcagatctggtgccgcgtgggagccctggcatacaccgcgacggtggttctggtgagaacctgtactttcaaagctcagataatgggcctcaaaaccagcgcaacgctccacgtataaccttcggtggcccgtctgactccacaggcagcaaccagaatggtgagcgtagtggagccaggtctaagcagcgccgtccccagggtctgccgaacaacacggcgagctggtttactgcgcttacccaacacggtaaagaagacttaaaattcccgcgtggccagggcgtcccgatcaacactaactcttccccggatgatcagattggttattaccgcagagcaactcgtcggattcgcggcggcgacggtaaaatgaaagatttgtctccgcgttggtacttttactatctcggcaccggtccggaagctggactgccctacggggcaaacaaggacgggatcatttgggtggctaccgaaggtgccctgaatactccaaaagatcatatcggcacccgtaaccctgctaataacgctgcgatcgttctgcaactgcctcagggtacaactctgccaaaaggcttctatgcagaagggtcgcgtggtggcagccaggcgagtagccgtagcagctcccgctctcgcaactcgtcccgtaactccactccgggctcttctcgcggcacgtccccggctcgtatggcaggtaacggtggtgacgctgctctggcgctgctactgctggacaggctgaaccagctggagtcgaagatgagtggtaaaggccaacagcagcagggccagaccgttaccaaaaagagcgcagctgaagcatctaaaaaaccgcgacagaaacgtaccgcgactaaagcgtacaatgtaacacaggccttcggtcgtcgaggtccggatcaaactcaaggaaactttggcgatcaggaattaatccgccaggggaccgactacaaacactggccgcaaattgcccagttcgccccatccgctagtgcattcttcggtatgagccgcatcggcatggaagtaacgccaagtggtacgtggctgacctacaccggtgctatcaagcttgatgacaaggacccgaactttaaagaccaggttattctgcttaacaaacatattgatgcctataaaactttcccgccgaccgaacccaaaaaggacaaaaagaaaaaagctgatgaaacccaggctctaccgcagcgtcagaaaaaacagcaaactgtgactctgctgccagctgcggacctggatgatttttccaagcagctgcaacagtctatgagctctgcggactctacgcaggcttaa

SEQ ID NO: 239 - DNA, 2016 bp, Artificial Sequence
  Description of Artificial Sequence: Synthetic polynucleotide
atgcaccatcatcaccatcatggtggttctggttcgccgatacttggttattggaagattaaaggactggttcagcccacacgcctcctgctagaatacttagaggaaaaatatgaagagcacctgtacgaacgtgatgagggggacaaatggcgaaacaagaaatttgaattgggcttagaatttccaaatttgccgtattatatcgatggcgacgtaaaactgacccaatcaatggccattattcgctacatcgcagataaacataacatgctgggtggctgccctaaagaacgggctgagatctccatgctggaaggtgcggtgctcgacattcgctacggcgtcagtagaattgcgtatagcaaggatttcgaaactttaaaagtggatttcctgagcaaacttccggagatgctgaaaatgtttgaggataggctttgtcataagacgtatctcaatggtgatcatgttacccacccggactttatgctgtacgacgcccttgatgtcgttctgtatatggatcccatgtgcctggacgccttcccgaaattagtgtgttttaaaaaacgtatcgaagcgattccacagatcgataaatacttgaagtcttctaaatatattgcttggcctctgcaaggctggcaggcaacgttcggtgggggagatcatccgccaaaatcagatctggtgccgcgtgggagccctggcatacaccgcgacggtggttctggtgagaacctgtactttcaaagctcagataatgggcctcaaaaccagcgcaacgctccacgtataaccttcggtggcccgtctgactccacaggcagcaaccagaatggtgagcgtagtggagccaggtctaagcagcgccgtccccagggtctgccgaacaacacggcgagctggtttactgcgcttacccaacacggtaaagaagacttaaaattcccgcgtggccagggcgtcccgatcaacactaactcttccccggatgatcagattggttattaccgcagagcaactcgtcggattcgcggcggcgacggtaaaatgaaagatttgtctccgcgttggtacttttactatctcggcaccggtccggaagctggactgccctacggggcaaacaaggacgggatcatttgggtggctaccgaaggtgccctgaatactccaaaagatcatatcggcacccgtaaccctgctaattatgctgcgatcgttctgcaactgcctcagggtacaactctgccaaaaggcttctatgcagaagggtcgcgtggtggcagccaggcgagtagccgtagcagctcccgctctcgcaactcgtcccgtaactccactccgggctcttctcgcggcacgtccccggctcgtatggcaggtaacggtggtgacgctgctctggcgctgctactgctggacaggctgaaccagctggagtcgaagatgagtggtaaaggccaacagcagcagggccagaccgttaccaaaaagagcgcagctgaagcatctaaaaaaccgcgacagaaacgtaccgcgactaaagcgtacaatgtaacacaggccttcggtcgtcgaggtccggagcaaactcaaggaaactttggcgatcaggaattaatccgccaggggaccgactacaaacactggccgcaaattgcccagttcgccccatccgctagtgcattcttcggtatgagccgcatcggcatggaagtaacgccaagtggtacgtggctgacctacaccggtgctatcaagcttgatgacaaggacccgaactttaaagaccaggttattctgcttaacaaacatattgatgcctataaaactttcccgccgaccgaacccaaaaaggacaaaaagaaaaaagctgatgaaacccaggctctaccgcagcgtcagaaaaaacagcaaactgtgactctgctgccagctgcggacctggatgatttttccaagcagctgcaacagtctatgagctctgcggactctacgcaggcttaa

SEQ ID NO: 240 - DNA, 2016 bp, Artificial Sequence
  Description of Artificial Sequence: Synthetic polynucleotide
atgcaccatcatcaccatcatggtggttctggttcgccgatacttggttattggaagattaaaggactggttcagcccacacgcctcctgctagaatacttagaggaaaaatatgaagagcacctgtacgaacgtgatgagggggacaaatggcgaaacaagaaatttgaattgggcttagaatttccaaatttgccgtattatatcgatggcgacgtaaaactgacccaatcaatggccattattcgctacatcgcagataaacataacatgctgggtggctgccctaaagaacgggctgagatctccatgctggaaggtgcggtgctcgacattcgctacggcgtcagtagaattgcgtatagcaaggatttcgaaactttaaaagtggatttcctgagcaaacttccggagatgctgaaaatgtttgaggataggctttgtcataagacgtatctcaatggtgatcatgttacccacccggactttatgctgtacgacgcccttgatgtcgttctgtatatggatcccatgtgcctggacgccttcccgaaattagtgtgttttaaaaaacgtatcgaagcgattccacagatcgataaatacttgaagtcttctaaatatattgcttggcctctgcaaggctggcaggcaacgttcggtgggggagatcatccgccaaaatcagatctggtgccgcgtgggagccctggcatacaccgcgacggtggttctggtgagaacctgtactttcaaagctcagataatgggcctcaaaaccagcgcaacgctccacgtataaccttcggtggcccgtctgactccacaggcagcaaccagaatggtgagcgtagtggagccaggtctaagcagcgccgtccccagggtctgccgaacaacacggcgagctggtttactgcgcttacccaacacggtaaagaagacttaaaattcccgcgtggccagggcgtcccgatcaacactaactcttccccggatgatcagattggttattaccgcagagcaactcgtcggattcgcggcggcgacggtaaaatgaaagatttgtctccgcgttggtacttttactatctcggcaccggtccggaagctggactgccctacggggcaaacaaggacgggatcatttgggtggctaccgaaggtgccctgaatactccaaaagatcatatcggcacccgtaaccctgctaataacgctgcgatcgttctgcaactgcctcagggtacaactctgccaaaaggcttctatgcagaagggtcgcgtggtggcagccaggcgagtagccgtagcagctcccgctctcgcaactcgtcccgtaactccactccgggctcttctcgcggcacgtccccggctcgtatggcaggtaacggtggtgacgctgctctggcgctgctactgctggacaggctgaaccagctggagtcgaagatgagtggtaaaggccaacagcagcagggccagaccgttaccaaaaagagcgcagctgaagcatctaaaaaaccgcgacagaaacgtaccgcgactaaagattacaatgtaacacaggccttcggtcgtcgaggtccggagcaaactcaaggaaactttggcgatcaggatttaatcaagcttgggaccgactacaaacactggccgcaaattgcccagttcgccccatccgctagtgcattcttcggtatgagccgcatctcaacgcgcgaaacgccaagtggtacgtggctgacctacaccggtgctatcaagcttgataaaaaggacccgaactttaaagaccaggttattctgcttaacaaacatattgatgcctataaaactttcccgccgaccgaacccaaaaaggacaaaaagaaaaaagctgatgaaacccaggctctaccgcagcgtcagaaaaaacagcaaactgtgactctgctgccagctgcggacctggatgatttttccaagcagctgcaacagtctatgagctctgcggactctacgcaggcttaa

SEQ ID NO: 241 - DNA, 2016 bp, Artificial Sequence
  Description of Artificial Sequence: Synthetic polynucleotide
atgcaccatcatcaccatcatggtggttctggttcgccgatacttggttattggaagattaaaggactggttcagcccacacgcctcctgctagaatacttagaggaaaaatatgaagagcacctgtacgaacgtgatgagggggacaaatggcgaaacaagaaatttgaattgggcttagaatttccaaatttgccgtattatatcgatggcgacgtaaaactgacccaatcaatggccattattcgctacatcgcagataaacataacatgctgggtggctgccctaaagaacgggctgagatctccatgctggaaggtgcggtgctcgacattcgctacggcgtcagtagaattgcgtatagcaaggatttcgaaactttaaaagtggatttcctgagcaaacttccggagatgctgaaaatgtttgaggataggctttgtcataagacgtatctcaatggtgatcatgttacccacccggactttatgctgtacgacgcccttgatgtcgttctgtatatggatcccatgtgcctggacgccttcccgaaattagtgtgttttaaaaaacgtatcgaagcgattccacagatcgataaatacttgaagtcttctaaatatattgcttggcctctgcaaggctggcaggcaacgttcggtgggggagatcatccgccaaaatcagatctggtgccgcgtgggagccctggcatacaccgcgacggtggttctggtgagaacctgtactttcaaagctcagataatgggcctcaaaaccagcgcaacgctccacgtataaccttcggtggcccgtctgactccacaggcagcaaccagaatggtgagcgtagtggagccaggtctaagcagcgccgtccccagggtctgccgaacaacacggcgagctggtttactgcgcttacccaacacggtaaagaagacttaaaattcccgcgtggccagggcgtcccgatcaacactaactcttccccggatgatcagattggttattaccgcagagatactcgtcggattcgcggcggcgacggtaaaatgaaagatttgtctccgcgttggtacttttactatctcggcaccggtccggaagctggactgccctacggggcaaacaaggacgggatcatttgggtggctaccgaaggtgccctgaatactccaaaagatcatatcggcacccgtaaccctgctaataacgctgcgatcgttctgcaactgcctcagggtacaactctgccaaaaggcttctatgcagaagggtcgcgtggtggcagccaggcgagtagccgtagcagctcccgctctcgcaactcgtcccgtaactccactccgggctcttctcgcggcacgtccccggctcgtatggcaggtaacggtggtgacgctgctctggcgctgctactgctggacaggctgaaccagctggagtcgaagatgagtggtaaaggccaacagcagcagggccagaccgttaccaaaaagagcgcagctgaagcatctaaaaaaccgcgacagaaacgtaccgcgactaaagcgtacaatgtaacacaggccttcggtcgtcgaggtccggagcaaactcaaggaaactttggcgatcaggaattaatccgccaggggaccgactacaaacactggccgcaaattgcccagttcgccccatccgctagtgcattcttcggtatgagccgcatcggcatggaagtaacgccaagtggtacgtggctgacctacaccggtgctatcaagcttgatgacaaggacccgaactttaaagaccaggttattctgcttaacaaacatattgatgcctataaaactttcccgccgaccgaacccaaaaaggacaaaaagaaaaaagctgatgaaacccaggctctaccgcagcgtcagaaaaaacagcaaactgtgactctgctgccagctgcggacctggatgatttttccaagcagctgcaacagtctatgagctctgcggactctacgcaggcttaa

SEQ ID NO: 242 - DNA, 2016 bp, Artificial Sequence
  Description of Artificial Sequence: Synthetic polynucleotide
atgcaccatcatcaccatcatggtggttctggttcgccgatacttggttattggaagattaaaggactggttcagcccacacgcctcctgctagaatacttagaggaaaaatatgaagagcacctgtacgaacgtgatgagggggacaaatggcgaaacaagaaatttgaattgggcttagaatttccaaatttgccgtattatatcgatggcgacgtaaaactgacccaatcaatggccattattcgctacatcgcagataaacataacatgctgggtggctgccctaaagaacgggctgagatctccatgctggaaggtgcggtgctcgacattcgctacggcgtcagtagaattgcgtatagcaaggatttcgaaactttaaaagtggatttcctgagcaaacttccggagatgctgaaaatgtttgaggataggctttgtcataagacgtatctcaatggtgatcatgttacccacccggactttatgctgtacgacgcccttgatgtcgttctgtatatggatcccatgtgcctggacgccttcccgaaattagtgtgttttaaaaaacgtatcgaagcgattccacagatcgataaatacttgaagtcttctaaatatattgcttggcctctgcaaggctggcaggcaacgttcggtgggggagatcatccgccaaaatcagatctggtgccgcgtgggagccctggcatacaccgcgacggtggttctggtgagaacctgtactttcaaagctcagataatgggcctcaaaaccagcgcaacgctccacgtataaccttcggtggcccgtctgactccacaggcagcaaccagaatggtgagcgtagtggagccaggtctaagcagcgccgtccccagggtctgccgaacaacacggcgagctggtttactgcgcttacccaacacggtaaagaagacttaaaattcccgcgtggccagggcgtcccgatcaacactaactcttccccggatgatcagattggttattaccgcagagcaactcgtcggattcgcggcggcgacggtaaaatgaaagatttgtctccgcgttggtacttttactatctcggcaccggtccggaagctggactgccctacggggcaaacaaggacgggatcatttgggtggctaccgaaggtgccctgaatactccaaaagatcatatcggcacccgtaaccctgctaataacgctgcgatcgttctgcaactgcctcagggtacaactctgccaaaaggcttctatgcagaagggtcgcgtggtggcagccaggcgagtagccgtagcagctcccgctctcgcaactcgtcccgtaactccactccgggctcttctcgcggcacgtccccggctcgtatggcaggtaacggtggtgacgctgctctggcgctgctactgctggacaggctgaaccagctggagtcgaagatgagtggtaaaggccaacagcagcagggccagaccgttaccaaaaagagcgcagctgaagcatctaaaaaaccgcgacagaaacgtaccgcgactaaagcgtacaatgtaacacaggccttcggtcgtcgaggtccggagcaaactcaaggaaactttggcgatcaggaattagtgcgccaggggaccgactacaaacactggccgcaaattgcccagttcgccccatccgctagtgcattcttcggtatgagccgcatcggcatggaagtaacgccaagtggtacgtggctgacctacaccggtgctatcaagcttgatgacaaggacccgaactttaaagaccaggttattctgcttaacaaacatattgatgcctataaaactttcccgccgaccgaacccaaaaaggacaaaaagaaaaaagctgatgaaacccaggctctaccgcagcgtcagaaaaaacagcaaactgtgactctgctgccagctgcggacctggatgatttttccaagcagctgcaacagtctatgagctctgcggactctacgcaggcttaa

SEQ ID NO: 243 - DNA, 2016 bp, Artificial Sequence
  Description of Artificial Sequence: Synthetic polynucleotide
atgcaccatcatcaccatcatggtggttctggttcgccgatacttggttattggaagattaaaggactggttcagcccacacgcctcctgctagaatacttagaggaaaaatatgaagagcacctgtacgaacgtgatgagggggacaaatggcgaaacaagaaatttgaattgggcttagaatttccaaatttgccgtattatatcgatggcgacgtaaaactgacccaatcaatggccattattcgctacatcgcagataaacataacatgctgggtggctgccctaaagaacgggctgagatctccatgctggaaggtgcggtgctcgacattcgctacggcgtcagtagaattgcgtatagcaaggatttcgaaactttaaaagtggatttcctgagcaaacttccggagatgctgaaaatgtttgaggataggctttgtcataagacgtatctcaatggtgatcatgttacccacccggactttatgctgtacgacgcccttgatgtcgttctgtatatggatcccatgtgcctggacgccttcccgaaattagtgtgttttaaaaaacgtatcgaagcgattccacagatcgataaatacttgaagtcttctaaatatattgcttggcctctgcaaggctggcaggcaacgttcggtgggggagatcatccgccaaaatcagatctggtgccgcgtgggagccctggcatacaccgcgacggtggttctggtgagaacctgtactttcaaagctcagataatgggcctcaaaaccagcgcaacgctccacgtataaccttcggtggcccgtctgactccacaggcagcaaccagaatggtgagcgtagtggagccaggtctaagcagcgccgtccccagggtctgccgaacaacacggcgagctggtttactgcgcttacccaacacggtaaagaagacttaaaattcccgcgtggccagggcgtcccgatcaacactaactcttccccggatgatcagattggttattaccgcagagcaactcgtcggattcgcggcggcgacggtaaaatgaaagatttgtctccgcgttggtacttttactatctcggcaccggtccggaagctggactgccctacggggcaaacaaggacgggatcatttgggtggctaccgaaggtgccctgaatactccaaaagatcatatcggcacccgtaaccctgctaataacgctgcgatcgttctgcaactgcctcagggtacaactctgccaaaaggcttctatgcagaagggtcgcgtggtggcagccaggcgagtagccgtagcagctcccgctctcgcaactcgtcccgtaactccactccgggctcttctcgcggcacgtccccggctcgtatggcaggtaacggtggtgacgctgctctggcgctgctactgctggacaggctgaaccagctggagtcgaagatgagtggtaaaggccaacagcagcagggccagaccgttaccaaaaagagcgcagctgaagcatctaaaaaaccgcgacagaaacgtaccgcgactaaagggtacaatgtaacacaggccttcggtcgtcgaggtccggagcaaactcaaggaaactttggcgatcaggatttaatcaaattagggaccgactacaaacactggccgcaaattgcccagttcgccccatccgctagtgcattcttcggtatgagccgcatcagtacgcgtgaaacgccaagtggtacgtggctgacctacaccggtgctatcaagcttgataagaaggacccgaactttaaagaccaggttattctgcttaacaaacatattgatgcctataaaactttcccgccgaccgaacccaaaaaggacaaaaagaaaaaagctgatgaaacccaggctctaccgcagcgtcagaaaaaacagcaaactgtgactctgctgccagctgcggacctggatgatttttccaagcagctgcaacagtctatgagctctgcggactctacgcaggcttaa

SEQ ID NO: 244 - DNA, 2016 bp, Artificial Sequence
  Description of Artificial Sequence: Synthetic polynucleotide
atgcaccatcatcaccatcatggtggttctggttcgccgatacttggttattggaagattaaaggactggttcagcccacacgcctcctgctagaatacttagaggaaaaatatgaagagcacctgtacgaacgtgatgagggggacaaatggcgaaacaagaaatttgaattgggcttagaatttccaaatttgccgtattatatcgatggcgacgtaaaactgacccaatcaatggccattattcgctacatcgcagataaacataacatgctgggtggctgccctaaagaacgggctgagatctccatgctggaaggtgcggtgctcgacattcgctacggcgtcagtagaattgcgtatagcaaggatttcgaaactttaaaagtggatttcctgagcaaacttccggagatgctgaaaatgtttgaggataggctttgtcataagacgtatctcaatggtgatcatgttacccacccggactttatgctgtacgacgcccttgatgtcgttctgtatatggatcccatgtgcctggacgccttcccgaaattagtgtgttttaaaaaacgtatcgaagcgattccacagatcgataaatacttgaagtcttctaaatatattgcttggcctctgcaaggctggcaggcaacgttcggtgggggagatcatccgccaaaatcagatctggtgccgcgtgggagccctggcatacaccgcgacggtggttctggtgagaacctgtactttcaaagctcagataatgggcctcaaaaccagcgcaacgctccacgtataaccttcggtggcccgtctgactccacaggcagcaaccagaatggtgagcgtagtggagccaggtctaagcagcgccgtccccagggtctgccgaacaacacggcgagctggtttactgcgcttacccaacacggtaaagaagacttaaaattcccgcgtggccagggcgtcccgatcaacactaactcttccccggatgatcagattggttattaccgcagagcaactcgtcggattcgcggcggcgacggtaaaatgaaagatttgtctccgcgttggtacttttactatctcggcaccggtccggaagctaatctgccctacggggcaaacaaggacgggatcatttgggtggctaccgaaggtgccctgaatactccaaaagatcatatcggcacccgtaaccctgctaataacgctgcgatcgttctgcaactgcctcagggtacaactctgccaaaaggcttctatgcagaagggtcgcgtggtggcagccaggcgagtagccgtagcagctcccgctctcgcaactcgtcccgtaactccactccgggctcttctcgcggcacgtccccggctcgtatggcaggtaacggtggtgacgctgctctggcgctgctactgctggacaggctgaaccagctggagtcgaagatgagtggtaaaggccaacagcagcagggccagaccgttaccaaaaagagcgcagctgaagcatctaaaaaaccgcgacagaaacgtaccgcgactaaagcgtacaatgtaacacaggccttcggtcgtcgaggtccggagcaaactcaaggaaactttggcgatcaggaattaatccgccaggggaccgactacaaacactggccgcaaattgcccagttcgccccatccgctagtgcattcttcggtatgagccgcatcggcatggaagtaacgccaagtggtacgtggctgacctacaccggtgctatcaagcttgatgacaaggacccgaactttaaagaccaggttattctgcttaacaaacatattgatgcctataaaactttcccgccgaccgaacccaaaaaggacaaaaagaaaaaagctgatgaaacccaggctctaccgcagcgtcagaaaaaacagcaaactgtgactctgctgccagctgcggacctggatgatttttccaagcagctgcaacagtctatgagctctgcggactctacgcaggcttaa

SEQ ID NO: 245 - DNA, 2016 bp, Artificial Sequence
  Description of Artificial Sequence: Synthetic polynucleotide
atgcaccatcatcaccatcatggtggttctggttcgccgatacttggttattggaagattaaaggactggttcagcccacacgcctcctgctagaatacttagaggaaaaatatgaagagcacctgtacgaacgtgatgagggggacaaatggcgaaacaagaaatttgaattgggcttagaatttccaaatttgccgtattatatcgatggcgacgtaaaactgacccaatcaatggccattattcgctacatcgcagataaacataacatgctgggtggctgccctaaagaacgggctgagatctccatgctggaaggtgcggtgctcgacattcgctacggcgtcagtagaattgcgtatagcaaggatttcgaaactttaaaagtggatttcctgagcaaacttccggagatgctgaaaatgtttgaggataggctttgtcataagacgtatctcaatggtgatcatgttacccacccggactttatgctgtacgacgcccttgatgtcgttctgtatatggatcccatgtgcctggacgccttcccgaaattagtgtgttttaaaaaacgtatcgaagcgattccacagatcgataaatacttgaagtcttctaaatatattgcttggcctctgcaaggctggcaggcaacgttcggtgggggagatcatccgccaaaatcagatctggtgccgcgtgggagccctggcatacaccgcgacggtggttctggtgagaacctgtactttcaaagctcagataatgggcctcaaaaccagcgcaacgctccacgtataaccttcggtggcccgtctgactccacaggcagcaaccagaatggtgagcgtagtggagccaggtctaagcagcgccgtccccagggtctgccgaacaacacggcgagctggtttactgcgcttacccaacacggtaaagaagacttaaaattcccgcgtggccagggcgtcccgatcaacactaactcttccccggatgatcagattggttattaccgcagagcaactcgtcggattcgcggcggcgacggtaaaatgaaagatttgtctccgcgttggtacttttactatctcggcaccggtccggaagctggactgccctacggggcaaacaaggacgggatcatttgggtggctaccgaaggtgccctgaatactccaaaagatcatatcggcacccgtaaccctgctaataacgctgcgatcgttctgcaactgcctcagggtacaactctgccaaaaggcttctatgcagaagggtcgcgtggtggcagccaggcgagtagccgtagcagctcccgctctcgcaactcgtcccgtaactccactccgggctcttctcgcggcacgtccccggctcgtatggcaggtaacggtggtgacgctgctctggcgctgctactgctggacaggctgaaccagctggagtcgaagatgagtggtaaaggccaacagcagcagggccagaccgttaccaaaaagagcgcagctgaagcatctaaaaaaccgcgacagaaacgtaccgcgactaaagggtacaatgtaacacaggccttcggtcgtcgaggtccggagcaaactcaaggaaactttggcgatcaggatttaatccgcgaagggaccgactacaaacactggccgcaaattgcccagttcgccccatccgctagtgcattcttcggtatgagccgcatctcgacggaagaaacgccaagtggtacgtggctgacctacaccggtgctatcaagcttgataaaaaggacccgaactttaaagaccaggttattctgcttaacaaacatattgatgcctataaaactttcccgccgaccgaacccaaaaaggacaaaaagaaaaaagctgatgaaacccaggctctaccgcagcgtcagaaaaaacagcaaactgtgactctgctgccagctgcggacctggatgatttttccaagcagctgcaacagtctatgagctctgcggactctacgcaggcttaa

SEQ ID NO: 246 - DNA, 2016 bp, Artificial Sequence
  Description of Artificial Sequence: Synthetic polynucleotide
atgcaccatcatcaccatcatggtggttctggttcgccgatacttggttattggaagattaaaggactggttcagcccacacgcctcctgctagaatacttagaggaaaaatatgaagagcacctgtacgaacgtgatgagggggacaaatggcgaaacaagaaatttgaattgggcttagaatttccaaatttgccgtattatatcgatggcgacgtaaaactgacccaatcaatggccattattcgctacatcgcagataaacataacatgctgggtggctgccctaaagaacgggctgagatctccatgctggaaggtgcggtgctcgacattcgctacggcgtcagtagaattgcgtatagcaaggatttcgaaactttaaaagtggatttcctgagcaaacttccggagatgctgaaaatgtttgaggataggctttgtcataagacgtatctcaatggtgatcatgttacccacccggactttatgctgtacgacgcccttgatgtcgttctgtatatggatcccatgtgcctggacgccttcccgaaattagtgtgttttaaaaaacgtatcgaagcgattccacagatcgataaatacttgaagtcttctaaatatattgcttggcctctgcaaggctggcaggcaacgttcggtgggggagatcatccgccaaaatcagatctggtgccgcgtgggagccctggcatacaccgcgacggtggttctggtgagaacctgtactttcaaagctcagataatgggcctcaaaaccagcgcaacgctccacgtataaccttcggtggcccgtctgactccacaggcagcaaccagaatggtgagcgtagtggagccaggtctaagcagcgccgtccccagggtctgccgaacaacacggcgagctggtttactgcgcttacccaacacggtaaagaagacttaaaattcccgcgtggccagggcgtcccgatcaacactaactcttccccggatgatcagattggttattaccgcagagcaactcgtcggattcgcggcggcgacggtaaaatgaaagatttgtctccgcgttggtacttttactatctcggcaccggtccggaagctggactgccctacggggcaaacaaggacgggatcatttgggtggctaccgaaggtgccctgaatactccaaaagatcatatcggcacccgtaaccctgctaataacgctgcgatcgttctgcaactgcctcagggtacaactctgccaaaaggcttctatgcagaagggtcgcgtggtggcagccaggcgagtagccgtagcagctcccgctctcgcaactcgtcccgtaactccactccgggctcttctcgcggcacgtccccggctcgtatggcaggtaacggtggtgacgctgctctggcgctgctactgctggacaggctgaaccagctggagtcgaagatgagtggtaaaggccaacagcagcagggccagaccgttaccaaaaaggatgcagctgaagcatctaaaaaaccgcgacagaaacgtaccgcgactaaagcgtacaatgtaacacaggccttcggtcgtcgaggtccggagcaaactcaaggaaactttggcgatcaggaattaatccgccaggggaccgactacaaacactggccgcaaattgcccagttcgccccatccgctagtgcattcttcggtatgagccgcatcggcatggaagtaacgccaagtggtacgtggctgacctacaccggtgctatcaagcttgatgacaaggacccgaactttaaagaccaggttattctgcttaacaaacatattgatgcctataaaactttcccgccgaccgaacccaaaaaggacaaaaagaaaaaagctgatgaaacccaggctctaccgcagcgtcagaaaaaacagcaaactgtgactctgctgccagctgcggacctggatgatttttccaagcagctgcaacagtctatgagctctgcggactctacgcaggcttaa

SEQ ID NO: 247 - DNA, 2016 bp, Artificial Sequence
  Description of Artificial Sequence: Synthetic polynucleotide
atgcaccatcatcaccatcatggtggttctggttcgccgatacttggttattggaagattaaaggactggttcagcccacacgcctcctgctagaatacttagaggaaaaatatgaagagcacctgtacgaacgtgatgagggggacaaatggcgaaacaagaaatttgaattgggcttagaatttccaaatttgccgtattatatcgatggcgacgtaaaactgacccaatcaatggccattattcgctacatcgcagataaacataacatgctgggtggctgccctaaagaacgggctgagatctccatgctggaaggtgcggtgctcgacattcgctacggcgtcagtagaattgcgtatagcaaggatttcgaaactttaaaagtggatttcctgagcaaacttccggagatgctgaaaatgtttgaggataggctttgtcataagacgtatctcaatggtgatcatgttacccacccggactttatgctgtacgacgcccttgatgtcgttctgtatatggatcccatgtgcctggacgccttcccgaaattagtgtgttttaaaaaacgtatcgaagcgattccacagatcgataaatacttgaagtcttctaaatatattgcttggcctctgcaaggctggcaggcaacgttcggtgggggagatcatccgccaaaatcagatctggtgccgcgtgggagccctggcatacaccgcgacggtggttctggtgagaacctgtactttcaaagctcagataatgggcctcaaaaccagcgcaacgctccacgtataaccttcggtggcccgtctgactccacaggcagcaaccagaatggtgagcgtagtggagccaggtctaagcagcgccgtccccagggtctgccgaacaacacggcgagctggtttactgcgcttacccaacacggtaaagaagacttaaaattcccgcgtggccagggcgtcccgatcaacactaactcttccccggatgatcagattggttattaccgcagagcaactcgtcggattcgcggcggcgacggtaaaatgaaagatttgtctccgcgttggtacttttactatctcggcaccggtccggaagctggactgccctacggggcaaacaaggacgggatcatttgggtggctaccgaaggtgccctgaatactccaaaagatcatatcggcacccgtaaccctgctaataacgctgcgatcgttctgcaactgcctcagggtacaactctgccaaaaggcttctatgcagaagggtcgcgtggtggcagccaggcgagtagccgtagcagctcccgctctcgcaactcgtcccgtaactccactccgggctcttctcgcggcacgtccccggctcgtatggcaggtaacggtggtgacgctgctctggcgctgctactgctggacaggctgaaccagctggagtcgaagatgagtggtaaaggccaacagcagcagggccagaccgttaccaaaaagagcgcagctgaagcatctaaacatccgcgacagaaacgtaccgcgactaaagcgtacaatgtaacacaggccttcggtcgtcgaggtccggagcaaactcaaggaaactttggcgatcaggaattaatccgccaggggaccgactacaaacactggccgcaaattgcccagttcgccccatccgctagtgcattcttcggtatgagccgcatcggcatggaagtaacgccaagtggtacgtggctgacctacaccggtgctatcaagcttgatgacaaggacccgaactttaaagaccaggttattctgcttaacaaacatattgatgcctataaaactttcccgccgaccgaacccaaaaaggacaaaaagaaaaaagctgatgaaacccaggctctaccgcagcgtcagaaaaaacagcaaactgtgactctgctgccagctgcggacctggatgatttttccaagcagctgcaacagtctatgagctctgcggactctacgcaggcttaa

SEQ ID NO: 248 - DNA, 2016 bp, Artificial Sequence
  Description of Artificial Sequence: Synthetic polynucleotide
atgcaccatcatcaccatcatggtggttctggttcgccgatacttggttattggaagattaaaggactggttcagcccacacgcctcctgctagaatacttagaggaaaaatatgaagagcacctgtacgaacgtgatgagggggacaaatggcgaaacaagaaatttgaattgggcttagaatttccaaatttgccgtattatatcgatggcgacgtaaaactgacccaatcaatggccattattcgctacatcgcagataaacataacatgctgggtggctgccctaaagaacgggctgagatctccatgctggaaggtgcggtgctcgacattcgctacggcgtcagtagaattgcgtatagcaaggatttcgaaactttaaaagtggatttcctgagcaaacttccggagatgctgaaaatgtttgaggataggctttgtcataagacgtatctcaatggtgatcatgttacccacccggactttatgctgtacgacgcccttgatgtcgttctgtatatggatcccatgtgcctggacgccttcccgaaattagtgtgttttaaaaaacgtatcgaagcgattccacagatcgataaatacttgaagtcttctaaatatattgcttggcctctgcaaggctggcaggcaacgttcggtgggggagatcatccgccaaaatcagatctggtgccgcgtgggagccctggcatacaccgcgacggtggttctggtgagaacctgtactttcaaagctcagataatgggcctcaaaaccagcgcaacgctccacgtataaccttcggtggcccgtctgactccacaggcagcaaccagaatggtgagcgtagtggagccaggtctaagcagcgccgtccccagggtctgccgaacaacacggcgagctggtttactgcgcttacccaacacggtaaagaagacttaaaattcccgcgtggccagggcgtcccgatcaacactaactcttccccggatgatcagattggttattaccgcagagcaactcgtcggattcgcggcggcgacggtaaaatgaaagatttgtctccgcgttggtacttttactatctcggcaccggtccggaagctggactgccctacggggcaaacaaggacgggatcatttgggtggctaccgaaggtgccctgaatactccaaaagatcatatcggcacccgtaaccctgctaataacgctgcgatcgttctgcaactgcctcagggtacaactctgccaaaaggcttctatgcagaagggtcgcgtggtggcagccaggcgagtagccgtagcagctcccgctctcgcaactcgtcccgtaactccactccgggctcttctcgcggcacgtccccggctcgtatggcaggtaacggtggtgacgctgctctggcgctgctactgctggacaggctgaaccagctggagtcgaagatgagtggtaaaggccaacagcagcagggccagaccgttaccaaaaagagcgcagctgaagcatctaaaaaaccgcgacagaaacgtaccgcgactaaagagtacaatgtaacacaggccttcggtcgtcgaggtccggagcaaactcaaggaaactttggcgatcaggatttaatcaaattggggaccgactacaaacactggccgcaaattgcccagttcgccccatccgctagtgcattcttcggtatgagccgcatcagcacggaagaaacgccaagtggtacgtggctgacctacaccggtgctatcaagcttgataaaaaggacccgaactttaaagaccaggttattctgcttaacaaacatattgatgcctataaaactttcccgccgaccgaacccaaaaaggacaaaaagaaaaaagctgatgaaacccaggctctaccgcagcgtcagaaaaaacagcaaactgtgactctgctgccagctgcggacctggatgatttttccaagcagctgcaacagtctatgagctctgcggactctacgcaggcttaa

SEQ ID NO: 249 - DNA, 2016 bp, Artificial Sequence
  Description of Artificial Sequence: Synthetic polynucleotide
atgcaccatcatcaccatcatggtggttctggttcgccgatacttggttattggaagattaaaggactggttcagcccacacgcctcctgctagaatacttagaggaaaaatatgaagagcacctgtacgaacgtgatgagggggacaaatggcgaaacaagaaatttgaattgggcttagaatttccaaatttgccgtattatatcgatggcgacgtaaaactgacccaatcaatggccattattcgctacatcgcagataaacataacatgctgggtggctgccctaaagaacgggctgagatctccatgctggaaggtgcggtgctcgacattcgctacggcgtcagtagaattgcgtatagcaaggatttcgaaactttaaaagtggatttcctgagcaaacttccggagatgctgaaaatgtttgaggataggctttgtcataagacgtatctcaatggtgatcatgttacccacccggactttatgctgtacgacgcccttgatgtcgttctgtatatggatcccatgtgcctggacgccttcccgaaattagtgtgttttaaaaaacgtatcgaagcgattccacagatcgataaatacttgaagtcttctaaatatattgcttggcctctgcaaggctggcaggcaacgttcggtgggggagatcatccgccaaaatcagatctggtgccgcgtgggagccctggcatacaccgcgacggtggttctggtgagaacctgtactttcaaagctcagataatgggcctcaaaaccagcgcaacgctccacgtataaccttcggtggcccgtctgactccacaggcagcaaccagaatggtgagcgtagtggagccaggtctaagcagcgccgtccccagggtctgccgaacaacacggcgagctggtttactgcgcttacccaacacggtaaagaagacttaaaattcccgcgtggccagggcgtcccgatcaacactaactcttccccggatgatcagattggttattaccgcagagcaactcgtcggattcgcggcggcgacggtaaaatgaaagatttgtctccgcgttggtacttttactatctcggcaccggtccggaagctggactgccctacggggcaaacaaggacgggatcatttgggtggctaccgaaggtgccctgaatactccaaaagatcatatcggcacccgtaaccctgctaataacgctgcgatcgttctgcaactgcctcagggtacaactctgccaaaaggcttctatgcagaagggtcgcgtggtggcagccaggcgagtagccgtagcagcgagcgctctcgcaactcgtcccgtaactccactccgggctcttctcgcggcacggaaccggctcgtatggcaggtaacggtggtgacgctgctctggcgctgctactgctggacaggctgaaccagctggagtcgaagatgagtggtaaaggccaacagcagcagggccagaccgttaccaaaaagagcgcagctgaagcatctaaaaaaccgcgacagaaacgtaccgcgactaaagcgtacaatgtaacacaggccttcggtcgtcgaggtccggagcaaactcaaggaaactttggcgatcaggaattaatccgccaggggaccgactacaaacactggccgcaaattgcccagttcgccccatccgctagtgcattcttcggtatgagccgcatcggcatggaagtaacgccaagtggtacgtggctgacctacaccggtgctatcaagcttgatgacaaggacccgaactttaaagaccaggttattctgcttaacaaacatattgatgcctataaaactttcccgccgaccgaacccaaaaaggacaaaaagaaaaaagctgatgaaacccaggctctaccgcagcgtcagaaaaaacagcaaactgtgactctgctgccagctgcggacctggatgatttttccaagcagctgcaacagtctatgagctctgcggactctacgcaggcttaa

SEQ ID NO: 250 - DNA, 2016 bp, Artificial Sequence
  Description of Artificial Sequence: Synthetic polynucleotide
atgcaccatcatcaccatcatggtggttctggttcgccgatacttggttattggaagattaaaggactggttcagcccacacgcctcctgctagaatacttagaggaaaaatatgaagagcacctgtacgaacgtgatgagggggacaaatggcgaaacaagaaatttgaattgggcttagaatttccaaatttgccgtattatatcgatggcgacgtaaaactgacccaatcaatggccattattcgctacatcgcagataaacataacatgctgggtggctgccctaaagaacgggctgagatctccatgctggaaggtgcggtgctcgacattcgctacggcgtcagtagaattgcgtatagcaaggatttcgaaactttaaaagtggatttcctgagcaaacttccggagatgctgaaaatgtttgaggataggctttgtcataagacgtatctcaatggtgatcatgttacccacccggactttatgctgtacgacgcccttgatgtcgttctgtatatggatcccatgtgcctggacgccttcccgaaattagtgtgttttaaaaaacgtatcgaagcgattccacagatcgataaatacttgaagtcttctaaatatattgcttggcctctgcaaggctggcaggcaacgttcggtgggggagatcatccgccaaaatcagatctggtgccgcgtgggagccctggcatacaccgcgacggtggttctggtgagaacctgtactttcaaagctcagataatgggcctcaaaaccagcgcaacgctccacgtataaccttcggtggcccgtctgactccacaggcagcaaccagaatggtgagcgtagtggagccaggtctaagcagcgccgtccccagggtctgccgaacaacacggcgagctggtttactgcgcttacccaacacggtaaagaagacttaaaattcccgcgtggccagggcgtcccgatcaacactaactcttccccggatgatcagattggttattaccgcagagcaactcgtcggattcgcggcggcgacggtaaaatgaaagatttgtctccgcgttggtacttttactatctcggcaccggtccggaagctggactgccctacggggcaaacaaggacgggatcatttgggtggctaccgaaggtgccctgaatactccaaaagatcatatcggcacccgtaaccctgctaataacgctgcgatcgttctgcaactgcctcagggtacaactctgccaaaaggcttctatgcagaagggtcgcgtggtggcagccaggcgagtagccgtagcagctcccgctctcgcaactcgtcccgtaactccactccgggctcttctcgcggcacgtccccggctcgtatggcaggtaacggtggtgacgctgctctggcgctgctactgctggacaggctgaaccagctggagtcgaagatgagtggtaaaggccaacagcagcagggccagaccgttaccaaaaagagcgcagctgaagcatctaaaaaaccgcgacagaaacgtaccgcgactaaagcgtacaatgtaacacaggccttcggtcgtcgaggtccggagcaaactcaaggaaactttggcgatcaggaattaatccgccaggggaccgactacaaacactggccgcaaattgcccagttcgccccatccgctagtgcattcttcggtatgagccgcatcggcatggaagtaacgccaagtggtacgtggctgacctacaccggtgctatcaagcttgatgacaaggacccgaactttaaagagcaggttattctgcttaacaaacatattgatgcctataaaactttcccgccgaccgaacccaaaaaggacaaaaagaaaaaagctgatgaaacccaggctctaccgcagcgtcagaaaaaacagcaaactgtgactctgctgccagctgcggacctggatgatttttccaagcagctgcaacagtctatgagctctgcggactctacgcaggcttaa

SEQ ID NO: 251 - DNA, 2016 bp, Artificial Sequence
  Description of Artificial Sequence: Synthetic polynucleotide
atgcaccatcatcaccatcatggtggttctggttcgccgatacttggttattggaagattaaaggactggttcagcccacacgcctcctgctagaatacttagaggaaaaatatgaagagcacctgtacgaacgtgatgagggggacaaatggcgaaacaagaaatttgaattgggcttagaatttccaaatttgccgtattatatcgatggcgacgtaaaactgacccaatcaatggccattattcgctacatcgcagataaacataacatgctgggtggctgccctaaagaacgggctgagatctccatgctggaaggtgcggtgctcgacattcgctacggcgtcagtagaattgcgtatagcaaggatttcgaaactttaaaagtggatttcctgagcaaacttccggagatgctgaaaatgtttgaggataggctttgtcataagacgtatctcaatggtgatcatgttacccacccggactttatgctgtacgacgcccttgatgtcgttctgtatatggatcccatgtgcctggacgccttcccgaaattagtgtgttttaaaaaacgtatcgaagcgattccacagatcgataaatacttgaagtcttctaaatatattgcttggcctctgcaaggctggcaggcaacgttcggtgggggagatcatccgccaaaatcagatctggtgccgcgtgggagccctggcatacaccgcgacggtggttctggtgagaacctgtactttcaaagctcagataatgggcctcaaaaccagcgcaacgctccacgtataaccttcggtggcccgtctgactccacaggcagcaaccagaatggtgagcgtagtggagccaggtctaagcagcgccgtccccagggtctgccgaacaacacggcgagctggtttactgcgcttacccaacacggtaaagaagacttaaaattcccgcgtggccagggcgtcccgatcaacactaactcttccccggatgatcagattggttattaccgcagagcaactcgtcggattcgcggcggcgacggtaaaatgaaagatttgtctccgcgttggtacttttactatctcggcaccggtccggaagctggactgccctacggggcaaacaaggacgggatcatttgggtggctaccgaaggtgccctgaatactccaaaagatcatatcggcacccgtaaccctgctaataacgctgcgatcgttctgcaactgcctcagggtacaactctgccaaaaggcttctatgcagaagggtcgcgtggtggcagccaggcgagtagccgtagcagctcccgctctcgcaactcgtcccgtaactccactccgggctcttctcgcggcacgtccccggctcgtatggcaggtaacggtggtgacgctgctctggcgctgctactgctggacaggctgaaccagctggagtcgaagatgagtggtaaaggccaacagcagcagggccagaccgttaccaaaaagagcgcagctgaagcatctaaaaaaccgcgacagaaacgtaccgcgactaaagggtacaatgtaacacaggccttcggtcgtcgaggtccggagcaaactcaaggaaactttggcgatcaggatttaatccgcttggggaccgactacaaacactggccgcaaattgcccagttcgccccatccgctagtgcattcttcggtatgagccgcatcggcatggaagtaacgccaagtggtacgtggctgacctacaccggtgctatcaagcttgatgacaaggacccgaactttaaagaccaggttattctgcttaacaaacatattgatgcctataaaactttcccgccgaccgaacccaaaaaggacaaaaagaaaaaagctgatgaaacccaggctctaccgcagcgtcagaaaaaacagcaaactgtgactctgctgccagctgcggacctggatgatttttccaagcagctgcaacagtctatgagctctgcggactctacgcaggcttaa

SEQ ID NO: 252 - DNA, 2016 bp, Artificial Sequence
  Description of Artificial Sequence: Synthetic polynucleotide
atgcaccatcatcaccatcatggtggttctggttcgccgatacttggttattggaagattaaaggactggttcagcccacacgcctcctgctagaatacttagaggaaaaatatgaagagcacctgtacgaacgtgatgagggggacaaatggcgaaacaagaaatttgaattgggcttagaatttccaaatttgccgtattatatcgatggcgacgtaaaactgacccaatcaatggccattattcgctacatcgcagataaacataacatgctgggtggctgccctaaagaacgggctgagatctccatgctggaaggtgcggtgctcgacattcgctacggcgtcagtagaattgcgtatagcaaggatttcgaaactttaaaagtggatttcctgagcaaacttccggagatgctgaaaatgtttgaggataggctttgtcataagacgtatctcaatggtgatcatgttacccacccggactttatgctgtacgacgcccttgatgtcgttctgtatatggatcccatgtgcctggacgccttcccgaaattagtgtgttttaaaaaacgtatcgaagcgattccacagatcgataaatacttgaagtcttctaaatatattgcttggcctctgcaaggctggcaggcaacgttcggtgggggagatcatccgccaaaatcagatctggtgccgcgtgggagccctggcatacaccgcgacggtggttctggtgagaacctgtactttcaaagctcagataatgggcctcaaaaccagcgcaacgctccacgtataaccttcggtggcccgtctgactccacaggcagcaaccagaatggtgagcgtagtggagccaggtctaagcagcgccgtccccagggtctgccgaacaacacggcgagctggtttactccgcttacccaatttggtaaagaagacttaaaattcccgccgggccagggcgtcccgatcaacactaactcttccccggatgatcagattggttattaccgcagagcaactcgtcggattcgcggcggcgacggtaaaatgaaagatttgcctccgaaatggtacttttactatctcggcaccggtccgcatgctgatctgccctacgggcaaaagaaggacggggttttctgggtggctcgaccaggtgccctgaatactccaaaagatcatatcggcacccgtaaccctgctaataacgctgcgatcccactgcaactgcctccgggtacaaaactgccaaaaggcttctatgcagaagggtcgcgtggtggcagccaggcgagtagccgtagcagctcccgctctcgcaactcgtcccgtaactccactccgggctcttctcgcggcacgtccccggctcgtatggcaggtaacggtggtgacgctgctctggcgctgctactgctggacaggctgaaccagctggagtcgaagatgagtggtaaaggccaacagcagcagggccagaccgttaccaaaaagagcgcagctgaagcatctaaaaaaccgcgacagaaacgtaccgcgactaaagcgtacaatgtaacacaggccttcggtcgtcgaggtccggagcaaactcaaggaaactttggcgatcaggaattaatccgccaggggaccgactacaaacactggccgcaaattgcccagttcgccccatccgctagtgcattcttcggtatgagccgcatcggcatggaagtaacgccaagtggtacgtggctgacctacaccggtgctatcaagcttgatgacaaggacccgaactttaaagaccaggttattctgcttaacaaacatattgatgcctataaaactttcccgccgaccgaacccaaaaaggacaaaaagaaaaaagctgatgaaacccaggctctaccgcagcgtcagaaaaaacagcaaactgtgactctgctgccagctgcggacctggatgatttttccaagcagctgcaacagtctatgagctctgcggactctacgcaggcttaa

SEQ ID NO: 253 - DNA, 2016 bp, Artificial Sequence
  Description of Artificial Sequence: Synthetic polynucleotide
atgcaccatcatcaccatcatggtggttctggttcgccgatacttggttattggaagattaaaggactggttcagcccacacgcctcctgctagaatacttagaggaaaaatatgaagagcacctgtacgaacgtgatgagggggacaaatggcgaaacaagaaatttgaattgggcttagaatttccaaatttgccgtattatatcgatggcgacgtaaaactgacccaatcaatggccattattcgctacatcgcagataaacataacatgctgggtggctgccctaaagaacgggctgagatctccatgctggaaggtgcggtgctcgacattcgctacggcgtcagtagaattgcgtatagcaaggatttcgaaactttaaaagtggatttcctgagcaaacttccggagatgctgaaaatgtttgaggataggctttgtcataagacgtatctcaatggtgatcatgttacccacccggactttatgctgtacgacgcccttgatgtcgttctgtatatggatcccatgtgcctggacgccttcccgaaattagtgtgttttaaaaaacgtatcgaagcgattccacagatcgataaatacttgaagtcttctaaatatattgcttggcctctgcaaggctggcaggcaacgttcggtgggggagatcatccgccaaaatcagatctggtgccgcgtgggagccctggcatacaccgcgacggtggttctggtgagaacctgtactttcaaagctcagataatgggcctcaaaaccagcgcaacgctccacgtataaccttcggtggcccgtctgactccacaggcagcaaccagaatggtgagcgtagtggagccaggtctaagcagcgccgtccccagggtctgccgaacaacacggcgagctggtttactgcgcttacccaacacggtaaagaagacttaaaattcccgcgtggccagggcgtcccgatcaacactaactcttccccggatgatcagattggttattaccgcagagcaactcgtcggattcgcggcggcgacggtaaaatgaaagatttgtctccgcgttggtacttttactatctcggcaccggtccggaagctggactgccctacggggcaaacaaggacgggatcatttgggtggctaccgaaggtgccctgaatactccaaaagatcatatcggcacccgtaaccctgctaataacgctgcgatcgttctgcaactgcctcagggtacaactctgccaaaaggcttctatgcagaagggtcgcgtggtggcagccaggcgagtagccgtagcagctcccgctctcgcaactcgtcccgtaactccactccgggctcttctcgcggcacgtccccggctcgtatggcaggtaacggtggtgacgctgctctggcgctgctactgctggacaggctgaaccagctggagtcgaagatgagtggtaaaggccaacagcagcagggccagaccgttaccaaaaagagcgcagctgaagcatctaaaaaaccgcgacagaaacgtaccgcgactaaagcgtacaatgtaacacaggccttcggttcacgaggtccggagcaaactcaaggaaactttggcgatcaggaattaatccgccaggggaccgactacaaacactggccgcaaattgcccagttcgccccatccgctagtgcattcttcggtatgagccgcatcggcatggaagtaacgccaagtggtacgtggctgacctacaccggtgctatcaagcttgatgacaaggacccgaactttaaagaccaggttattctgcttaacaaacatattgatgcctataaaactttcccgccgaccgaacccaaaaaggacaaaaagaaaaaagctgatgaaacccaggctctaccgcagcgtcagaaaaaacagcaaactgtgactctgctgccagctgcggacctggatgatttttccaagcagctgcaacagtctatgagctctgcggactctacgcaggcttaa

SEQ ID NO: 254 - DNA, 2016 bp, Artificial Sequence
  Description of Artificial Sequence: Synthetic polynucleotide
atgcaccatcatcaccatcatggtggttctggttcgccgatacttggttattggaagattaaaggactggttcagcccacacgcctcctgctagaatacttagaggaaaaatatgaagagcacctgtacgaacgtgatgagggggacaaatggcgaaacaagaaatttgaattgggcttagaatttccaaatttgccgtattatatcgatggcgacgtaaaactgacccaatcaatggccattattcgctacatcgcagataaacataacatgctgggtggctgccctaaagaacgggctgagatctccatgctggaaggtgcggtgctcgacattcgctacggcgtcagtagaattgcgtatagcaaggatttcgaaactttaaaagtggatttcctgagcaaacttccggagatgctgaaaatgtttgaggataggctttgtcataagacgtatctcaatggtgatcatgttacccacccggactttatgctgtacgacgcccttgatgtcgttctgtatatggatcccatgtgcctggacgccttcccgaaattagtgtgttttaaaaaacgtatcgaagcgattccacagatcgataaatacttgaagtcttctaaatatattgcttggcctctgcaaggctggcaggcaacgttcggtgggggagatcatccgccaaaatcagatctggtgccgcgtgggagccctggcatacaccgcgacggtggttctggtgagaacctgtactttcaaagctcagataatgggcctcaaaaccagcgcaacgctccacgtataaccttcggtggcccgtctgactccacaggcagcaaccagaatggtgagcgtagtggagccaggtctaagcagcgccgtccccagggtctgccgaacaacacggcgagctggtttactgcgcttacccaacacggtaaagaagacttaaaattcccgcgtggccagggcgtcccgatcaacactaactcttccccggatgatcagattggttattaccgcagagcaactcgtcggattcgcggcggcgacggtaaaatgaaagatttgtctccgcgttggtacttttactatctcggcaccggtccggaagctggactgccctacggggcaaacaaggacgggatcatttgggtggctaccgaaggtgccctgaatactccaaaagatcatatcggcacccgtaaccctgctaataacgctgcgatcgttctgcaactgcctcagggtacaactctgccaaaaggcttctatgcagaagggtcgcgtggtggcagccaggcgagtagccgtagcagctcccgctctcgcaactcgtcccgtaactccactccgggctcttctcgcggcacgtccccggctcgtatggcaggtaacggtggtgacgctgctctggcgctgctactgctggacaggctgaaccagctggagtcgaagatgagtggtaaaggccaacagcagcagggccagaccgttaccaaaaagagcgcagctgaagcatctaaaaaaccgcgacagaaacgtaccgcgactaaagcgtacaatgtaacacaggccttcggtcgtcgaggtccggagcaaactcaaggaaactttggcgatcaggaattaatccgccaggggtcagactacaaacactggccgcaaattgcccagttcgccccatccgctagtgcattcttcggtatgagccgcatcggcatggaagtaacgccaagtggtacgtggctgacctacaccggtgctatcaagcttgatgacaaggacccgaactttaaagaccaggttattctgcttaacaaacatattgatgcctataaaactttcccgccgaccgaacccaaaaaggacaaaaagaaaaaagctgatgaaacccaggctctaccgcagcgtcagaaaaaacagcaaactgtgactctgctgccagctgcggacctggatgatttttccaagcagctgcaacagtctatgagctctgcggactctacgcaggcttaa

SEQ ID NO: 255 - DNA, 2016 bp, Artificial Sequence
  Description of Artificial Sequence: Synthetic polynucleotide
atgcaccatcatcaccatcatggtggttctggttcgccgatacttggttattggaagattaaaggactggttcagcccacacgcctcctgctagaatacttagaggaaaaatatgaagagcacctgtacgaacgtgatgagggggacaaatggcgaaacaagaaatttgaattgggcttagaatttccaaatttgccgtattatatcgatggcgacgtaaaactgacccaatcaatggccattattcgctacatcgcagataaacataacatgctgggtggctgccctaaagaacgggctgagatctccatgctggaaggtgcggtgctcgacattcgctacggcgtcagtagaattgcgtatagcaaggatttcgaaactttaaaagtggatttcctgagcaaacttccggagatgctgaaaatgtttgaggataggctttgtcataagacgtatctcaatggtgatcatgttacccacccggactttatgctgtacgacgcccttgatgtcgttctgtatatggatcccatgtgcctggacgccttcccgaaattagtgtgttttaaaaaacgtatcgaagcgattccacagatcgataaatacttgaagtcttctaaatatattgcttggcctctgcaaggctggcaggcaacgttcggtgggggagatcatccgccaaaatcagatctggtgccgcgtgggagccctggcatacaccgcgacggtggttctggtgagaacctgtactttcaaagctcagataatgggcctcaaaaccagcgcaacgctccacgtataaccttcggtggcccgtctgactccacaggcagcaaccagaatggtgagcgtagtggagccaggtctaagcagcgccgtccccagggtctgccgaacaacacggcgagctggtttactgcgcttacccaacacggtaaagaagacttaaaattcccgcgtggccagggcgtcccgatcaacactaactcttccccggatgatcagattggttattaccgcagagcaactcgtcggattcgcggcggcgacggtaaaatgaaagatttgtctccgcgttggtacttttactatctcggcaccggtccggaagctggactgccctacggggcaaacaaggacgggatcatttgggtggctaccgaaggtgccctgaatactccaaaagatcatatcggcacccgtaaccctgctaataacgctgcgatcgttctgcaactgcctcagggtacaactctgccaaaaggcttctatgcagaagggtcgcgtggtggcagccaggcgagtagccgtagcagctcccgctctcgcaactcgtcccgtaactccactccgggctcttctcgcggcacggagccggctcgtatggcaggtaacggtggtgacgctgctctggcgctgctactgctggacaggctgaaccagctggagtcgaagatgagtggtaaaggccaacagcagcagggccagaccgttaccaaaaagagcgcagctgaagcatctaaaaaaccgcgacagaaacgtaccgcgactaaagcgtacaatgtaacacaggccttcggtcgtcgaggtccggagcaaactcaaggaaactttggcgatcaggaattaatccgccaggggaccgactacaaacactggccgcaaattgcccagttcgccccatccgctagtgcattcttcggtatgagccgcatcggcatggaagtaacgccaagtggtacgtggctgacctacaccggtgctatcaagcttgatgacaaggacccgaactttaaagaccaggttattctgcttaacaaacatattgatgcctataaaactttcccgccgaccgaacccaaaaaggacaaaaagaaaaaagctgatgaaacccaggctctaccgcagcgtcagaaaaaacagcaaactgtgactctgctgccagctgcggacctggatgatttttccaagcagctgcaacagtctatgagctctgcggactctacgcaggcttaa

SEQ ID NO: 256 - DNA, 2016 bp, Artificial Sequence
  Description of Artificial Sequence: Synthetic polynucleotide
atgcaccatcatcaccatcatggtggttctggttcgccgatacttggttattggaagattaaaggactggttcagcccacacgcctcctgctagaatacttagaggaaaaatatgaagagcacctgtacgaacgtgatgagggggacaaatggcgaaacaagaaatttgaattgggcttagaatttccaaatttgccgtattatatcgatggcgacgtaaaactgacccaatcaatggccattattcgctacatcgcagataaacataacatgctgggtggctgccctaaagaacgggctgagatctccatgctggaaggtgcggtgctcgacattcgctacggcgtcagtagaattgcgtatagcaaggatttcgaaactttaaaagtggatttcctgagcaaacttccggagatgctgaaaatgtttgaggataggctttgtcataagacgtatctcaatggtgatcatgttacccacccggactttatgctgtacgacgcccttgatgtcgttctgtatatggatcccatgtgcctggacgccttcccgaaattagtgtgttttaaaaaacgtatcgaagcgattccacagatcgataaatacttgaagtcttctaaatatattgcttggcctctgcaaggctggcaggcaacgttcggtgggggagatcatccgccaaaatcagatctggtgccgcgtgggagccctggcatacaccgcgacggtggttctggtgagaacctgtactttcaaagctcagataatgggcctcaaaaccagcgcaacgctccacgtataaccttcggtggcccgtctgactccacaggcagcaaccagaatggtgagcgtagtggagccaggtctaagcagcgccgtccccagggtctgccgaacaacacggcgagctggtttactgcgcttacccaacacggtaaagaagacttaaaattcccgcgtggccagggcgtcccgatcaacactaactcttccccggatgatcagattggttattaccgcagagcaactcgtcggattcgcggcggcgacggtaaaatgaaagatttgtctccgcgttggtacttttactatctcggcaccggtccggaagctggactgccctacggggcaaacaaggacgggatcatttgggtggctaccgaaggtgccctgaatactccaaaagatcatatcggcacccgtaaccctgctaataacgctgcgatcgttctgcaactgcctcagggtacaactctgccaaaaggcttctatgcagaagggtcgcgtggtggcagccaggcgagtagccgtagcagctcccgctctcgcaactcgtcccgtaactccactccgggctcttctcgcggcacgtccccggctcgtatggcaggtaacggtggtgacgctgctctggcgctgctactgctggacaggctgaaccagctggagtcgaagatgagtggtaaaggccaacagcagcagggccagaccgttaccaaaaagagcgcagctgaagcatctaaaaaaccgcgacagaaacgtaccgcgactaaagcgtacaatgtaacacaggccttcggtcgtcgaggtccggagcaaactcaaggaaactttggcgatcaggaattaatccgccaggggaccgactacaaacactggccgcaaattgcccagttcgccccatccgctagtgcattcttcggtatgagccgcatcggcatggaagtaacgccaagtggtacgtggctgacctacaccggtgctatcaagcttgatgacaaggacccgaactttaaagaccaggttgagctgcttaacaaacatattgatgcctataaaactttcccgccgaccgaacccaaaaaggacaaaaagaaaaaagctgatgaaacccaggctctaccgcagcgtcagaaaaaacagcaaactgtgactctgctgccagctgcggacctggatgatttttccaagcagctgcaacagtctatgagctctgcggactctacgcaggcttaa

SEQ ID NO: 257 - DNA, 2016 bp, Artificial Sequence
  Description of Artificial Sequence: Synthetic polynucleotide
atgcaccatcatcaccatcatggtggttctggttcgccgatacttggttattggaagattaaaggactggttcagcccacacgcctcctgctagaatacttagaggaaaaatatgaagagcacctgtacgaacgtgatgagggggacaaatggcgaaacaagaaatttgaattgggcttagaatttccaaatttgccgtattatatcgatggcgacgtaaaactgacccaatcaatggccattattcgctacatcgcagataaacataacatgctgggtggctgccctaaagaacgggctgagatctccatgctggaaggtgcggtgctcgacattcgctacggcgtcagtagaattgcgtatagcaaggatttcgaaactttaaaagtggatttcctgagcaaacttccggagatgctgaaaatgtttgaggataggctttgtcataagacgtatctcaatggtgatcatgttacccacccggactttatgctgtacgacgcccttgatgtcgttctgtatatggatcccatgtgcctggacgccttcccgaaattagtgtgttttaaaaaacgtatcgaagcgattccacagatcgataaatacttgaagtcttctaaatatattgcttggcctctgcaaggctggcaggcaacgttcggtgggggagatcatccgccaaaatcagatctggtgccgcgtgggagccctggcatacaccgcgacggtggttctggtgagaacctgtactttcaaagctcagataatgggcctcaaaaccagcgcaacgctccacgtataaccttcggtggcccgtctgactccacaggcagcaaccagaatggtgagcgtagtggagccaggtctaagcagcgccgtccccagggtctgccgaacaacacggcgagctggtttactgcgcttacccaacacggtaaagaagacttaaaattcccgcgtggccagggcgtcccgatcaacactaactcttccccggatgatcagattggttattaccgcagagcaactcgtcggattcgcggcggcgacggtaaaatgaaagatttgtctccgcgttggtacttttactatctcggcaccggtccggaagctggactgccctacggggcaaacaaggacgggatcatttgggtggctaccgaaggtgccctgaatactccaaaagatcatatcggcacccgtaaccctgctaataacgctgcgatcgttctgcaactgcctcagggtacaactctgccaaaaggcttctatgcagaagggtcgcgtggtggcagccaggcgagtagccgtagcagctcccgctctcgcaactcgtcccgtaactccactccgggctcttctcgcggcacgtccccggctcgtatggcaggtaacggtggtgacgctgctctggcgctgctactgctggacaggctgaaccagctggagtcgaagatgagtggtaaaggccaacagcagcagggccagaccgttaccaaaaagagcgcagctgaagcatctaaaaaaccgcgacagaaacgtaccgcgactaaagcgtacaatgtaacacaggccttcggtcgtcgaggtccggagcaaactcaaggaaactttggcgatcaggaattaatccgccaggggaccgactacaaacactggccgcaaattgcccagttcgccccatccgctagtgcattcttcggtatgagccgcatcggcatggaaattacgccaagtggtacgtggctgacctacaccggtgctatcaagcttgatgacaaggacccgaactttaaagaccaggttattctgcttaacaaacatattgatgcctataaaactttcccgccgaccgaacccaaaaaggacaaaaagaaaaaagctgatgaaacccaggctctaccgcagcgtcagaaaaaacagcaaactgtgactctgctgccagctgcggacctggatgatttttccaagcagctgcaacagtctatgagctctgcggactctacgcaggcttaa

SEQ ID NO: 258 - DNA, 2016 bp, Artificial Sequence
  Description of Artificial Sequence: Synthetic polynucleotide
atgcaccatcatcaccatcatggtggttctggttcgccgatacttggttattggaagattaaaggactggttcagcccacacgcctcctgctagaatacttagaggaaaaatatgaagagcacctgtacgaacgtgatgagggggacaaatggcgaaacaagaaatttgaattgggcttagaatttccaaatttgccgtattatatcgatggcgacgtaaaactgacccaatcaatggccattattcgctacatcgcagataaacataacatgctgggtggctgccctaaagaacgggctgagatctccatgctggaaggtgcggtgctcgacattcgctacggcgtcagtagaattgcgtatagcaaggatttcgaaactttaaaagtggatttcctgagcaaacttccggagatgctgaaaatgtttgaggataggctttgtcataagacgtatctcaatggtgatcatgttacccacccggactttatgctgtacgacgcccttgatgtcgttctgtatatggatcccatgtgcctggacgccttcccgaaattagtgtgttttaaaaaacgtatcgaagcgattccacagatcgataaatacttgaagtcttctaaatatattgcttggcctctgcaaggctggcaggcaacgttcggtgggggagatcatccgccaaaatcagatctggtgccgcgtgggagccctggcatacaccgcgacggtggttctggtgagaacctgtactttcaaagctcagataatgggcctcaaaaccagcgcaacgctccacgtataaccttcggtggcccgtctgactccacaggcagcaaccagaatggtgagcgtagtggagccaggtctaagcagcgccgtccccagggtctgccgaacaacacggcgagctggtttactccgcttgtgcaatttggtaaagaagacttaaaattcccgccgggccagggcgtcccgatcaacactaactcttccccggatgatcagattggttattaccgcagagcaactcgtcggattcgcggcggcgacggtaaaatgaaagatttgcctccgaagtggtacttttactatctcggcaccggtccgcatgctgatctgccctacgggcaaaaacaagacggggtattctgggtggctcggccaggtgccctgaatactccaaaagatcatatcggcacccgtaaccctgctaataacgctgcgatccctctgcaactgcctccgggtacaaaactgccaaaaggcttctatgcagaagggtcgcgtggtggcagccaggcgagtagccgtagcagctcccgctctcgcaactcgtcccgtaactccactccgggctcttctcgcggcacgtccccggctcgtatggcaggtaacggtggtgacgctgctctggcgctgctactgctggacaggctgaaccagctggagtcgaagatgagtggtaaaggccaacagcagcagggccagaccgttaccaaaaagagcgcagctgaagcatctaaaaaaccgcgacagaaacgtaccgcgactaaagcgtacaatgtaacacaggccttcggtcgtcgaggtccggagcaaactcaaggaaactttggcgatcaggaattaatccgccaggggaccgactacaaacactggccgcaaattgcccagttcgccccatccgctagtgcattcttcggtatgagccgcatcggcatggaagtaacgccaagtggtacgtggctgacctacaccggtgctatcaagcttgatgacaaggacccgaactttaaagaccaggttattctgcttaacaaacatattgatgcctataaaactttcccgccgaccgaacccaaaaaggacaaaaagaaaaaagctgatgaaacccaggctctaccgcagcgtcagaaaaaacagcaaactgtgactctgctgccagctgcggacctggatgatttttccaagcagctgcaacagtctatgagctctgcggactctacgcaggcttaa

SEQ ID NO: 259 - DNA, 2016 bp, Artificial Sequence
  Description of Artificial Sequence: Synthetic polynucleotide
atgcaccatcatcaccatcatggtggttctggttcgccgatacttggttattggaagattaaaggactggttcagcccacacgcctcctgctagaatacttagaggaaaaatatgaagagcacctgtacgaacgtgatgagggggacaaatggcgaaacaagaaatttgaattgggcttagaatttccaaatttgccgtattatatcgatggcgacgtaaaactgacccaatcaatggccattattcgctacatcgcagataaacataacatgctgggtggctgccctaaagaacgggctgagatctccatgctggaaggtgcggtgctcgacattcgctacggcgtcagtagaattgcgtatagcaaggatttcgaaactttaaaagtggatttcctgagcaaacttccggagatgctgaaaatgtttgaggataggctttgtcataagacgtatctcaatggtgatcatgttacccacccggactttatgctgtacgacgcccttgatgtcgttctgtatatggatcccatgtgcctggacgccttcccgaaattagtgtgttttaaaaaacgtatcgaagcgattccacagatcgataaatacttgaagtcttctaaatatattgcttggcctctgcaaggctggcaggcaacgttcggtgggggagatcatccgccaaaatcagatctggtgccgcgtgggagccctggcatacaccgcgacggtggttctggtgagaacctgtactttcaaagctcagataatgggcctcaaaaccagcgcaacgctccacgtataaccttcggtggcccgtctgactccacaggcagcaaccagaatggtgagcgtagtggagccaggtctaagcagcgccgtccccagggtctgccgaacaacacggcgagctggtttactgcgcttacccaacacggtaaagaagacttaaaattcccgcgtggccagggcgtcccgatcaacactaactcttccccggatgatcagattggttattaccgcagagcaactcgtcggattcgcggcggcgacggtaaaatgaaagatttgtctccgcgttggtacttttactatctcggcaccggtccggaagctggactgccctacggggcaaacaaggacgggatcatttgggtggctaccgaaggtgccctgaatactccaaaagatcatatcggcacccgtaaccctgctaataacgctgcgatcgttctgcaactgcctcagggtacaactctgccaaaaggcttctatgcagaagggtcgcgtggtggcagccaggcgagtagccgtagcagctcccgctctcgcaactcgtcccgtaactccactccgggctcttctcgcggcacgtccccggctcgtatggcaggtaacggtggtgacgctgctctggcgctgctactgctggacaggctgaaccagctggagtcgaagatgagtggtaaaggccaacagcagcagggccagaccgttaccaaaaagagcgcagctgaagcatctaaaaaaccgcgacagaaacgtaccgcgactaaagcgtacaatgtaacacaggccttcggtcgtcgaggtccggagcaaactcaaggaaactttggcgatcaggaattaatccgcaaagggaccgactacaaacactggccgcaaattgcccagttcgccccatccgctagtgcattcttcggtatgagccgcatcggcatggaagtaacgccaagtggtacgtggctgacctacaccggtgctatcaagcttgatgacaaggacccgaactttaaagaccaggttattctgcttaacaaacatattgatgcctataaaactttcccgccgaccgaacccaaaaaggacaaaaagaaaaaagctgatgaaacccaggctctaccgcagcgtcagaaaaaacagcaaactgtgactctgctgccagctgcggacctggatgatttttccaagcagctgcaacagtctatgagctctgcggactctacgcaggcttaa

SEQ ID NO: 260 - DNA, 2016 bp, Artificial Sequence
  Description of Artificial Sequence: Synthetic polynucleotide
atgcaccatcatcaccatcatggtggttctggttcgccgatacttggttattggaagattaaaggactggttcagcccacacgcctcctgctagaatacttagaggaaaaatatgaagagcacctgtacgaacgtgatgagggggacaaatggcgaaacaagaaatttgaattgggcttagaatttccaaatttgccgtattatatcgatggcgacgtaaaactgacccaatcaatggccattattcgctacatcgcagataaacataacatgctgggtggctgccctaaagaacgggctgagatctccatgctggaaggtgcggtgctcgacattcgctacggcgtcagtagaattgcgtatagcaaggatttcgaaactttaaaagtggatttcctgagcaaacttccggagatgctgaaaatgtttgaggataggctttgtcataagacgtatctcaatggtgatcatgttacccacccggactttatgctgtacgacgcccttgatgtcgttctgtatatggatcccatgtgcctggacgccttcccgaaattagtgtgttttaaaaaacgtatcgaagcgattccacagatcgataaatacttgaagtcttctaaatatattgcttggcctctgcaaggctggcaggcaacgttcggtgggggagatcatccgccaaaatcagatctggtgccgcgtgggagccctggcatacaccgcgacggtggttctggtgagaacctgtactttcaaagctcagataatgggcctcaaaaccagcgcaacgctccacgtataaccttcggtggcccgtctgactccacaggcagcaaccagaatggtgagcgtagtggagccaggtctaagcagcgccgtccccagggtctgccgaacaacacggcgagctggtttactgcgcttacccaacacggtaaagaagacttaaaattcccgcgtggccagggcgtcccgatcaacactaactcttccccggatgatcagattggttattaccgcagagcaactcgtcggattcgcggcggcgacggtaaaatgaaagatttgtctccgcgttggtacttttactatctcggcaccggtccggaagctggactgccctacggggcaaacaaggacgggatcatttgggtggctaccgaaggtgccctgaatactccaaaagatcatatcggcacccgtaaccctgctaataacgctgcgatcgttctgcaactgcctcagggtacaactctgccaaaaggcttctatgcagaagggtcgcgtggtggcagccaggcgagtagccgtagcagctcccgctctcgcaactcgtcccgtaactccactccgggctcttctcgcggcacgtccccggctcgtatggcaggtaacggtggtgacgctgctctggcgctgctactgctggacaggctgaaccagctggagtcgaagatgagtggtaaaggccaacagcagcagggccagaccgttaccaaaaagagcgcagctgaagcatctaaaaaaccgcgacagaaacgtaccgcgactaaagcgtgcaatgtaacacaggccttcggtcgtcgaggtccggagcaaactcaaggaaactttggcgatcaggaattaatccgccaggggaccgactacaaacactggccgcaaattgcccagttcgccccatccgctagtgcattcttcggtatgagccgcatcggcatggaagtaacgccaagtggtacgtggctgacctacaccggtgctatcaagcttgatgacaaggacccgaactttaaagaccaggttattctgcttaacaaacatattgatgcctataaaactttcccgccgaccgaacccaaaaaggacaaaaagaaaaaagctgatgaaacccaggctctaccgcagcgtcagaaaaaacagcaaactgtgactctgctgccagctgcggacctggatgatttttccaagcagctgcaacagtctatgagctctgcggactctacgcaggcttaa

SEQ ID NO: 261 - DNA, 2016 bp, Artificial Sequence
  Description of Artificial Sequence: Synthetic polynucleotide
atgcaccatcatcaccatcatggtggttctggttcgccgatacttggttattggaagattaaaggactggttcagcccacacgcctcctgctagaatacttagaggaaaaatatgaagagcacctgtacgaacgtgatgagggggacaaatggcgaaacaagaaatttgaattgggcttagaatttccaaatttgccgtattatatcgatggcgacgtaaaactgacccaatcaatggccattattcgctacatcgcagataaacataacatgctgggtggctgccctaaagaacgggctgagatctccatgctggaaggtgcggtgctcgacattcgctacggcgtcagtagaattgcgtatagcaaggatttcgaaactttaaaagtggatttcctgagcaaacttccggagatgctgaaaatgtttgaggataggctttgtcataagacgtatctcaatggtgatcatgttacccacccggactttatgctgtacgacgcccttgatgtcgttctgtatatggatcccatgtgcctggacgccttcccgaaattagtgtgttttaaaaaacgtatcgaagcgattccacagatcgataaatacttgaagtcttctaaatatattgcttggcctctgcaaggctggcaggcaacgttcggtgggggagatcatccgccaaaatcagatctggtgccgcgtgggagccctggcatacaccgcgacggtggttctggtgagaacctgtactttcaaagctcagataatgggcctcaaaaccagcgcaacgctccacgtataaccttcggtggcccgtctgactccacaggcagcaaccagaatggtgagcgtagtggagccaggtctaagcagcgccgtccccagggtctgccgaacaacacggcgagctggtttactgcgcttacccaacacggtaaagaagacttaaaattcccgcgtggccagggcgtcccgatcaacactaactcttccccggatgatcagattggttattaccgcagagcaactcgtcggattcgcggcggcgacggtaaaatgaaagatttgtctccgcgttggtacttttactatctcggcaccggtccggaagctggactgccctacggggcaaacaaggacgggatcatttgggtggctaccgaaggtgccctgaatactccaaaagatcatatcggcacccgtaaccctgctaataacgctgcgatcatgctgcaactgcctcagggtacaactctgccaaaaggcttctatgcagaagggtcgcgtggtggcagccaggcgagtagccgtagcagctcccgctctcgcaactcgtcccgtaactccactccgggctcttctcgcggcacgtccccggctcgtatggcaggtaacggtggtgacgctgctctggcgctgctactgctggacaggctgaaccagctggagtcgaagatgagtggtaaaggccaacagcagcagggccagaccgttaccaaaaagagcgcagctgaagcatctaaaaaaccgcgacagaaacgtaccgcgactaaagcgtacaatgtaacacaggccttcggtcgtcgaggtccggagcaaactcaaggaaactttggcgatcaggaattaatccgccaggggaccgactacaaacactggccgcaaattgcccagttcgccccatccgctagtgcattcttcggtatgagccgcatcggcatggaagtaacgccaagtggtacgtggctgacctacaccggtgctatcaagcttgatgacaaggacccgaactttaaagaccaggttattctgcttaacaaacatattgatgcctataaaactttcccgccgaccgaacccaaaaaggacaaaaagaaaaaagctgatgaaacccaggctctaccgcagcgtcagaaaaaacagcaaactgtgactctgctgccagctgcggacctggatgatttttccaagcagctgcaacagtctatgagctctgcggactctacgcaggcttaa

SEQ ID NO: 262 - DNA, 2016 bp, Artificial Sequence
  Description of Artificial Sequence: Synthetic polynucleotide
atgcaccatcatcaccatcatggtggttctggttcgccgatacttggttattggaagattaaaggactggttcagcccacacgcctcctgctagaatacttagaggaaaaatatgaagagcacctgtacgaacgtgatgagggggacaaatggcgaaacaagaaatttgaattgggcttagaatttccaaatttgccgtattatatcgatggcgacgtaaaactgacccaatcaatggccattattcgctacatcgcagataaacataacatgctgggtggctgccctaaagaacgggctgagatctccatgctggaaggtgcggtgctcgacattcgctacggcgtcagtagaattgcgtatagcaaggatttcgaaactttaaaagtggatttcctgagcaaacttccggagatgctgaaaatgtttgaggataggctttgtcataagacgtatctcaatggtgatcatgttacccacccggactttatgctgtacgacgcccttgatgtcgttctgtatatggatcccatgtgcctggacgccttcccgaaattagtgtgttttaaaaaacgtatcgaagcgattccacagatcgataaatacttgaagtcttctaaatatattgcttggcctctgcaaggctggcaggcaacgttcggtgggggagatcatccgccaaaatcagatctggtgccgcgtgggagccctggcatacaccgcgacggtggttctggtgagaacctgtactttcaaagctcagataatgggcctcaaaaccagcgcaacgctccacgtataaccttcggtggcccgtctgactccacaggcagcaaccagaatggtgagcgtagtggagccaggtctaagcagcgccgtccccagggtctgccgaacaacacggcgagctggtttactgcgcttacccaacacggtaaagaagacttaaaattcccgcgtggccagggcgtcccgatcaacactaactcttccccggatgatcagattggttattaccgcagagcaactcgtcggattcgcggcggcgacggtaaaatgaaagatttgtctccgcgttggtacttttactatctcggcaccggtccggaagctggactgccctacggggcaaacaaggacgggatcatttgggtggctaccaaaggtgccctgaatactccaaaagatcatatcggcacccgtaaccctgctaataacgctgcgatcgttctgcaactgcctcagggtacaactctgccaaaaggcttctatgcagaagggtcgcgtggtggcagccaggcgagtagccgtagcagctcccgctctcgcaactcgtcccgtaactccactccgggctcttctcgcggcacgtccccggctcgtatggcaggtaacggtggtgacgctgctctggcgctgctactgctggacaggctgaaccagctggagtcgaagatgagtggtaaaggccaacagcagcagggccagaccgttaccaaaaagagcgcagctgaagcatctaaaaaaccgcgacagaaacgtaccgcgactaaagcgtacaatgtaacacaggccttcggtcgtcgaggtccggagcaaactcaaggaaactttggcgatcaggaattaatccgccaggggaccgactacaaacactggccgcaaattgcccagttcgccccatccgctagtgcattcttcggtatgagccgcatcggcatggaagtaacgccaagtggtacgtggctgacctacaccggtgctatcaagcttgatgacaaggacccgaactttaaagaccaggttattctgcttaacaaacatattgatgcctataaaactttcccgccgaccgaacccaaaaaggacaaaaagaaaaaagctgatgaaacccaggctctaccgcagcgtcagaaaaaacagcaaactgtgactctgctgccagctgcggacctggatgatttttccaagcagctgcaacagtctatgagctctgcggactctacgcaggcttaa

SEQ ID NO: 263 - DNA, 2016 bp, Artificial Sequence
  Description of Artificial Sequence: Synthetic polynucleotide
atgcaccatcatcaccatcatggtggttctggttcgccgatacttggttattggaagattaaaggactggttcagcccacacgcctcctgctagaatacttagaggaaaaatatgaagagcacctgtacgaacgtgatgagggggacaaatggcgaaacaagaaatttgaattgggcttagaatttccaaatttgccgtattatatcgatggcgacgtaaaactgacccaatcaatggccattattcgctacatcgcagataaacataacatgctgggtggctgccctaaagaacgggctgagatctccatgctggaaggtgcggtgctcgacattcgctacggcgtcagtagaattgcgtatagcaaggatttcgaaactttaaaagtggatttcctgagcaaacttccggagatgctgaaaatgtttgaggataggctttgtcataagacgtatctcaatggtgatcatgttacccacccggactttatgctgtacgacgcccttgatgtcgttctgtatatggatcccatgtgcctggacgccttcccgaaattagtgtgttttaaaaaacgtatcgaagcgattccacagatcgataaatacttgaagtcttctaaatatattgcttggcctctgcaaggctggcaggcaacgttcggtgggggagatcatccgccaaaatcagatctggtgccgcgtgggagccctggcatacaccgcgacggtggttctggtgagaacctgtactttcaaagctcagataatgggcctcaaaaccagcgcaacgctccacgtataaccttcggtggcccgtctgactccacaggcagcaaccagaatggtgagcgtagtggagccaggtctaagcagcgccgtccccagggtctgccgaacaacacggcgagctggtttactgcgcttacccaacacggtaaagaagacttaaaattcccgcgtggccagggcgtcccgatcaacactaactcttccccggatgatcagattggttattaccgcagagcaactcgtcggattcgcggcggcgacggtaaaatgaaagatttgtctccgcgttggtacttttactatctcggcaccggtccggaagctggactgccctacggggcaaaccaagacgggatcatttgggtggctaccgaaggtgccctgaatactccaaaagatcatatcggcacccgtaaccctgctaataacgctgcgatcgttctgcaactgcctcagggtacaactctgccaaaaggcttctatgcagaagggtcgcgtggtggcagccaggcgagtagccgtagcagctcccgctctcgcaactcgtcccgtaactccactccgggctcttctcgcggcacgtccccggctcgtatggcaggtaacggtggtgacgctgctctggcgctgctactgctggacaggctgaaccagctggagtcgaagatgagtggtaaaggccaacagcagcagggccagaccgttaccaaaaagagcgcagctgaagcatctaaaaaaccgcgacagaaacgtaccgcgactaaagcgtacaatgtaacacaggccttcggtcgtcgaggtccggagcaaactcaaggaaactttggcgatcaggaattaatccgccaggggaccgactacaaacactggccgcaaattgcccagttcgccccatccgctagtgcattcttcggtatgagccgcatcggcatggaagtaacgccaagtggtacgtggctgacctacaccggtgctatcaagcttgatgacaaggacccgaactttaaagaccaggttattctgcttaacaaacatattgatgcctataaaactttcccgccgaccgaacccaaaaaggacaaaaagaaaaaagctgatgaaacccaggctctaccgcagcgtcagaaaaaacagcaaactgtgactctgctgccagctgcggacctggatgatttttccaagcagctgcaacagtctatgagctctgcggactctacgcaggcttaa

SEQ ID NO: 264 - DNA, 2016 bp, Artificial Sequence
  Description of Artificial Sequence: Synthetic polynucleotide
atgcaccatcatcaccatcatggtggttctggttcgccgatacttggttattggaagattaaaggactggttcagcccacacgcctcctgctagaatacttagaggaaaaatatgaagagcacctgtacgaacgtgatgagggggacaaatggcgaaacaagaaatttgaattgggcttagaatttccaaatttgccgtattatatcgatggcgacgtaaaactgacccaatcaatggccattattcgctacatcgcagataaacataacatgctgggtggctgccctaaagaacgggctgagatctccatgctggaaggtgcggtgctcgacattcgctacggcgtcagtagaattgcgtatagcaaggatttcgaaactttaaaagtggatttcctgagcaaacttccggagatgctgaaaatgtttgaggataggctttgtcataagacgtatctcaatggtgatcatgttacccacccggactttatgctgtacgacgcccttgatgtcgttctgtatatggatcccatgtgcctggacgccttcccgaaattagtgtgttttaaaaaacgtatcgaagcgattccacagatcgataaatacttgaagtcttctaaatatattgcttggcctctgcaaggctggcaggcaacgttcggtgggggagatcatccgccaaaatcagatctggtgccgcgtgggagccctggcatacaccgcgacggtggttctggtgagaacctgtactttcaaagctcagataatgggcctcaaaaccagcgcaacgctccacgtataaccttcggtggcccgtctgactccacaggcagcaaccagaatggtgagcgtagtggagccaggtctaagcagcgccgtccccagggtctgccgaacaacacggcgagctggtttactgcgcttacccaacacggtaaagaagacttaaaattcccgcgtggccagggcgtcccgatcaacactaactcttccccggatgatcagattggttattaccgcagagcaactcgtcggattcgcggcggcgacggtaaaatgaaagatttgtctccgcgttggtacttttactatctcggcaccggtccggaagctggactgccctacggggcaaacaaggacgggatcatttgggtggctaccgaaggtgccctgaatactccaaaagatcatatcggcacccgtaaccctgctaataacgctgcgatcgttctgcaactgcctcagggtacaactctgccaaaaggcttctatgcagaagggtcgcgtggtggcagccaggcgagtagccgtagcagctcccgctctcgcaactcgtcccgtaactccactccgggctcttctcgcggcacgtccccggctcgtatggcaggtaacggtggtgacgctgctctggcgctgctactgctggacaggctgaaccagctggagtcgaagatgagtggtaaaggccaacagcagcagggccagaccgttaccaaaaagagcgcagctgaaatgtctaaaaaaccgcgatggaaacgtaccgcgactaaaggatacaatgtaacacaggccttcggtaaacgaggtccgaaagatactcaaggaaactttggcgatgccgaattaatcaagcaggggaccgactacaaacactggccgcaaattgcccagttcgtgccatccgctgcggcattcttctttatgagccgcatcggcatgaaagaaacgccagatggtgtgtggctgacctacaccggtacgatcaagcttgataaagatgacccgaactttgatgaccaggttaaactgcttaacaaacatattgatgcctataaaactttcccgccgaccgaacccaaaaaggacaaaaagaaaaaagctgatgaaacccaggctctaccgcagcgtcagaaaaaacagcaaactgtgactctgctgccagctgcggacctggatgatttttccaagcagctgcaacagtctatgagctctgcggactctacgcaggcttaa

SEQ ID NO: 265 - DNA, 2016 bp, Artificial Sequence
  Description of Artificial Sequence: Synthetic polynucleotide
atgcaccatcatcaccatcatggtggttctggttcgccgatacttggttattggaagattaaaggactggttcagcccacacgcctcctgctagaatacttagaggaaaaatatgaagagcacctgtacgaacgtgatgagggggacaaatggcgaaacaagaaatttgaattgggcttagaatttccaaatttgccgtattatatcgatggcgacgtaaaactgacccaatcaatggccattattcgctacatcgcagataaacataacatgctgggtggctgccctaaagaacgggctgagatctccatgctggaaggtgcggtgctcgacattcgctacggcgtcagtagaattgcgtatagcaaggatttcgaaactttaaaagtggatttcctgagcaaacttccggagatgctgaaaatgtttgaggataggctttgtcataagacgtatctcaatggtgatcatgttacccacccggactttatgctgtacgacgcccttgatgtcgttctgtatatggatcccatgtgcctggacgccttcccgaaattagtgtgttttaaaaaacgtatcgaagcgattccacagatcgataaatacttgaagtcttctaaatatattgcttggcctctgcaaggctggcaggcaacgttcggtgggggagatcatccgccaaaatcagatctggtgccgcgtgggagccctggcatacaccgcgacggtggttctggtgagaacctgtactttcaaagctcagataatgggcctcaaaaccagcgcaacgctccacgtataaccttcggtggcccgtctgactccacaggcagcaaccagaatggtgagcgtagtggagccaggtctaagcagcgccgtccccagggtctgccgaacaacacggcgagctggtttactgcgcttacccaacacggtaaagaagacttaaaattcccgcctggccagggcgtcccgatcaacccgaactctaaaccggatgatcagattggttattggcgcagacaagtgcgtcggtaccgcggcggcgacggtcaaatgaaagatttgcccccgcgttggtacttttactatctcggcaccggtccggaagctggactgccctacggggcaaacaaggacgggatcatttgggtggctaccgaaggtgccctgaatactccaaaagatcatatcggcacccgtaaccctgctaataacgctgcgatcgttctgcaactgcctcagggtacaactctgccaaaaggcttctatgcagaagggtcgcgtggtggcagccaggcgagtagccgtagcagctcccgctctcgcaactcgtcccgtaactccactccgggctcttctcgcggcacgtccccggctcgtatggcaggtaacggtggtgacgctgctctggcgctgctactgctggacaggctgaaccagctggagtcgaagatgagtggtaaaggccaacagcagcagggccagaccgttaccaaaaagagcgcagctgaagcatctaaaaaaccgcgacagaaacgtaccgcgactaaagcgtacaatgtaacacaggccttcggtcgtcgaggtccggagcaaactcaaggaaactttggcgatcaggaattaatccgccaggggaccgactacaaacactggccgcaaattgcccagttcgccccatccgctagtgcattcttcggtatgagccgcatcggcatggaagtaacgccaagtggtacgtggctgacctacaccggtgctatcaagcttgatgacaaggacccgaactttaaagaccaggttattctgcttaacaaacatattgatgcctataaaactttcccgccgaccgaacccaaaaaggacaaaaagaaaaaagctgatgaaacccaggctctaccgcagcgtcagaaaaaacagcaaactgtgactctgctgccagctgcggacctggatgatttttccaagcagctgcaacagtctatgagctctgcggactctacgcaggcttaa

SEQ ID NO: 266 - DNA, 2016 bp, Artificial Sequence
  Description of Artificial Sequence: Synthetic polynucleotide
atgcaccatcatcaccatcatggtggttctggttcgccgatacttggttattggaagattaaaggactggttcagcccacacgcctcctgctagaatacttagaggaaaaatatgaagagcacctgtacgaacgtgatgagggggacaaatggcgaaacaagaaatttgaattgggcttagaatttccaaatttgccgtattatatcgatggcgacgtaaaactgacccaatcaatggccattattcgctacatcgcagataaacataacatgctgggtggctgccctaaagaacgggctgagatctccatgctggaaggtgcggtgctcgacattcgctacggcgtcagtagaattgcgtatagcaaggatttcgaaactttaaaagtggatttcctgagcaaacttccggagatgctgaaaatgtttgaggataggctttgtcataagacgtatctcaatggtgatcatgttacccacccggactttatgctgtacgacgcccttgatgtcgttctgtatatggatcccatgtgcctggacgccttcccgaaattagtgtgttttaaaaaacgtatcgaagcgattccacagatcgataaatacttgaagtcttctaaatatattgcttggcctctgcaaggctggcaggcaacgttcggtgggggagatcatccgccaaaatcagatctggtgccgcgtgggagccctggcatacaccgcgacggtggttctggtgagaacctgtactttcaaagctcagataatgggcctcaaaaccagcgcaacgctccacgtataaccttcggtggcccgtctgactccacaggcagcaaccagaatggtgagcgtagtggagccaggtctaagcagcgccgtccccagggtctgccgaacaacacggcgagctggtttactccgcttgtgcaatttggtaaagaagacttaaaattcccgccgggccagggcgtcccgatcaacactaactcttccccggatgatcagattggttattaccgcagagcaactcgtcggattcgcggcggcgacggtaaaatgaaagatttgcctccgaagtggtacttttactatctcggcaccggtccgcatgctgatctgccctacgggcaaaaacacccaggggttgtatgggtggctcggccaggtgccctgaatactccaaaagatcatatcggcacccgtaaccctgctaataacgctgcgatcccgctgcaactgcctcctggtacaaaactgccaaaaggcttctatgcagaagggtcgcgtggtggcagccaggcgagtagccgtagcagctcccgctctcgcaactcgtcccgtaactccactccgggctcttctcgcggcacgtccccggctcgtatggcaggtaacggtggtgacgctgctctggcgctgctactgctggacaggctgaaccagctggagtcgaagatgagtggtaaaggccaacagcagcagggccagaccgttaccaaaaagagcgcagctgaagcatctaaaaaaccgcgacagaaacgtaccgcgactaaagcgtacaatgtaacacaggccttcggtcgtcgaggtccggagcaaactcaaggaaactttggcgatcaggaattaatccgccaggggaccgactacaaacactggccgcaaattgcccagttcgccccatccgctagtgcattcttcggtatgagccgcatcggcatggaagtaacgccaagtggtacgtggctgacctacaccggtgctatcaagcttgatgacaaggacccgaactttaaagaccaggttattctgcttaacaaacatattgatgcctataaaactttcccgccgaccgaacccaaaaaggacaaaaagaaaaaagctgatgaaacccaggctctaccgcagcgtcagaaaaaacagcaaactgtgactctgctgccagctgcggacctggatgatttttccaagcagctgcaacagtctatgagctctgcggactctacgcaggcttaa

SEQ ID NO: 267 - DNA, 2016 bp, Artificial Sequence
  Description of Artificial Sequence: Synthetic polynucleotide
atgcaccatcatcaccatcatggtggttctggttcgccgatacttggttattggaagattaaaggactggttcagcccacacgcctcctgctagaatacttagaggaaaaatatgaagagcacctgtacgaacgtgatgagggggacaaatggcgaaacaagaaatttgaattgggcttagaatttccaaatttgccgtattatatcgatggcgacgtaaaactgacccaatcaatggccattattcgctacatcgcagataaacataacatgctgggtggctgccctaaagaacgggctgagatctccatgctggaaggtgcggtgctcgacattcgctacggcgtcagtagaattgcgtatagcaaggatttcgaaactttaaaagtggatttcctgagcaaacttccggagatgctgaaaatgtttgaggataggctttgtcataagacgtatctcaatggtgatcatgttacccacccggactttatgctgtacgacgcccttgatgtcgttctgtatatggatcccatgtgcctggacgccttcccgaaattagtgtgttttaaaaaacgtatcgaagcgattccacagatcgataaatacttgaagtcttctaaatatattgcttggcctctgcaaggctggcaggcaacgttcggtgggggagatcatccgccaaaatcagatctggtgccgcgtgggagccctggcatacaccgcgacggtggttctggtgagaacctgtactttcaaagctcagataatgggcctcaaaaccagcgcaacgctccacgtataaccttcggtggcccgtctgactccacaggcagcaaccagaatggtgagcgtagtggagccaggtctaagcagcgccgtccccagggtctgccgaacaacacggcgagctggtttactgcgcttacccaacacggtaaagaagacttaaaattcccgcgtggccagggcgtcccgatcaacactaactcttccccggatgatcagattggttattaccgcagagcaactcgtcggattcgcggcggcgacggtaaaatgaaagatttgtctccgcgttggtacttttactatctcggcaccggtccggaagctggactgccctacggggcaaacaaggacgggatcatttgggtggctaccgaaggtgccctgaatactccaaaagatcatatcggcacccgtaaccctgctaataacgctgcgctggttctgcaactgcctcagggtacaactctgccaaaaggcttctatgcagaagggtcgcgtggtggcagccaggcgagtagccgtagcagctcccgctctcgcaactcgtcccgtaactccactccgggctcttctcgcggcacgtccccggctcgtatggcaggtaacggtggtgacgctgctctggcgctgctactgctggacaggctgaaccagctggagtcgaagatgagtggtaaaggccaacagcagcagggccagaccgttaccaaaaagagcgcagctgaagcatctaaaaaaccgcgacagaaacgtaccgcgactaaagcgtacaatgtaacacaggccttcggtcgtcgaggtccggagcaaactcaaggaaactttggcgatcaggaattaatccgccaggggaccgactacaaacactggccgcaaattgcccagttcgccccatccgctagtgcattcttcggtatgagccgcatcggcatggaagtaacgccaagtggtacgtggctgacctacaccggtgctatcaagcttgatgacaaggacccgaactttaaagaccaggttattctgcttaacaaacatattgatgcctataaaactttcccgccgaccgaacccaaaaaggacaaaaagaaaaaagctgatgaaacccaggctctaccgcagcgtcagaaaaaacagcaaactgtgactctgctgccagctgcggacctggatgatttttccaagcagctgcaacagtctatgagctctgcggactctacgcaggcttaa

SEQ ID NO: 268 - DNA, 2016 bp, Artificial Sequence
  Description of Artificial Sequence: Synthetic polynucleotide
atgcaccatcatcaccatcatggtggttctggttcgccgatacttggttattggaagattaaaggactggttcagcccacacgcctcctgctagaatacttagaggaaaaatatgaagagcacctgtacgaacgtgatgagggggacaaatggcgaaacaagaaatttgaattgggcttagaatttccaaatttgccgtattatatcgatggcgacgtaaaactgacccaatcaatggccattattcgctacatcgcagataaacataacatgctgggtggctgccctaaagaacgggctgagatctccatgctggaaggtgcggtgctcgacattcgctacggcgtcagtagaattgcgtatagcaaggatttcgaaactttaaaagtggatttcctgagcaaacttccggagatgctgaaaatgtttgaggataggctttgtcataagacgtatctcaatggtgatcatgttacccacccggactttatgctgtacgacgcccttgatgtcgttctgtatatggatcccatgtgcctggacgccttcccgaaattagtgtgttttaaaaaacgtatcgaagcgattccacagatcgataaatacttgaagtcttctaaatatattgcttggcctctgcaaggctggcaggcaacgttcggtgggggagatcatccgccaaaatcagatctggtgccgcgtgggagccctggcatacaccgcgacggtggttctggtgagaacctgtactttcaaagctcagataatgggcctcaaaaccagcgcaacgctccacgtataaccttcggtggcccgtctgactccacaggcagcaaccagaatggtgagcgtagtggagccaggtctaagcagcgccgtccccagggtctgccgaacaacacggcgagctggtttactgcgcttacccaacacggtaaagaagacttaaaattcccgcgtggccagggcgtcccgatcaacactaactcttccccggatgatcagattggttattaccgcagagcaactcgtcggattcgcggcggcgacggtaaaatgaaagatttgtctccgcgttggtacttttactatctcggcaccggtccggaagctggactgccctacggggcaaacaaggacgggatcatttgggtggctaccgaaggtgccctgaatactccaaaagatcatatcggcacccgtaaccctgctaataacgctgcgatcgttctgcaactgcctcagggtacaactctgccaaaaggcttctatgcagaagggtcgcgtggtggcagccaggcgagtagccgtagcagctcccgctctcgcaactcgtcccgtaactccactccgggctcttctcgcggcacgtccccggctcgtatggcaggtaacggtggtgacgctgctctggcgctgctactgctggacaggctgaaccagctggagtcgaagatgagtggtaaaggccaacagcagcagggccagaccgttaccaaaaagagcgcagctgaagcatctaaaaaaccgcgacagaaacgtaccgcgactaaagcgtacaatgtaacacaggccttcggtcgtcgaggtccggagcaaactcaaggaaactttggcgatcaggaattaatccgccaggggaccgactacaaacactggccgcaaattgcccagttcgccccatccgctagtgcattcttcggtatgagccgcatcacgatggaagtaacgccaagtggtacgtggctgacctacaccggtgctatcaagcttgatgacaaggacccgaactttaaagaccaggttattctgcttaacaaacatattgatgcctataaaactttcccgccgaccgaacccaaaaaggacaaaaagaaaaaagctgatgaaacccaggctctaccgcagcgtcagaaaaaacagcaaactgtgactctgctgccagctgcggacctggatgatttttccaagcagctgcaacagtctatgagctctgcggactctacgcaggcttaa

SEQ ID NO: 269 - DNA, 2016 bp, Artificial Sequence
  Description of Artificial Sequence: Synthetic polynucleotide
atgcaccatcatcaccatcatggtggttctggttcgccgatacttggttattggaagattaaaggactggttcagcccacacgcctcctgctagaatacttagaggaaaaatatgaagagcacctgtacgaacgtgatgagggggacaaatggcgaaacaagaaatttgaattgggcttagaatttccaaatttgccgtattatatcgatggcgacgtaaaactgacccaatcaatggccattattcgctacatcgcagataaacataacatgctgggtggctgccctaaagaacgggctgagatctccatgctggaaggtgcggtgctcgacattcgctacggcgtcagtagaattgcgtatagcaaggatttcgaaactttaaaagtggatttcctgagcaaacttccggagatgctgaaaatgtttgaggataggctttgtcataagacgtatctcaatggtgatcatgttacccacccggactttatgctgtacgacgcccttgatgtcgttctgtatatggatcccatgtgcctggacgccttcccgaaattagtgtgttttaaaaaacgtatcgaagcgattccacagatcgataaatacttgaagtcttctaaatatattgcttggcctctgcaaggctggcaggcaacgttcggtgggggagatcatccgccaaaatcagatctggtgccgcgtgggagccctggcatacaccgcgacggtggttctggtgagaacctgtactttcaaagctcagataatgggcctcaaaaccagcgcaacgctccacgtataaccttcggtggcccgtctgactccacaggcagcaaccagaatggtgagcgtagtggagccaggtctaagcagcgccgtccccagggtctgccgaacaacacggcgagctggtttactgcgcttacccaacacggtaaagaagacttaaaattcccgcgtggccagggcgtcccgatcaacactaactcttccccggatgatcagattggttattaccgcagagcaactcgtcggattcgcggcggcgacggtaaaatgaaagatttgtctccgcgttggtacttttactatctcggcaccggtccggaagctggactgccctacggggcaaacaaggacgggatcatttgggtggctaccgaaggtgccctgaatactccaaaagatcatatcggcacccgtaaccctgctaataacgctgcgggcgttctgcaactgcctcagggtacaactctgccaaaaggcttctatgcagaagggtcgcgtggtggcagccaggcgagtagccgtagcagctcccgctctcgcaactcgtcccgtaactccactccgggctcttctcgcggcacgtccccggctcgtatggcaggtaacggtggtgacgctgctctggcgctgctactgctggacaggctgaaccagctggagtcgaagatgagtggtaaaggccaacagcagcagggccagaccgttaccaaaaagagcgcagctgaagcatctaaaaaaccgcgacagaaacgtaccgcgactaaagcgtacaatgtaacacaggccttcggtcgtcgaggtccggagcaaactcaaggaaactttggcgatcaggaattaatccgccaggggaccgactacaaacactggccgcaaattgcccagttcgccccatccgctagtgcattcttcggtatgagccgcatcggcatggaagtaacgccaagtggtacgtggctgacctacaccggtgctatcaagcttgatgacaaggacccgaactttaaagaccaggttattctgcttaacaaacatattgatgcctataaaactttcccgccgaccgaacccaaaaaggacaaaaagaaaaaagctgatgaaacccaggctctaccgcagcgtcagaaaaaacagcaaactgtgactctgctgccagctgcggacctggatgatttttccaagcagctgcaacagtctatgagctctgcggactctacgcaggcttaa

SEQ ID NO: 270 - DNA, 2016 bp, Artificial Sequence
  Description of Artificial Sequence: Synthetic polynucleotide
atgcaccatcatcaccatcatggtggttctggttcgccgatacttggttattggaagattaaaggactggttcagcccacacgcctcctgctagaatacttagaggaaaaatatgaagagcacctgtacgaacgtgatgagggggacaaatggcgaaacaagaaatttgaattgggcttagaatttccaaatttgccgtattatatcgatggcgacgtaaaactgacccaatcaatggccattattcgctacatcgcagataaacataacatgctgggtggctgccctaaagaacgggctgagatctccatgctggaaggtgcggtgctcgacattcgctacggcgtcagtagaattgcgtatagcaaggatttcgaaactttaaaagtggatttcctgagcaaacttccggagatgctgaaaatgtttgaggataggctttgtcataagacgtatctcaatggtgatcatgttacccacccggactttatgctgtacgacgcccttgatgtcgttctgtatatggatcccatgtgcctggacgccttcccgaaattagtgtgttttaaaaaacgtatcgaagcgattccacagatcgataaatacttgaagtcttctaaatatattgcttggcctctgcaaggctggcaggcaacgttcggtgggggagatcatccgccaaaatcagatctggtgccgcgtgggagccctggcatacaccgcgacggtggttctggtgagaacctgtactttcaaagctcagataatgggcctcaaaaccagcgcaacgctccacgtataaccttcggtggcccgtctgactccacaggcagcaaccagaatggtgagcgtagtggagccaggtctaagcagcgccgtccccagggtctgccgaacaacacggcgagctggtttactgcgcttacccaacacggtaaagaagacttaaaattcccgcgtggccagggcgtcccgatcaacactaactcttccccggatgatcagattggttattaccgcagagcaactcgtcggattcgcggcggcgacggtaaaatgaaagatttgtctccgcgttggtacttttactatctcggcaccggtccggaagctggactgccctacggggcaaacaaggacgggatcatttgggtggctaccgaaggtgccctgaatactccaaaagatcatatcggcacccgtaaccctgctaataacgctgcgatcgttctgcaactgcctcagggtacaactctgccaaaaggcttctatgcagaagggtcgcgtggtggcagccaggcgagtagccgtagcagctcccgctctcgcaactcgtcccgtaactccactccgggctcttctcgcggcacgtccccggctcgtatggcaggtaacggtggtgacgctgctctggcgctgctactgctggacaggctgaaccagctggagtcgaagatgagtggtaaaggccaacagcagcagggccagaccgttaccaaaaagagcgcagctgaaatgtctaaaaaaccgcgacagaaacgtaccgcgactaaaggatgtaatgtaacacagtgcttcggtccacgaggtccggagcaaactcaaggaaactttggcgatgccgaattaaataagaaagggaccgactacaaacactggccgcaaattgcccagttcgccccatccgctagtgcattcttcggtatgagccgcatcagttcaaaagaaacgccaagtggtacgtggctgacctacaccggtgctatcaagcttgataaagatgacccgaactttaaagaccaggttattctgcttaacaaacatattgatgcctataaaactttcccgccgaccgaacccaaaaaggacaaaaagaaaaaagctgatgaaacccaggctctaccgcagcgtcagaaaaaacagcaaactgtgactctgctgccagctgcggacctggatgatttttccaagcagctgcaacagtctatgagctctgcggactctacgcaggcttaa

SEQ ID NO: 271 - DNA, 2016 bp, Artificial Sequence
  Description of Artificial Sequence: Synthetic polynucleotide
atgcaccatcatcaccatcatggtggttctggttcgccgatacttggttattggaagattaaaggactggttcagcccacacgcctcctgctagaatacttagaggaaaaatatgaagagcacctgtacgaacgtgatgagggggacaaatggcgaaacaagaaatttgaattgggcttagaatttccaaatttgccgtattatatcgatggcgacgtaaaactgacccaatcaatggccattattcgctacatcgcagataaacataacatgctgggtggctgccctaaagaacgggctgagatctccatgctggaaggtgcggtgctcgacattcgctacggcgtcagtagaattgcgtatagcaaggatttcgaaactttaaaagtggatttcctgagcaaacttccggagatgctgaaaatgtttgaggataggctttgtcataagacgtatctcaatggtgatcatgttacccacccggactttatgctgtacgacgcccttgatgtcgttctgtatatggatcccatgtgcctggacgccttcccgaaattagtgtgttttaaaaaacgtatcgaagcgattccacagatcgataaatacttgaagtcttctaaatatattgcttggcctctgcaaggctggcaggcaacgttcggtgggggagatcatccgccaaaatcagatctggtgccgcgtgggagccctggcatacaccgcgacggtggttctggtgagaacctgtactttcaaagctcagataatgggcctcaaaaccagcgcaacgctccacgtataaccttcggtggcccgtctgactccacaggcagcaaccagaatggtgagcgtagtggagccaggtctaagcagcgccgtccccagggtctgccgaacaacacggcgagctggtttactgcgcttacccaacacggtaaagaagacttaaaattcccgcgtggccagggcgtcccgatcaacactaactcttccccggatgatcagattggttattaccgcagagcaactcgtcggattcgcggcggcgacggtaaaatgaaagatttgtctccgcgttggtacttttactatctcggcaccggtccggaagctggactgccctacggggcaaacaaggacgggatcatttgggtggctaccgaaggtgccctgaatactccaaaagatcatatcggcacccgtaaccctgctaataacgctgcgatcgttctgcaactgcctcagggtacaactctgccaaaaggcttctatgcagaagggtcgcgtggtggcagccaggcgagtagccgtagcagctcccgctctcgcaactcgtcccgtaactccactccgggctcttctcgcggcacgtccccggctcgtatggcaggtaacggtggtgacgctgctctggcgctgctactgctggacaggctgaaccagctggagtcgaagatgagtggtaaaggccaacagcagcagggccagaccgttaccaaaaagagcgcagctgaaatgtctaaaaaaccgcgacagaaacgtaccgcgactaaagggtacaatgtaacacagtgtttcggtccacgaggtccggagcaaactcaaggaaactttggcgatgcggaattaaataaaaaagggaccgactacaaacactggccgcaaattgcccagttcgccccatccgctagtgcattcttcggtatgagccgcatctcgagtaaagaaacgccaagtggtacgtggctgacctacaccggtgctatcaagcttgataaggatgacccgaactttaaagaccaggttattctgcttaacaaacatattgatgcctataaaactttcccgccgaccgaacccaaaaaggacaaaaagaaaaaagctgatgaaacccaggctctaccgcagcgtcagaaaaaacagcaaactgtgactctgctgccagctgcggacctggatgatttttccaagcagctgcaacagtctatgagctctgcggactctacgcaggcttaa

SEQ ID NO: 272 - DNA, 2016 bp, Artificial Sequence
  Description of Artificial Sequence: Synthetic polynucleotide
atgcaccatcatcaccatcatggtggttctggttcgccgatacttggttattggaagattaaaggactggttcagcccacacgcctcctgctagaatacttagaggaaaaatatgaagagcacctgtacgaacgtgatgagggggacaaatggcgaaacaagaaatttgaattgggcttagaatttccaaatttgccgtattatatcgatggcgacgtaaaactgacccaatcaatggccattattcgctacatcgcagataaacataacatgctgggtggctgccctaaagaacgggctgagatctccatgctggaaggtgcggtgctcgacattcgctacggcgtcagtagaattgcgtatagcaaggatttcgaaactttaaaagtggatttcctgagcaaacttccggagatgctgaaaatgtttgaggataggctttgtcataagacgtatctcaatggtgatcatgttacccacccggactttatgctgtacgacgcccttgatgtcgttctgtatatggatcccatgtgcctggacgccttcccgaaattagtgtgttttaaaaaacgtatcgaagcgattccacagatcgataaatacttgaagtcttctaaatatattgcttggcctctgcaaggctggcaggcaacgttcggtgggggagatcatccgccaaaatcagatctggtgccgcgtgggagccctggcatacaccgcgacggtggttctggtgagaacctgtactttcaaagctcagataatgggcctcaaaaccagcgcaacgctccacgtataaccttcggtggcccgtctgactccacaggcagcaaccagaatggtgagcgtagtggagccaggtctaagcagcgccgtccccagggtctgccgaacaacacggcgagctggtttactggccttacccaacacggtaaagaagacttaaaattcccgccgggccagggcgtcccgatcaacactaactcttccccggatgatcagattggttattaccgcagagcaactcgtcggattcgcggcggcgacggtaaaatgaaagatttgccaccgcgttggtacttttactatctcggcaccggtccggaagctgatctgccctacggggcagttaaggacgggatcttttgggtggctgcggaaggtgccctgaatactccaaaagatcatatcggcacccgtaaccctgctaataacgctgcgatccccctgcaactgcctccgggtacaactctgccaaaaggcttctatgcagaagggtcgcgtggtggcagccaggcgagtagccgtagcagctcccgctctcgcaactcgtcccgtaactccactccgggctcttctcgcggcacgtccccggctcgtatggcaggtaacggtggtgacgctgctctggcgctgctactgctggacaggctgaaccagctggagtcgaagatgagtggtaaaggccaacagcagcagggccagaccgttaccaaaaagagcgcagctgaagcatctaaaaaaccgcgacagaaacgtaccgcgactaaagcgtacaatgtaacacaggccttcggtcgtcgaggtccggagcaaactcaaggaaactttggcgatcaggaattaatccgccaggggaccgactacaaacactggccgcaaattgcccagttcgccccatccgctagtgcattcttcggtatgagccgcatcggcatggaagtaacgccaagtggtacgtggctgacctacaccggtgctatcaagcttgatgacaaggacccgaactttaaagaccaggttattctgcttaacaaacatattgatgcctataaaactttcccgccgaccgaacccaaaaaggacaaaaagaaaaaagctgatgaaacccaggctctaccgcagcgtcagaaaaaacagcaaactgtgactctgctgccagctgcggacctggatgatttttccaagcagctgcaacagtctatgagctctgcggactctacgcaggcttaa

SEQ ID NO: 273 - DNA, 2016 bp, Artificial Sequence
  Description of Artificial Sequence: Synthetic polynucleotide
atgcaccatcatcaccatcatggtggttctggttcgccgatacttggttattggaagattaaaggactggttcagcccacacgcctcctgctagaatacttagaggaaaaatatgaagagcacctgtacgaacgtgatgagggggacaaatggcgaaacaagaaatttgaattgggcttagaatttccaaatttgccgtattatatcgatggcgacgtaaaactgacccaatcaatggccattattcgctacatcgcagataaacataacatgctgggtggctgccctaaagaacgggctgagatctccatgctggaaggtgcggtgctcgacattcgctacggcgtcagtagaattgcgtatagcaaggatttcgaaactttaaaagtggatttcctgagcaaacttccggagatgctgaaaatgtttgaggataggctttgtcataagacgtatctcaatggtgatcatgttacccacccggactttatgctgtacgacgcccttgatgtcgttctgtatatggatcccatgtgcctggacgccttcccgaaattagtgtgttttaaaaaacgtatcgaagcgattccacagatcgataaatacttgaagtcttctaaatatattgcttggcctctgcaaggctggcaggcaacgttcggtgggggagatcatccgccaaaatcagatctggtgccgcgtgggagccctggcatacaccgcgacggtggttctggtgagaacctgtactttcaaagctcagataatgggcctcaaaaccagcgcaacgctccacgtataaccttcggtggcccgtctgactccacaggcagcaaccagaatggtgagcgtagtggagccaggtctaagcagcgccgtccccagggtctgccgaacaacacggcgagctggtttactgcgcttacccaacacggtaaagaagacttaaaattcccgcgtggccagggcgtcccggataacactaactcttccccggatgatcagattggttattaccgcagagcaactcgtcggattcgcggcggcgacggtaaaatgaaagatttgtctccgcgttggtacttttactatctcggcaccggtccggaagctggactgccctacggggcaaacaaggacgggatcatttgggtggctaccgaaggtgccctgaatactccaaaagatcatatcggcacccgtaaccctgctaataacgctgcgatcgttctgcaactgcctcagggtacaactctgccaaaaggcttctatgcagaagggtcgcgtggtggcagccaggcgagtagccgtagcagctcccgctctcgcaactcgtcccgtaactccactccgggctcttctcgcggcacgtccccggctcgtatggcaggtaacggtggtgacgctgctctggcgctgctactgctggacaggctgaaccagctggagtcgaagatgagtggtaaaggccaacagcagcagggccagaccgttaccaaaaagagcgcagctgaagcatctaaaaaaccgcgacagaaacgtaccgcgactaaagcgtacaatgtaacacaggccttcggtcgtcgaggtccggagcaaactcaaggaaactttggcgatcaggaattaatccgccaggggaccgactacaaacactggccgcaaattgcccagttcgccccatccgctagtgcattcttcggtatgagccgcatcggcatggaagtaacgccaagtggtacgtggctgacctacaccggtgctatcaagcttgatgacaaggacccgaactttaaagaccaggttattctgcttaacaaacatattgatgcctataaaactttcccgccgaccgaacccaaaaaggacaaaaagaaaaaagctgatgaaacccaggctctaccgcagcgtcagaaaaaacagcaaactgtgactctgctgccagctgcggacctggatgatttttccaagcagctgcaacagtctatgagctctgcggactctacgcaggcttaa

SEQ ID NO: 274 - DNA, 2016 bp, Artificial Sequence
  Description of Artificial Sequence: Synthetic polynucleotide
atgcaccatcatcaccatcatggtggttctggttcgccgatacttggttattggaagattaaaggactggttcagcccacacgcctcctgctagaatacttagaggaaaaatatgaagagcacctgtacgaacgtgatgagggggacaaatggcgaaacaagaaatttgaattgggcttagaatttccaaatttgccgtattatatcgatggcgacgtaaaactgacccaatcaatggccattattcgctacatcgcagataaacataacatgctgggtggctgccctaaagaacgggctgagatctccatgctggaaggtgcggtgctcgacattcgctacggcgtcagtagaattgcgtatagcaaggatttcgaaactttaaaagtggatttcctgagcaaacttccggagatgctgaaaatgtttgaggataggctttgtcataagacgtatctcaatggtgatcatgttacccacccggactttatgctgtacgacgcccttgatgtcgttctgtatatggatcccatgtgcctggacgccttcccgaaattagtgtgttttaaaaaacgtatcgaagcgattccacagatcgataaatacttgaagtcttctaaatatattgcttggcctctgcaaggctggcaggcaacgttcggtgggggagatcatccgccaaaatcagatctggtgccgcgtgggagccctggcatacaccgcgacggtggttctggtgagaacctgtactttcaaagctcagataatgggcctcaaaaccagcgcaacgctccacgtataaccttcggtggcccgtctgactccacaggcagcaaccagaatggtgagcgtagtggagccaggtctaagcagcgccgtccccagggtctgccgaacaacacggcgagctggtttactccgcttacccaatttggtaaagaagacttaaaattcccgcccggccagggcgtcccgatcaacactaactcttccccggatgatcagattggttattaccgcagagcaactcgtcggattcgcggcggcgacggtaaaatgaaagatttgccaccgaagtggtacttttactatctcggcaccggtccgcacgctgatctgccctacgggcaaaaacaagacggggttttttgggtggctcggcctggtgccctgaatactccaaaagatcatatcggcacccgtaaccctgctaataacgctgcgatcccgctgcaactgcctccgggtacaaagctgccaaaaggcttctatgcagaagggtcgcgtggtggcagccaggcgagtagccgtagcagctcccgctctcgcaactcgtcccgtaactccactccgggctcttctcgcggcacgtccccggctcgtatggcaggtaacggtggtgacgctgctctggcgctgctactgctggacaggctgaaccagctggagtcgaagatgagtggtaaaggccaacagcagcagggccagaccgttaccaaaaagagcgcagctgaagcatctaaaaaaccgcgacagaaacgtaccgcgactaaagcgtacaatgtaacacaggccttcggtcgtcgaggtccggagcaaactcaaggaaactttggcgatcaggaattaatccgccaggggaccgactacaaacactggccgcaaattgcccagttcgccccatccgctagtgcattcttcggtatgagccgcatcggcatggaagtaacgccaagtggtacgtggctgacctacaccggtgctatcaagcttgatgacaaggacccgaactttaaagaccaggttattctgcttaacaaacatattgatgcctataaaactttcccgccgaccgaacccaaaaaggacaaaaagaaaaaagctgatgaaacccaggctctaccgcagcgtcagaaaaaacagcaaactgtgactctgctgccagctgcggacctggatgatttttccaagcagctgcaacagtctatgagctctgcggactctacgcaggcttaa

SEQ ID NO: 275 - DNA, 2016 bp, Artificial Sequence
  Description of Artificial Sequence: Synthetic polynucleotide
atgcaccatcatcaccatcatggtggttctggttcgccgatacttggttattggaagattaaaggactggttcagcccacacgcctcctgctagaatacttagaggaaaaatatgaagagcacctgtacgaacgtgatgagggggacaaatggcgaaacaagaaatttgaattgggcttagaatttccaaatttgccgtattatatcgatggcgacgtaaaactgacccaatcaatggccattattcgctacatcgcagataaacataacatgctgggtggctgccctaaagaacgggctgagatctccatgctggaaggtgcggtgctcgacattcgctacggcgtcagtagaattgcgtatagcaaggatttcgaaactttaaaagtggatttcctgagcaaacttccggagatgctgaaaatgtttgaggataggctttgtcataagacgtatctcaatggtgatcatgttacccacccggactttatgctgtacgacgcccttgatgtcgttctgtatatggatcccatgtgcctggacgccttcccgaaattagtgtgttttaaaaaacgtatcgaagcgattccacagatcgataaatacttgaagtcttctaaatatattgcttggcctctgcaaggctggcaggcaacgttcggtgggggagatcatccgccaaaatcagatctggtgccgcgtgggagccctggcatacaccgcgacggtggttctggtgagaacctgtactttcaaagctcagataatgggcctcaaaaccagcgcaacgctccacgtataaccttcggtggcccgtctgactccacaggcagcaaccagaatggtgagcgtagtggagccaggtctaagcagcgccgtccccagggtctgccgaacaacacggcgagctggtttactgcgcttacccaacacggtaaagaagacttaaaattcccgcgtggccagggcgtcccgatcaacactaactcttccccggatgatcagattggttattaccgcagagcaactcgtcggattcgcggcggcgacggtaaaatgaaagatttgtctccgcgttggtacttttactatctcggcaccggtccggaagctggactgccctacggggcaaacaaggacgggatcatttgggtggctaccgaaggtgccctgaatactccaaaagatcatatcggcacccgtaaccctgctaataacgctgcgatcgttctgcaactgcctcagggtacaactctgccaaaaggcttctatgcagaagggtcgcgtggtggcagccaggcgagtagccgtagcagctcccgctctcgcaactcgtcccgtaactccactccgggctcttctcgcggcacgtccccggctcgtatggcaggtaacggtggtgacgctgctctggcgctgctactgctggacaggctgaaccagctggagtcgaagatgagtggtaaaggccaacagcagcagggccagaccgttaccaaaaagagcgcagctgaaatgtctaaaaaaccgcgacagaaacgtaccgcgactaaagagtgtaatgtaacacagtgcttcggtccacgaggtccggagcaaactcaaggaaactttggcgatgatgaattagtgaaaaaagggaccgactacaaacactggccgcaaattgcccagttcgccccatccgctagtgcattcttcggtatgagccgcatctcaagcaaggaacagccaagtggtacgtggctgacctacaccggtgctatcaagcttgataaagatgacccgaactttaaagaccaggttattctgcttaacaaacatattgatgcctataaaactttcccgccgaccgaacccaaaaaggacaaaaagaaaaaagctgatgaaacccaggctctaccgcagcgtcagaaaaaacagcaaactgtgactctgctgccagctgcggacctggatgatttttccaagcagctgcaacagtctatgagctctgcggactctacgcaggcttaa

SEQ ID NO: 276 - DNA, 2016 bp, Artificial Sequence
  Description of Artificial Sequence: Synthetic polynucleotide
atgcaccatcatcaccatcatggtggttctggttcgccgatacttggttattggaagattaaaggactggttcagcccacacgcctcctgctagaatacttagaggaaaaatatgaagagcacctgtacgaacgtgatgagggggacaaatggcgaaacaagaaatttgaattgggcttagaatttccaaatttgccgtattatatcgatggcgacgtaaaactgacccaatcaatggccattattcgctacatcgcagataaacataacatgctgggtggctgccctaaagaacgggctgagatctccatgctggaaggtgcggtgctcgacattcgctacggcgtcagtagaattgcgtatagcaaggatttcgaaactttaaaagtggatttcctgagcaaacttccggagatgctgaaaatgtttgaggataggctttgtcataagacgtatctcaatggtgatcatgttacccacccggactttatgctgtacgacgcccttgatgtcgttctgtatatggatcccatgtgcctggacgccttcccgaaattagtgtgttttaaaaaacgtatcgaagcgattccacagatcgataaatacttgaagtcttctaaatatattgcttggcctctgcaaggctggcaggcaacgttcggtgggggagatcatccgccaaaatcagatctggtgccgcgtgggagccctggcatacaccgcgacggtggttctggtgagaacctgtactttcaaagctcagataatgggcctcaaaaccagcgcaacgctccacgtataaccttcggtggcccgtctgactccacaggcagcaaccagaatggtgagcgtagtggagccaggtctaagcagcgccgtccccagggtctgccgaacaacacggcgagctggtttactgcgcttacccaacacggtaaagaagacttaaaattcccgcgtggccagggcgtcccgatcaacactaactcttccccggatgatcagattggttattaccgcagagcaactcgtcggattcgcggcggcgacggtaaaatgaaagatttgtctccgcgttggtacttttactatctcggcaccggtccggaagctggactgccctacggggcaaacaaggacgggatcatttgggtggctaccgaaggtgccctgaatactccaaaagatcatatcggcacccgtaaccctgctaataacgctgcgatcgttctgcaactgcctcagggtacaactctgccaaaaggcttctatgcagaagggtcgcgtggtggcagccaggcgagtagccgtagcagctcccgctctcgcaactcgtcccgtaactccactccgggctcttctcgcggcacgtccccggctcgtatggcaggtaacggtggtgacgctgctctggcgctgctactgctggacaggctgaaccagctggagtcgaagatgagtggtaaaggccaacagcagcagggccagaccgttaccaaaaagagcgcagctgaagcatctaaaaaaccgcgacagaaacgtaccgcgactaaagattacaatgtaacacaggccttcggtcgtcgaggtccggagcaaactcaaggaaactttggcgatcaggatttaatcaaattagggaccgactacaaacactggccgcaaattgcccagttcgccccatccgctagtgcattcttcggtatgagccgcatcggcatggaagaaacgccaagtggtacgtggctgacctacaccggtgctatcaagcttgataagaaggacccgaactttaaagaccaggttattctgcttaacaaacatattgatgcctataaaactttcccgccgaccgaacccaaaaaggacaaaaagaaaaaagctgatgaaacccaggctctaccgcagcgtcagaaaaaacagcaaactgtgactctgctgccagctgcggacctggatgatttttccaagcagctgcaacagtctatgagctctgcggactctacgcaggcttaa

SEQ ID NO: 277 - DNA, 2016 bp, Artificial Sequence
  Description of Artificial Sequence: Synthetic polynucleotide
atgcaccatcatcaccatcatggtggttctggttcgccgatacttggttattggaagattaaaggactggttcagcccacacgcctcctgctagaatacttagaggaaaaatatgaagagcacctgtacgaacgtgatgagggggacaaatggcgaaacaagaaatttgaattgggcttagaatttccaaatttgccgtattatatcgatggcgacgtaaaactgacccaatcaatggccattattcgctacatcgcagataaacataacatgctgggtggctgccctaaagaacgggctgagatctccatgctggaaggtgcggtgctcgacattcgctacggcgtcagtagaattgcgtatagcaaggatttcgaaactttaaaagtggatttcctgagcaaacttccggagatgctgaaaatgtttgaggataggctttgtcataagacgtatctcaatggtgatcatgttacccacccggactttatgctgtacgacgcccttgatgtcgttctgtatatggatcccatgtgcctggacgccttcccgaaattagtgtgttttaaaaaacgtatcgaagcgattccacagatcgataaatacttgaagtcttctaaatatattgcttggcctctgcaaggctggcaggcaacgttcggtgggggagatcatccgccaaaatcagatctggtgccgcgtgggagccctggcatacaccgcgacggtggttctggtgagaacctgtactttcaaagctcagataatgggcctcaaaaccagcgcaacgctccacgtataaccttcggtggcccgtctgactccacaggcagcaaccagaatggtgagcgtagtggagccaggtctaagcagcgccgtccccagggtctgccgaacaacacggcgagctggtttactgcgcttacccaacacggtaaagaagacttaaaattcccgcgtggccagggcgtcccgatcaacactaactcttccccggatgatcagattggttattaccgcagagcaactcgtcggattcgcggcggcgacggtaaaatgaaagatttgtctccgcgttggtacttttactatctcggcaccggtccggaagctggactgccctacggggcaaacaaggacgggatcatttgggtggctaccgaaggtgccctgaatactccaaaagatcatatcggcacccgtaaccctgctaataacgctgcgatcgttctgcaactgcctcagggtacaactctgccaaaaggcttctatgcagaagggtcgcgtggtggcagccaggcgagtagccgtagcagctcccgctctcgcaactcgtcccgtaactccactccgggctcttctcgcggcacgtccccggctcgtatggcaggtaacggtggtgacgctgctctggcgctgctactgctggacaggctgaaccagctggagtcgaagatgagtggtaaaggccaacagcagcagggccagaccgttaccaaaaagagcgcagctgaaatgtctaaaaaaccgcgacagaaacgtaccgcgactaaagcgtacaatgtaacacaggccttcggtcgtcgaggtccggagcaaactcaaggaaactttggcgatcaggaattaatccgccaggggaccgactacaaacactggccgcaaattgcccagttcgccccatccgctagtgcattcttcggtatgagccgcatcggcatggaagtaacgccaagtggtacgtggctgacctacaccggtgctatcaagcttgatgacaaggacccgaactttaaagaccaggttattctgcttaacaaacatattgatgcctataaaactttcccgccgaccgaacccaaaaaggacaaaaagaaaaaagctgatgaaacccaggctctaccgcagcgtcagaaaaaacagcaaactgtgactctgctgccagctgcggacctggatgatttttccaagcagctgcaacagtctatgagctctgcggactctacgcaggcttaa

SEQ ID NO: 278 - DNA, 2016 bp, Artificial Sequence
  Description of Artificial Sequence: Synthetic polynucleotide
atgcaccatcatcaccatcatggtggttctggttcgccgatacttggttattggaagattaaaggactggttcagcccacacgcctcctgctagaatacttagaggaaaaatatgaagagcacctgtacgaacgtgatgagggggacaaatggcgaaacaagaaatttgaattgggcttagaatttccaaatttgccgtattatatcgatggcgacgtaaaactgacccaatcaatggccattattcgctacatcgcagataaacataacatgctgggtggctgccctaaagaacgggctgagatctccatgctggaaggtgcggtgctcgacattcgctacggcgtcagtagaattgcgtatagcaaggatttcgaaactttaaaagtggatttcctgagcaaacttccggagatgctgaaaatgtttgaggataggctttgtcataagacgtatctcaatggtgatcatgttacccacccggactttatgctgtacgacgcccttgatgtcgttctgtatatggatcccatgtgcctggacgccttcccgaaattagtgtgttttaaaaaacgtatcgaagcgattccacagatcgataaatacttgaagtcttctaaatatattgcttggcctctgcaaggctggcaggcaacgttcggtgggggagatcatccgccaaaatcagatctggtgccgcgtgggagccctggcatacaccgcgacggtggttctggtgagaacctgtactttcaaagctcagataatgggcctcaaaaccagcgcaacgctccacgtataaccttcggtggcccgtctgactccacaggcagcaaccagaatggtgagcgtagtggagccaggtctaagcagcgccgtccccagggtctgccgaacaacacggcgagctggtttactgcgcttacccaacacggtaaagaagacttaaaattcccgcgtggccagggcgtcccgatcaacactaactcttccccggatgatcagattggttattaccgcagacaaactcgtcggattcgcggcggcgacggtaaaatgaaagatttgtctccgcgttggtacttttactatctcggcaccggtccggaagctggactgccctacggggcaaacaaggacgggatcatttgggtggctaccgaaggtgccctgaatactccaaaagatcatatcggcacccgtaaccctgctaataacgctgcgatcgttctgcaactgcctcagggtacaactctgccaaaaggcttctatgcagaagggtcgcgtggtggcagccaggcgagtagccgtagcagctcccgctctcgcaactcgtcccgtaactccactccgggctcttctcgcggcacgtccccggctcgtatggcaggtaacggtggtgacgctgctctggcgctgctactgctggacaggctgaaccagctggagtcgaagatgagtggtaaaggccaacagcagcagggccagaccgttaccaaaaagagcgcagctgaagcatctaaaaaaccgcgacagaaacgtaccgcgactaaagcgtacaatgtaacacaggccttcggtcgtcgaggtccggagcaaactcaaggaaactttggcgatcaggaattaatccgccaggggaccgactacaaacactggccgcaaattgcccagttcgccccatccgctagtgcattcttcggtatgagccgcatcggcatggaagtaacgccaagtggtacgtggctgacctacaccggtgctatcaagcttgatgacaaggacccgaactttaaagaccaggttattctgcttaacaaacatattgatgcctataaaactttcccgccgaccgaacccaaaaaggacaaaaagaaaaaagctgatgaaacccaggctctaccgcagcgtcagaaaaaacagcaaactgtgactctgctgccagctgcggacctggatgatttttccaagcagctgcaacagtctatgagctctgcggactctacgcaggcttaa

SEQ ID NO: 279 - DNA, 2016 bp, Artificial Sequence
  Description of Artificial Sequence: Synthetic polynucleotide
atgcaccatcatcaccatcatggtggttctggttcgccgatacttggttattggaagattaaaggactggttcagcccacacgcctcctgctagaatacttagaggaaaaatatgaagagcacctgtacgaacgtgatgagggggacaaatggcgaaacaagaaatttgaattgggcttagaatttccaaatttgccgtattatatcgatggcgacgtaaaactgacccaatcaatggccattattcgctacatcgcagataaacataacatgctgggtggctgccctaaagaacgggctgagatctccatgctggaaggtgcggtgctcgacattcgctacggcgtcagtagaattgcgtatagcaaggatttcgaaactttaaaagtggatttcctgagcaaacttccggagatgctgaaaatgtttgaggataggctttgtcataagacgtatctcaatggtgatcatgttacccacccggactttatgctgtacgacgcccttgatgtcgttctgtatatggatcccatgtgcctggacgccttcccgaaattagtgtgttttaaaaaacgtatcgaagcgattccacagatcgataaatacttgaagtcttctaaatatattgcttggcctctgcaaggctggcaggcaacgttcggtgggggagatcatccgccaaaatcagatctggtgccgcgtgggagccctggcatacaccgcgacggtggttctggtgagaacctgtactttcaaagctcagataatgggcctcaaaaccagcgcaacgctccacgtataaccttcggtggcccgtctgactccacaggcagcaaccagaatggtgagcgtagtggagccaggtctaagcagcgccgtccccagggtctgccgaacaacacggcgagctggtttactgcgcttacccaacacggtaaagaagacttaaaattcccgcgtggccagggcgtcccgatcaacactaactcttccccggatgatcagattggttattaccgcagagcaactcgtcggattcgcggcggcgacggtaaaatgaaagatttgtctccgcgttggtacttttactatctcggcaccggtccggaagctggactgccctacggggcaaacaaggacgggatcatttgggtggctaccgaaggtgccctgaatactccaaaagatcatatcggcacccgtaaccctgctaattttgctgcgatcgttctgcaactgcctcagggtacaactctgccaaaaggcttctatgcagaagggtcgcgtggtggcagccaggcgagtagccgtagcagctcccgctctcgcaactcgtcccgtaactccactccgggctcttctcgcggcacgtccccggctcgtatggcaggtaacggtggtgacgctgctctggcgctgctactgctggacaggctgaaccagctggagtcgaagatgagtggtaaaggccaacagcagcagggccagaccgttaccaaaaagagcgcagctgaagcatctaaaaaaccgcgacagaaacgtaccgcgactaaagcgtacaatgtaacacaggccttcggtcgtcgaggtccggagcaaactcaaggaaactttggcgatcaggaattaatccgccaggggaccgactacaaacactggccgcaaattgcccagttcgccccatccgctagtgcattcttcggtatgagccgcatcggcatggaagtaacgccaagtggtacgtggctgacctacaccggtgctatcaagcttgatgacaaggacccgaactttaaagaccaggttattctgcttaacaaacatattgatgcctataaaactttcccgccgaccgaacccaaaaaggacaaaaagaaaaaagctgatgaaacccaggctctaccgcagcgtcagaaaaaacagcaaactgtgactctgctgccagctgcggacctggatgatttttccaagcagctgcaacagtctatgagctctgcggactctacgcaggcttaa

SEQ ID NO: 280 - DNA, 2016 bp, Artificial Sequence
  Description of Artificial Sequence: Synthetic polynucleotide
atgcaccatcatcaccatcatggtggttctggttcgccgatacttggttattggaagattaaaggactggttcagcccacacgcctcctgctagaatacttagaggaaaaatatgaagagcacctgtacgaacgtgatgagggggacaaatggcgaaacaagaaatttgaattgggcttagaatttccaaatttgccgtattatatcgatggcgacgtaaaactgacccaatcaatggccattattcgctacatcgcagataaacataacatgctgggtggctgccctaaagaacgggctgagatctccatgctggaaggtgcggtgctcgacattcgctacggcgtcagtagaattgcgtatagcaaggatttcgaaactttaaaagtggatttcctgagcaaacttccggagatgctgaaaatgtttgaggataggctttgtcataagacgtatctcaatggtgatcatgttacccacccggactttatgctgtacgacgcccttgatgtcgttctgtatatggatcccatgtgcctggacgccttcccgaaattagtgtgttttaaaaaacgtatcgaagcgattccacagatcgataaatacttgaagtcttctaaatatattgcttggcctctgcaaggctggcaggcaacgttcggtgggggagatcatccgccaaaatcagatctggtgccgcgtgggagccctggcatacaccgcgacggtggttctggtgagaacctgtactttcaaagctcagataatgggcctcaaaaccagcgcaacgctccacgtataaccttcggtggcccgtctgactccacaggcagcaaccagaatggtgagcgtagtggagccaggtctaagcagcgccgtccccagggtctgccgaacaacacggcgagctggtttactggccttacccaaaatggtaaagaagacttaaaattcccgccaggccagggcgtcccgatcaacactaactcttccccggatgatcagattggttattaccgcagagcaactcgtcggattcgcggcggcgacggtaaaatgaaagatttgccgccgaaatggtacttttactatctcggcaccggtccgcacgctgatctgccctacgggcaaaagcaggacggggtgttttgggtggctcgacctggtgccctgaatactccaaaagatcatatcggcacccgtaaccctgctaataacgctgcgatcccactgcaactgcctccgggtacaaaactgccaaaaggcttctatgcagaagggtcgcgtggtggcagccaggcgagtagccgtagcagctcccgctctcgcaactcgtcccgtaactccactccgggctcttctcgcggcacgtccccggctcgtatggcaggtaacggtggtgacgctgctctggcgctgctactgctggacaggctgaaccagctggagtcgaagatgagtggtaaaggccaacagcagcagggccagaccgttaccaaaaagagcgcagctgaagcatctaaaaaaccgcgacagaaacgtaccgcgactaaagcgtacaatgtaacacaggccttcggtcgtcgaggtccggagcaaactcaaggaaactttggcgatcaggaattaatccgccaggggaccgactacaaacactggccgcaaattgcccagttcgccccatccgctagtgcattcttcggtatgagccgcatcggcatggaagtaacgccaagtggtacgtggctgacctacaccggtgctatcaagcttgatgacaaggacccgaactttaaagaccaggttattctgcttaacaaacatattgatgcctataaaactttcccgccgaccgaacccaaaaaggacaaaaagaaaaaagctgatgaaacccaggctctaccgcagcgtcagaaaaaacagcaaactgtgactctgctgccagctgcggacctggatgatttttccaagcagctgcaacagtctatgagctctgcggactctacgcaggcttaa

SEQ ID NO: 281 - DNA, 2016 bp, Artificial Sequence
  Description of Artificial Sequence: Synthetic polynucleotide
atgcaccatcatcaccatcatggtggttctggttcgccgatacttggttattggaagattaaaggactggttcagcccacacgcctcctgctagaatacttagaggaaaaatatgaagagcacctgtacgaacgtgatgagggggacaaatggcgaaacaagaaatttgaattgggcttagaatttccaaatttgccgtattatatcgatggcgacgtaaaactgacccaatcaatggccattattcgctacatcgcagataaacataacatgctgggtggctgccctaaagaacgggctgagatctccatgctggaaggtgcggtgctcgacattcgctacggcgtcagtagaattgcgtatagcaaggatttcgaaactttaaaagtggatttcctgagcaaacttccggagatgctgaaaatgtttgaggataggctttgtcataagacgtatctcaatggtgatcatgttacccacccggactttatgctgtacgacgcccttgatgtcgttctgtatatggatcccatgtgcctggacgccttcccgaaattagtgtgttttaaaaaacgtatcgaagcgattccacagatcgataaatacttgaagtcttctaaatatattgcttggcctctgcaaggctggcaggcaacgttcggtgggggagatcatccgccaaaatcagatctggtgccgcgtgggagccctggcatacaccgcgacggtggttctggtgagaacctgtactttcaaagctcagataatgggcctcaaaaccagcgcaacgctccacgtataaccttcggtggcccgtctgactccacaggcagcaaccagaatggtgagcgtagtggagccaggtctaagcagcgccgtccccagggtctgccgaacaacacggcgagctggtttactgcgcttacccaacacggtaaagaagacttaaaattcccgcgtggccagggcgtcccgatcaacactaactcttccccggatgatcagattggttattaccgcagagcaactcgtcggattcgcggcggcgacggtaaaatgaaagatttgtctccgcgttggtacttttactatctcggcaccggtccggaagctggactgccctacggggcaaacaaggacgggatcatttgggtggctaccgaaggtgccctgaatactccaaaagatcatatcggcacccgtaaccctgctaataacgctgcgatcgttctgcaactgcctcagggtacaactctgccaaaaggcttctatgcagaagggtcgcgtggtggcagccaggcgagtagccgtagcagctcccgctctcgcaactcgtcccgtaactccactccgggctcttctcgcggcacgtccccggctcgtatggcaggtaacggtggtgacgctgctctggcgctgctactgctggacaggctgaaccagctggagtcgaagatgagtggtaaaggccaacagcagcagggccagaccgttaccaaaaagagcgcagctgaaatgtctaaaaaaccgcgacagaaacgtaccgcgactaaaggatacaatgtaacacagtgtttcggtccacgaggtccggagcaaactcaaggaaactttggcgatgaagaattaatccgcaaggggaccgactacaaacactggccgcaaattgcccagttcgccccatccgctagtgcattcttcggtatgagccgcatctcgagtaaagaaacgccaagtggtacgtggctgacctacaccggtgctatcaagcttgataaagatgacccgaactttaaagaccaggttattctgcttaacaaacatattgatgcctataaaactttcccgccgaccgaacccaaaaaggacaaaaagaaaaaagctgatgaaacccaggctctaccgcagcgtcagaaaaaacagcaaactgtgactctgctgccagctgcggacctggatgatttttccaagcagctgcaacagtctatgagctctgcggactctacgcaggcttaa

SEQ ID NO: 282 - DNA, 2016 bp, Artificial Sequence
  Description of Artificial Sequence: Synthetic polynucleotide
atgcaccatcatcaccatcatggtggttctggttcgccgatacttggttattggaagattaaaggactggttcagcccacacgcctcctgctagaatacttagaggaaaaatatgaagagcacctgtacgaacgtgatgagggggacaaatggcgaaacaagaaatttgaattgggcttagaatttccaaatttgccgtattatatcgatggcgacgtaaaactgacccaatcaatggccattattcgctacatcgcagataaacataacatgctgggtggctgccctaaagaacgggctgagatctccatgctggaaggtgcggtgctcgacattcgctacggcgtcagtagaattgcgtatagcaaggatttcgaaactttaaaagtggatttcctgagcaaacttccggagatgctgaaaatgtttgaggataggctttgtcataagacgtatctcaatggtgatcatgttacccacccggactttatgctgtacgacgcccttgatgtcgttctgtatatggatcccatgtgcctggacgccttcccgaaattagtgtgttttaaaaaacgtatcgaagcgattccacagatcgataaatacttgaagtcttctaaatatattgcttggcctctgcaaggctggcaggcaacgttcggtgggggagatcatccgccaaaatcagatctggtgccgcgtgggagccctggcatacaccgcgacggtggttctggtgagaacctgtactttcaaagctcagataatgggcctcaaaaccagcgcaacgctccacgtataaccttcggtggcccgtctgactccacaggcagcaaccagaatggtgagcgtagtggagccaggtctaagcagcgccgtccccagggtctgccgaacaacacggcgagctggtttactgcgcttacccaacacggtaaagaagacttaaaattcccgcgtggccagggcgtcccgatcaacactaactcttccccggatgatcagattggttattaccgcagagcaactcgtcggattcgcggcggcgacggtaaaatgaaagatttgtctccgcgttggtacttttactatctcggcaccggtccggaagctggactgccctacggggcaaacaaggacgggatcatttgggtggctaccgaaggtgccctgaatactccaaaagatcatatcggcacccgtaaccctgctaataacgctgcgatcgttctgcaactgcctcagggtacaactctgccaaaaggcttctatgcagaagggtcgcgtggtggcagccaggcgagtagccgtagcagcgagcgctctcgcaactcgtcccgtaactccactccgggctcttctcgcggcacgtccccggctcgtatggcaggtaacggtggtgacgctgctctggcgctgctactgctggacaggctgaaccagctggagtcgaagatgagtggtaaaggccaacagcagcagggccagaccgttaccaaaaagagcgcagctgaagcatctaaaaaaccgcgacagaaacgtaccgcgactaaagcgtacaatgtaacacaggccttcggtcgtcgaggtccggagcaaactcaaggaaactttggcgatcaggaattaatccgccaggggaccgactacaaacactggccgcaaattgcccagttcgccccatccgctagtgcattcttcggtatgagccgcatcggcatggaagtaacgccaagtggtacgtggctgacctacaccggtgctatcaagcttgatgacaaggacccgaactttaaagaccaggttattctgcttaacaaacatattgatgcctataaaactttcccgccgaccgaacccaaaaaggacaaaaagaaaaaagctgatgaaacccaggctctaccgcagcgtcagaaaaaacagcaaactgtgactctgctgccagctgcggacctggatgatttttccaagcagctgcaacagtctatgagctctgcggactctacgcaggcttaa

SEQ ID NO: 283 - DNA, 2016 bp, Artificial Sequence
  Description of Artificial Sequence: Synthetic polynucleotide
atgcaccatcatcaccatcatggtggttctggttcgccgatacttggttattggaagattaaaggactggttcagcccacacgcctcctgctagaatacttagaggaaaaatatgaagagcacctgtacgaacgtgatgagggggacaaatggcgaaacaagaaatttgaattgggcttagaatttccaaatttgccgtattatatcgatggcgacgtaaaactgacccaatcaatggccattattcgctacatcgcagataaacataacatgctgggtggctgccctaaagaacgggctgagatctccatgctggaaggtgcggtgctcgacattcgctacggcgtcagtagaattgcgtatagcaaggatttcgaaactttaaaagtggatttcctgagcaaacttccggagatgctgaaaatgtttgaggataggctttgtcataagacgtatctcaatggtgatcatgttacccacccggactttatgctgtacgacgcccttgatgtcgttctgtatatggatcccatgtgcctggacgccttcccgaaattagtgtgttttaaaaaacgtatcgaagcgattccacagatcgataaatacttgaagtcttctaaatatattgcttggcctctgcaaggctggcaggcaacgttcggtgggggagatcatccgccaaaatcagatctggtgccgcgtgggagccctggcatacaccgcgacggtggttctggtgagaacctgtactttcaaagctcagataatgggcctcaaaaccagcgcaacgctccacgtataaccttcggtggcccgtctgactccacaggcagcaaccagaatggtgagcgtagtggagccaggtctaagcagcgccgtccccagggtctgccgaacaacacggcgagctggtttactgcgcttacccaacacggtaaagaagacttaaaattcccgcgtggccagggcgtcccgatcaacactaactcttccccggatgatcagattggttattaccgcagagcaactcgtcggattcgcggcggcgacggtaaaatgaaagatttgtctccgcgttggtacttttactatctcggcaccggtccggaagctggactgccctacggggcaaacaaggacgggatcatttgggtggctgaagaaggtgccctgaatactccaaaagatcatatcggcacccgtaaccctgctaataacgctgcgatcgttctgcaactgcctcagggtacaactctgccaaaaggcttctatgcagaagggtcgcgtggtggcagccaggcgagtagccgtagcagctcccgctctcgcaactcgtcccgtaactccactccgggctcttctcgcggcacgtccccggctcgtatggcaggtaacggtggtgacgctgctctggcgctgctactgctggacaggctgaaccagctggagtcgaagatgagtggtaaaggccaacagcagcagggccagaccgttaccaaaaagagcgcagctgaagcatctaaaaaaccgcgacagaaacgtaccgcgactaaagcgtacaatgtaacacaggccttcggtcgtcgaggtccggagcaaactcaaggaaactttggcgatcaggaattaatccgccaggggaccgactacaaacactggccgcaaattgcccagttcgccccatccgctagtgcattcttcggtatgagccgcatcggcatggaagtaacgccaagtggtacgtggctgacctacaccggtgctatcaagcttgatgacaaggacccgaactttaaagaccaggttattctgcttaacaaacatattgatgcctataaaactttcccgccgaccgaacccaaaaaggacaaaaagaaaaaagctgatgaaacccaggctctaccgcagcgtcagaaaaaacagcaaactgtgactctgctgccagctgcggacctggatgatttttccaagcagctgcaacagtctatgagctctgcggactctacgcaggcttaa

SEQ ID NO: 284 - DNA, 2016 bp, Artificial Sequence
  Description of Artificial Sequence: Synthetic polynucleotide
atgcaccatcatcaccatcatggtggttctggttcgccgatacttggttattggaagattaaaggactggttcagcccacacgcctcctgctagaatacttagaggaaaaatatgaagagcacctgtacgaacgtgatgagggggacaaatggcgaaacaagaaatttgaattgggcttagaatttccaaatttgccgtattatatcgatggcgacgtaaaactgacccaatcaatggccattattcgctacatcgcagataaacataacatgctgggtggctgccctaaagaacgggctgagatctccatgctggaaggtgcggtgctcgacattcgctacggcgtcagtagaattgcgtatagcaaggatttcgaaactttaaaagtggatttcctgagcaaacttccggagatgctgaaaatgtttgaggataggctttgtcataagacgtatctcaatggtgatcatgttacccacccggactttatgctgtacgacgcccttgatgtcgttctgtatatggatcccatgtgcctggacgccttcccgaaattagtgtgttttaaaaaacgtatcgaagcgattccacagatcgataaatacttgaagtcttctaaatatattgcttggcctctgcaaggctggcaggcaacgttcggtgggggagatcatccgccaaaatcagatctggtgccgcgtgggagccctggcatacaccgcgacggtggttctggtgagaacctgtactttcaaagctcagataatgggcctcaaaaccagcgcaacgctccacgtataaccttcggtggcccgtctgactccacaggcagcaaccagaatggtgagcgtagtggagccaggtctaagcagcgccgtccccagggtctgccgaacaacacggcgagctggtttactgcgcttacccaacacggtaaagaagacttaaaattcccgcgtggccagggcgtcccgatcaacactaactcttccccggatgatcagattggttattaccgcagagcaactcgtcggattcgcggcggcgacggtaaaatgaaagatttgtctccgcgttggtacttttactatctcggcaccggtccggaagctggactgccctacggggcaaacaaggaagggatcatttgggtggctaccgaaggtgccctgaatactccaaaagatcatatcggcacccgtaaccctgctaataacgctgcgatcgttctgcaactgcctcagggtacaactctgccaaaaggcttctatgcagaagggtcgcgtggtggcagccaggcgagtagccgtagcagctcccgctctcgcaactcgtcccgtaactccactccgggctcttctcgcggcacgtccccggctcgtatggcaggtaacggtggtgacgctgctctggcgctgctactgctggacaggctgaaccagctggagtcgaagatgagtggtaaaggccaacagcagcagggccagaccgttaccaaaaagagcgcagctgaagcatctaaaaaaccgcgacagaaacgtaccgcgactaaagcgtacaatgtaacacaggccttcggtcgtcgaggtccggagcaaactcaaggaaactttggcgatcaggaattaatccgccaggggaccgactacaaacactggccgcaaattgcccagttcgccccatccgctagtgcattcttcggtatgagccgcatcggcatggaagtaacgccaagtggtacgtggctgacctacaccggtgctatcaagcttgatgacaaggacccgaactttaaagaccaggttattctgcttaacaaacatattgatgcctataaaactttcccgccgaccgaacccaaaaaggacaaaaagaaaaaagctgatgaaacccaggctctaccgcagcgtcagaaaaaacagcaaactgtgactctgctgccagctgcggacctggatgatttttccaagcagctgcaacagtctatgagctctgcggactctacgcaggcttaa

SEQ ID NO: 285 - DNA, 2016 bp, Artificial Sequence
  Description of Artificial Sequence: Synthetic polynucleotide
atgcaccatcatcaccatcatggtggttctggttcgccgatacttggttattggaagattaaaggactggttcagcccacacgcctcctgctagaatacttagaggaaaaatatgaagagcacctgtacgaacgtgatgagggggacaaatggcgaaacaagaaatttgaattgggcttagaatttccaaatttgccgtattatatcgatggcgacgtaaaactgacccaatcaatggccattattcgctacatcgcagataaacataacatgctgggtggctgccctaaagaacgggctgagatctccatgctggaaggtgcggtgctcgacattcgctacggcgtcagtagaattgcgtatagcaaggatttcgaaactttaaaagtggatttcctgagcaaacttccggagatgctgaaaatgtttgaggataggctttgtcataagacgtatctcaatggtgatcatgttacccacccggactttatgctgtacgacgcccttgatgtcgttctgtatatggatcccatgtgcctggacgccttcccgaaattagtgtgttttaaaaaacgtatcgaagcgattccacagatcgataaatacttgaagtcttctaaatatattgcttggcctctgcaaggctggcaggcaacgttcggtgggggagatcatccgccaaaatcagatctggtgccgcgtgggagccctggcatacaccgcgacggtggttctggtgagaacctgtactttcaaagctcagataatgggcctcaaaaccagcgcaacgctccacgtataaccttcggtggcccgtctgactccacaggcagcaaccagaatggtgagcgtagtggagccaggtctaagcagcgccgtccccagggtctgccgaacaacacggcgagctggtttactgcgcttacccaacagggtaaagaagacttaaaattcccgcgtggccagggcgtcccgatcaacactaactcttccccggatgatcagattggttattaccgcagagcaactcgtcggattcgcggcggcgacggtaaaatgaaagatttgtctccgcgttggtacttttactatctcggcaccggtccggaagctggactgccctacggggcaaacaaggacgggatcatttgggtggctaccgaaggtgccctgaatactccaaaagatcatatcggcacccgtaaccctgctaataacgctgcgatcgttctgcaactgcctcagggtacaactctgccaaaaggcttctatgcagaagggtcgcgtggtggcagccaggcgagtagccgtagcagctcccgctctcgcaactcgtcccgtaactccactccgggctcttctcgcggcacgtccccggctcgtatggcaggtaacggtggtgacgctgctctggcgctgctactgctggacaggctgaaccagctggagtcgaagatgagtggtaaaggccaacagcagcagggccagaccgttaccaaaaagagcgcagctgaagcatctaaaaaaccgcgacagaaacgtaccgcgactaaagcgtacaatgtaacacaggccttcggtcgtcgaggtccggagcaaactcaaggaaactttggcgatcaggaattaatccgccaggggaccgactacaaacactggccgcaaattgcccagttcgccccatccgctagtgcattcttcggtatgagccgcatcggcatggaagtaacgccaagtggtacgtggctgacctacaccggtgctatcaagcttgatgacaaggacccgaactttaaagaccaggttattctgcttaacaaacatattgatgcctataaaactttcccgccgaccgaacccaaaaaggacaaaaagaaaaaagctgatgaaacccaggctctaccgcagcgtcagaaaaaacagcaaactgtgactctgctgccagctgcggacctggatgatttttccaagcagctgcaacagtctatgagctctgcggactctacgcaggcttaa

SEQ ID NO: 286 - DNA, 2016 bp, Artificial Sequence
  Description of Artificial Sequence: Synthetic polynucleotide
atgcaccatcatcaccatcatggtggttctggttcgccgatacttggttattggaagattaaaggactggttcagcccacacgcctcctgctagaatacttagaggaaaaatatgaagagcacctgtacgaacgtgatgagggggacaaatggcgaaacaagaaatttgaattgggcttagaatttccaaatttgccgtattatatcgatggcgacgtaaaactgacccaatcaatggccattattcgctacatcgcagataaacataacatgctgggtggctgccctaaagaacgggctgagatctccatgctggaaggtgcggtgctcgacattcgctacggcgtcagtagaattgcgtatagcaaggatttcgaaactttaaaagtggatttcctgagcaaacttccggagatgctgaaaatgtttgaggataggctttgtcataagacgtatctcaatggtgatcatgttacccacccggactttatgctgtacgacgcccttgatgtcgttctgtatatggatcccatgtgcctggacgccttcccgaaattagtgtgttttaaaaaacgtatcgaagcgattccacagatcgataaatacttgaagtcttctaaatatattgcttggcctctgcaaggctggcaggcaacgttcggtgggggagatcatccgccaaaatcagatctggtgccgcgtgggagccctggcatacaccgcgacggtggttctggtgagaacctgtactttcaaagctcagataatgggcctcaaaaccagcgcaacgctccacgtataaccttcggtggcccgtctgactccacaggcagcaaccagaatggtgagcgtagtggagccaggtctaagcagcgccgtccccagggtctgccgaacaacacggcgagctggtttactgcgcttacccaacacggtaaagaagacttaaaattcccgcgtggccagggcgtcccgatcaacactaactcttccccggatgatcagattggttattaccgcagagcaactcgtcggattcgcggcggcgacggtaaaatgaaagatttgtctccgcgttggtacttttactatctcggcaccggtccggaagctggactgccctacggggcaaacaaggacgggatcatttgggtggctaccgaaggtgccctgaatactccaaaagatcatatcggcacccgtaaccctgctaataacgctgcgacggttctgcaactgcctcagggtacaactctgccaaaaggcttctatgcagaagggtcgcgtggtggcagccaggcgagtagccgtagcagctcccgctctcgcaactcgtcccgtaactccactccgggctcttctcgcggcacgtccccggctcgtatggcaggtaacggtggtgacgctgctctggcgctgctactgctggacaggctgaaccagctggagtcgaagatgagtggtaaaggccaacagcagcagggccagaccgttaccaaaaagagcgcagctgaagcatctaaaaaaccgcgacagaaacgtaccgcgactaaagcgtacaatgtaacacaggccttcggtcgtcgaggtccggagcaaactcaaggaaactttggcgatcaggaattaatccgccaggggaccgactacaaacactggccgcaaattgcccagttcgccccatccgctagtgcattcttcggtatgagccgcatcggcatggaagtaacgccaagtggtacgtggctgacctacaccggtgctatcaagcttgatgacaaggacccgaactttaaagaccaggttattctgcttaacaaacatattgatgcctataaaactttcccgccgaccgaacccaaaaaggacaaaaagaaaaaagctgatgaaacccaggctctaccgcagcgtcagaaaaaacagcaaactgtgactctgctgccagctgcggacctggatgatttttccaagcagctgcaacagtctatgagctctgcggactctacgcaggcttaa

SEQ ID NO: 287 - DNA, 2016 bp, Artificial Sequence
  Description of Artificial Sequence: Synthetic polynucleotide
atgcaccatcatcaccatcatggtggttctggttcgccgatacttggttattggaagattaaaggactggttcagcccacacgcctcctgctagaatacttagaggaaaaatatgaagagcacctgtacgaacgtgatgagggggacaaatggcgaaacaagaaatttgaattgggcttagaatttccaaatttgccgtattatatcgatggcgacgtaaaactgacccaatcaatggccattattcgctacatcgcagataaacataacatgctgggtggctgccctaaagaacgggctgagatctccatgctggaaggtgcggtgctcgacattcgctacggcgtcagtagaattgcgtatagcaaggatttcgaaactttaaaagtggatttcctgagcaaacttccggagatgctgaaaatgtttgaggataggctttgtcataagacgtatctcaatggtgatcatgttacccacccggactttatgctgtacgacgcccttgatgtcgttctgtatatggatcccatgtgcctggacgccttcccgaaattagtgtgttttaaaaaacgtatcgaagcgattccacagatcgataaatacttgaagtcttctaaatatattgcttggcctctgcaaggctggcaggcaacgttcggtgggggagatcatccgccaaaatcagatctggtgccgcgtgggagccctggcatacaccgcgacggtggttctggtgagaacctgtactttcaaagctcagataatgggcctcaaaaccagcgcaacgctccacgtataaccttcggtggcccgtctgactccacaggcagcaaccagaatggtgagcgtagtggagccaggtctaagcagcgccgtccccagggtctgccgaacaacacggcgagctggtttactgcgcttacccaacacggtaaagaagacttaaaattcccgcgtggccagggcgtcccgatcaacactaactcttccccggatgatcagattggttattaccgcagagcaactcgtcggattcgcggcggcgacggtaaaatgaaagatttgtctccgcgttggtacttttactatctcggcaccggtccggaagctggactgccctacggggcaaacaaggacgggatcatttgggtggctaccgaaggtgccctgaatactccaaaagatcatatcggcacccgtaaccctgctaataacgctgcgatcgttctgcaactgcctcagggtacaactctgccaaaaggcttctatgcagaagggtcgcgtggtggcagccaggcgagtagccgtagcagctcccgctctcgcaactcgtcccgtaactccactccgggctcttctcgcggcacgtccccggctcgtatggcaggtaacggtggtgacgctgctctggcgctgctactgctggacaggctgaaccagctggagtcgaagatgagtggtaaaggccaacagcagcagggccagaccgttaccaaaaagagcgcagctgaaatgtctaaaaaaccgcgacagaaacgtaccgcgactaaagggtgtaatgtaacacagtgcttcggtcctcgaggtccggagcaaactcaaggaaactttggcgatgccgaattagtgaaaaaagggaccgactacaaacactggccgcaaattgcccagttcgccccatccgctagtgcattcttcggtatgagccgcatctcgtcgaaggagcagccaagtggtacgtggctgacctacaccggtgctatcaagcttgataaagatgacccgaactttaaagaccaggttattctgcttaacaaacatattgatgcctataaaactttcccgccgaccgaacccaaaaaggacaaaaagaaaaaagctgatgaaacccaggctctaccgcagcgtcagaaaaaacagcaaactgtgactctgctgccagctgcggacctggatgatttttccaagcagctgcaacagtctatgagctctgcggactctacgcaggcttaa

SEQ ID NO: 288 - DNA, 2016 bp, Artificial Sequence
  Description of Artificial Sequence: Synthetic polynucleotide
atgcaccatcatcaccatcatggtggttctggttcgccgatacttggttattggaagattaaaggactggttcagcccacacgcctcctgctagaatacttagaggaaaaatatgaagagcacctgtacgaacgtgatgagggggacaaatggcgaaacaagaaatttgaattgggcttagaatttccaaatttgccgtattatatcgatggcgacgtaaaactgacccaatcaatggccattattcgctacatcgcagataaacataacatgctgggtggctgccctaaagaacgggctgagatctccatgctggaaggtgcggtgctcgacattcgctacggcgtcagtagaattgcgtatagcaaggatttcgaaactttaaaagtggatttcctgagcaaacttccggagatgctgaaaatgtttgaggataggctttgtcataagacgtatctcaatggtgatcatgttacccacccggactttatgctgtacgacgcccttgatgtcgttctgtatatggatcccatgtgcctggacgccttcccgaaattagtgtgttttaaaaaacgtatcgaagcgattccacagatcgataaatacttgaagtcttctaaatatattgcttggcctctgcaaggctggcaggcaacgttcggtgggggagatcatccgccaaaatcagatctggtgccgcgtgggagccctggcatacaccgcgacggtggttctggtgagaacctgtactttcaaagctcagataatgggcctcaaaaccagcgcaacgctccacgtataaccttcggtggcccgtctgactccacaggcagcaaccagaatggtgagcgtagtggagccaggtctaagcagcgccgtccccagggtctgccgaacaacacggcgagctggtttactgcgcttacccaacacggtaaagaagacttaaaattcccgcgtggccagggcgtcccgatcaacactaactcttccccggatgatcagattggttattaccgcagagcaactcgtcggattcgcggcggcgacggtaaaatgaaagatttgtctccgcgttggtacttttactatctcggcaccggtccggaagctggactgccctacggggcaaacaaggacgggatcatttgggtggctaccgaaggtgccctgaatactccaaaagatcatatcggcacccgtaaccctgctaataacgctgcgatcaatctgcaactgcctcagggtacaactctgccaaaaggcttctatgcagaagggtcgcgtggtggcagccaggcgagtagccgtagcagctcccgctctcgcaactcgtcccgtaactccactccgggctcttctcgcggcacgtccccggctcgtatggcaggtaacggtggtgacgctgctctggcgctgctactgctggacaggctgaaccagctggagtcgaagatgagtggtaaaggccaacagcagcagggccagaccgttaccaaaaagagcgcagctgaagcatctaaaaaaccgcgacagaaacgtaccgcgactaaagcgtacaatgtaacacaggccttcggtcgtcgaggtccggagcaaactcaaggaaactttggcgatcaggaattaatccgccaggggaccgactacaaacactggccgcaaattgcccagttcgccccatccgctagtgcattcttcggtatgagccgcatcggcatggaagtaacgccaagtggtacgtggctgacctacaccggtgctatcaagcttgatgacaaggacccgaactttaaagaccaggttattctgcttaacaaacatattgatgcctataaaactttcccgccgaccgaacccaaaaaggacaaaaagaaaaaagctgatgaaacccaggctctaccgcagcgtcagaaaaaacagcaaactgtgactctgctgccagctgcggacctggatgatttttccaagcagctgcaacagtctatgagctctgcggactctacgcaggcttaa

SEQ ID NO: 289 - DNA, 2016 bp, Artificial Sequence
  Description of Artificial Sequence: Synthetic polynucleotide
atgcaccatcatcaccatcatggtggttctggttcgccgatacttggttattggaagattaaaggactggttcagcccacacgcctcctgctagaatacttagaggaaaaatatgaagagcacctgtacgaacgtgatgagggggacaaatggcgaaacaagaaatttgaattgggcttagaatttccaaatttgccgtattatatcgatggcgacgtaaaactgacccaatcaatggccattattcgctacatcgcagataaacataacatgctgggtggctgccctaaagaacgggctgagatctccatgctggaaggtgcggtgctcgacattcgctacggcgtcagtagaattgcgtatagcaaggatttcgaaactttaaaagtggatttcctgagcaaacttccggagatgctgaaaatgtttgaggataggctttgtcataagacgtatctcaatggtgatcatgttacccacccggactttatgctgtacgacgcccttgatgtcgttctgtatatggatcccatgtgcctggacgccttcccgaaattagtgtgttttaaaaaacgtatcgaagcgattccacagatcgataaatacttgaagtcttctaaatatattgcttggcctctgcaaggctggcaggcaacgttcggtgggggagatcatccgccaaaatcagatctggtgccgcgtgggagccctggcatacaccgcgacggtggttctggtgagaacctgtactttcaaagctcagataatgggcctcaaaaccagcgcaacgctccacgtataaccttcggtggcccgtctgactccacaggcagcaaccagaatggtgagcgtagtggagccaggtctaagcagcgccgtccccagggtctgccgaacaacacggcgagctggtttactgcgcttacccaacacggtaaagaagacttaaaattcccgcgtggccagggcgtcccgatcaacactaactcttccccggatgatcagattggttattaccgcagagcaactcgtcggattcgcggcggcgacggtaaaatgaaagatttgtctccgcgttggtacttttactatctcggcaccggtccggaagctggactgccctacggggcaaacaaggacgggatcatttgggtggctaccgaaggtgccctgaatactccaaaagatcatatcggcacccgtaaccctgctaataacgctgcgatcgttctgcaactgcctcagggtacaactattccaaaaggcttctatgcagaagggtcgcgtggtggcagccaggcgagtagccgtagcagctcccgctctcgcaactcgtcccgtaactccactccgggctcttctcgcggcacgtccccggctcgtatggcaggtaacggtggtgacgctgctctggcgctgctactgctggacaggctgaaccagctggagtcgaagatgagtggtaaaggccaacagcagcagggccagaccgttaccaaaaagagcgcagctgaagcatctaaaaaaccgcgacagaaacgtaccgcgactaaagcgtacaatgtaacacaggccttcggtcgtcgaggtccggagcaaactcaaggaaactttggcgatcaggaattaatccgccaggggaccgactacaaacactggccgcaaattgcccagttcgccccatccgctagtgcattcttcggtatgagccgcatcggcatggaagtaacgccaagtggtacgtggctgacctacaccggtgctatcaagcttgatgacaaggacccgaactttaaagaccaggttattctgcttaacaaacatattgatgcctataaaactttcccgccgaccgaacccaaaaaggacaaaaagaaaaaagctgatgaaacccaggctctaccgcagcgtcagaaaaaacagcaaactgtgactctgctgccagctgcggacctggatgatttttccaagcagctgcaacagtctatgagctctgcggactctacgcaggcttaa

SEQ ID NO: 290 - DNA, 2016 bp, Artificial Sequence
  Description of Artificial Sequence: Synthetic polynucleotide
atgcaccatcatcaccatcatggtggttctggttcgccgatacttggttattggaagattaaaggactggttcagcccacacgcctcctgctagaatacttagaggaaaaatatgaagagcacctgtacgaacgtgatgagggggacaaatggcgaaacaagaaatttgaattgggcttagaatttccaaatttgccgtattatatcgatggcgacgtaaaactgacccaatcaatggccattattcgctacatcgcagataaacataacatgctgggtggctgccctaaagaacgggctgagatctccatgctggaaggtgcggtgctcgacattcgctacggcgtcagtagaattgcgtatagcaaggatttcgaaactttaaaagtggatttcctgagcaaacttccggagatgctgaaaatgtttgaggataggctttgtcataagacgtatctcaatggtgatcatgttacccacccggactttatgctgtacgacgcccttgatgtcgttctgtatatggatcccatgtgcctggacgccttcccgaaattagtgtgttttaaaaaacgtatcgaagcgattccacagatcgataaatacttgaagtcttctaaatatattgcttggcctctgcaaggctggcaggcaacgttcggtgggggagatcatccgccaaaatcagatctggtgccgcgtgggagccctggcatacaccgcgacggtggttctggtgagaacctgtactttcaaagctcagataatgggcctcaaaaccagcgcaacgctccacgtataaccttcggtggcccgtctgactccacaggcagcaaccagaatggtgagcgtagtggagccaggtctaagcagcgccgtccccagggtctgccgaacaacacggcgagctggtttactggccttacccaatttggtaaagaagacttaaaattcccgccgggccagggcgtcccgatcaacactaactcttccccggatgatcagattggttattaccgcagagcaactcgtcggattcgcggcggcgacggtaaaatgaaagatttgccaccgaagtggtacttttactatctcggcaccggtccgcacgctgatctgccctacgggcaaaaacaagacggggtattttgggtggctcgacctggtgccctgaatactccaaaagatcatatcggcacccgtaaccctgctaataacgctgcgatccccctgcaactgcctccgggtacaaagctgccaaaaggcttctatgcagaagggtcgcgtggtggcagccaggcgagtagccgtagcagctcccgctctcgcaactcgtcccgtaactccactccgggctcttctcgcggcacgtccccggctcgtatggcaggtaacggtggtgacgctgctctggcgctgctactgctggacaggctgaaccagctggagtcgaagatgagtggtaaaggccaacagcagcagggccagaccgttaccaaaaagagcgcagctgaagcatctaaaaaaccgcgacagaaacgtaccgcgactaaagcgtacaatgtaacacaggccttcggtcgtcgaggtccggagcaaactcaaggaaactttggcgatcaggaattaatccgccaggggaccgactacaaacactggccgcaaattgcccagttcgccccatccgctagtgcattcttcggtatgagccgcatcggcatggaagtaacgccaagtggtacgtggctgacctacaccggtgctatcaagcttgatgacaaggacccgaactttaaagaccaggttattctgcttaacaaacatattgatgcctataaaactttcccgccgaccgaacccaaaaaggacaaaaagaaaaaagctgatgaaacccaggctctaccgcagcgtcagaaaaaacagcaaactgtgactctgctgccagctgcggacctggatgatttttccaagcagctgcaacagtctatgagctctgcggactctacgcaggcttaa

SEQ ID NO: 291 - DNA, 2016 bp, Artificial Sequence
  Description of Artificial Sequence: Synthetic polynucleotide
atgcaccatcatcaccatcatggtggttctggttcgccgatacttggttattggaagattaaaggactggttcagcccacacgcctcctgctagaatacttagaggaaaaatatgaagagcacctgtacgaacgtgatgagggggacaaatggcgaaacaagaaatttgaattgggcttagaatttccaaatttgccgtattatatcgatggcgacgtaaaactgacccaatcaatggccattattcgctacatcgcagataaacataacatgctgggtggctgccctaaagaacgggctgagatctccatgctggaaggtgcggtgctcgacattcgctacggcgtcagtagaattgcgtatagcaaggatttcgaaactttaaaagtggatttcctgagcaaacttccggagatgctgaaaatgtttgaggataggctttgtcataagacgtatctcaatggtgatcatgttacccacccggactttatgctgtacgacgcccttgatgtcgttctgtatatggatcccatgtgcctggacgccttcccgaaattagtgtgttttaaaaaacgtatcgaagcgattccacagatcgataaatacttgaagtcttctaaatatattgcttggcctctgcaaggctggcaggcaacgttcggtgggggagatcatccgccaaaatcagatctggtgccgcgtgggagccctggcatacaccgcgacggtggttctggtgagaacctgtactttcaaagctcagataatgggcctcaaaaccagcgcaacgctccacgtataaccttcggtggcccgtctgactccacaggcagcaaccagaatggtgagcgtagtggagccaggtctaagcagcgccgtccccagggtctgccgaacaacacggcgagctggtttactgcgcttacccaacacggtaaagaagacttaaaattcccgcgtggccagggcgtcccgatcaacactaactcttccccggatgatcagattggttattaccgcagagcaactcgtcggattcgcggcggcgacggtaaaatgaaagatttgtctccgcgttggtacttttactatctcggcaccggtccggaagctggactgccctacggggcaaacaaggacgggatcatttgggtggctaccgaaggtgccctgaatactccaaaagatcatatcggcacccgtaaccctgctaataacgctgcgatcgttctgcaactgcctcagggtacaactctgccaaaaggcttctatgcagaagggtcgcgtggtggcagccaggcgagtagccgtagcagctcccgctctcgcaactcgtcccgtaactccactccgggctcttctcgcggcacgtccccggctcgtatggcaggtaacggtggtgacgctgctctggcgctgctactgctggacaggctgaaccagctggagtcgaagatgagtggtaaaggccaacagcagcagggccagaccgttaccaaaaagagcgcagctgaagcatctaaaaaaccgcgacagaaacgtaccgcgactaaagcgtacaatgtaacacaggccttcggtcgtcgaggtccggagcaaactcaaggaaactttggcgatcaggaattaatccgccaggggaccgactacaaacactggccgcaaattgcccagttcgccccatccgctagtgcattcttcggtatgagccgcatcggcatggaatatacgccaagtggtacgtggctgacctacaccggtgctatcaagcttgatgacaaggacccgaactttaaagaccaggttattctgcttaacaaacatattgatgcctataaaactttcccgccgaccgaacccaaaaaggacaaaaagaaaaaagctgatgaaacccaggctctaccgcagcgtcagaaaaaacagcaaactgtgactctgctgccagctgcggacctggatgatttttccaagcagctgcaacagtctatgagctctgcggactctacgcaggcttaa

SEQ ID NO: 292 - DNA, 2016 bp, Artificial Sequence
  Description of Artificial Sequence: Synthetic polynucleotide
atgcaccatcatcaccatcatggtggttctggttcgccgatacttggttattggaagattaaaggactggttcagcccacacgcctcctgctagaatacttagaggaaaaatatgaagagcacctgtacgaacgtgatgagggggacaaatggcgaaacaagaaatttgaattgggcttagaatttccaaatttgccgtattatatcgatggcgacgtaaaactgacccaatcaatggccattattcgctacatcgcagataaacataacatgctgggtggctgccctaaagaacgggctgagatctccatgctggaaggtgcggtgctcgacattcgctacggcgtcagtagaattgcgtatagcaaggatttcgaaactttaaaagtggatttcctgagcaaacttccggagatgctgaaaatgtttgaggataggctttgtcataagacgtatctcaatggtgatcatgttacccacccggactttatgctgtacgacgcccttgatgtcgttctgtatatggatcccatgtgcctggacgccttcccgaaattagtgtgttttaaaaaacgtatcgaagcgattccacagatcgataaatacttgaagtcttctaaatatattgcttggcctctgcaaggctggcaggcaacgttcggtgggggagatcatccgccaaaatcagatctggtgccgcgtgggagccctggcatacaccgcgacggtggttctggtgagaacctgtactttcaaagctcagataatgggcctcaaaaccagcgcaacgctccacgtataaccttcggtggcccgtctgactccacaggcagcaaccagaatggtgagcgtagtggagccaggtctaagcagcgccgtccccagggtctgccgaacaacacggcgagctggtttactgcgcttacccaacacggtaaagaagacttaaaattcccgaaaggccagggcgtcccgatcaacactaactcttccccggatgatcagattggttattaccgcagagcaactcgtcggattcgcggcggcgacggtaaaatgaaagatttgtctccgcgttggtacttttactatctcggcaccggtccggaagctggactgccctacggggcaaacaaggacgggatcatttgggtggctaccgaaggtgccctgaatactccaaaagatcatatcggcacccgtaaccctgctaataacgctgcgatcgttctgcaactgcctcagggtacaactctgccaaaaggcttctatgcagaagggtcgcgtggtggcagccaggcgagtagccgtagcagctcccgctctcgcaactcgtcccgtaactccactccgggctcttctcgcggcacgtccccggctcgtatggcaggtaacggtggtgacgctgctctggcgctgctactgctggacaggctgaaccagctggagtcgaagatgagtggtaaaggccaacagcagcagggccagaccgttaccaaaaagagcgcagctgaagcatctaaaaaaccgcgacagaaacgtaccgcgactaaagcgtacaatgtaacacaggccttcggtcgtcgaggtccggagcaaactcaaggaaactttggcgatcaggaattaatccgccaggggaccgactacaaacactggccgcaaattgcccagttcgccccatccgctagtgcattcttcggtatgagccgcatcggcatggaagtaacgccaagtggtacgtggctgacctacaccggtgctatcaagcttgatgacaaggacccgaactttaaagaccaggttattctgcttaacaaacatattgatgcctataaaactttcccgccgaccgaacccaaaaaggacaaaaagaaaaaagctgatgaaacccaggctctaccgcagcgtcagaaaaaacagcaaactgtgactctgctgccagctgcggacctggatgatttttccaagcagctgcaacagtctatgagctctgcggactctacgcaggcttaa

SEQ ID NO: 293 - DNA, 2016 bp, Artificial Sequence
  Description of Artificial Sequence: Synthetic polynucleotide
atgcaccatcatcaccatcatggtggttctggttcgccgatacttggttattggaagattaaaggactggttcagcccacacgcctcctgctagaatacttagaggaaaaatatgaagagcacctgtacgaacgtgatgagggggacaaatggcgaaacaagaaatttgaattgggcttagaatttccaaatttgccgtattatatcgatggcgacgtaaaactgacccaatcaatggccattattcgctacatcgcagataaacataacatgctgggtggctgccctaaagaacgggctgagatctccatgctggaaggtgcggtgctcgacattcgctacggcgtcagtagaattgcgtatagcaaggatttcgaaactttaaaagtggatttcctgagcaaacttccggagatgctgaaaatgtttgaggataggctttgtcataagacgtatctcaatggtgatcatgttacccacccggactttatgctgtacgacgcccttgatgtcgttctgtatatggatcccatgtgcctggacgccttcccgaaattagtgtgttttaaaaaacgtatcgaagcgattccacagatcgataaatacttgaagtcttctaaatatattgcttggcctctgcaaggctggcaggcaacgttcggtgggggagatcatccgccaaaatcagatctggtgccgcgtgggagccctggcatacaccgcgacggtggttctggtgagaacctgtactttcaaagctcagataatgggcctcaaaaccagcgcaacgctccacgtataaccttcggtggcccgtctgactccacaggcagcaaccagaatggtgagcgtagtggagccaggtctaagcagcgccgtccccagggtctgccgaacaacacggcgagctggtttactgcgcttacccaacacggtaaagaagacttaaaattcccgcgtggccagggcgtcccgatcaacactaactcttccccggatgatcagattggttattaccgcagagcaactcgtcggattcgcggcggcgacggtaaaatgaaagatttgtctccgcgttggtacttttactatctcggcaccggtccggaagctggactgccctacggggcagtgaaggacgggatcatttgggtggctaccgaaggtgccctgaatactccaaaagatcatatcggcacccgtaaccctgctaataacgctgcgatcgttctgcaactgcctcagggtacaactctgccaaaaggcttctatgcagaagggtcgcgtggtggcagccaggcgagtagccgtagcagctcccgctctcgcaactcgtcccgtaactccactccgggctcttctcgcggcacgtccccggctcgtatggcaggtaacggtggtgacgctgctctggcgctgctactgctggacaggctgaaccagctggagtcgaagatgagtggtaaaggccaacagcagcagggccagaccgttaccaaaaagagcgcagctgaagcatctaaaaaaccgcgacagaaacgtaccgcgactaaagcgtacaatgtaacacaggccttcggtcgtcgaggtccggagcaaactcaaggaaactttggcgatcaggaattaatccgccaggggaccgactacaaacactggccgcaaattgcccagttcgccccatccgctagtgcattcttcggtatgagccgcatcggcatggaagtaacgccaagtggtacgtggctgacctacaccggtgctatcaagcttgatgacaaggacccgaactttaaagaccaggttattctgcttaacaaacatattgatgcctataaaactttcccgccgaccgaacccaaaaaggacaaaaagaaaaaagctgatgaaacccaggctctaccgcagcgtcagaaaaaacagcaaactgtgactctgctgccagctgcggacctggatgatttttccaagcagctgcaacagtctatgagctctgcggactctacgcaggcttaa

SEQ ID NO: 294 - DNA, 2016 bp, Artificial Sequence
  Description of Artificial Sequence: Synthetic polynucleotide
atgcaccatcatcaccatcatggtggttctggttcgccgatacttggttattggaagattaaaggactggttcagcccacacgcctcctgctagaatacttagaggaaaaatatgaagagcacctgtacgaacgtgatgagggggacaaatggcgaaacaagaaatttgaattgggcttagaatttccaaatttgccgtattatatcgatggcgacgtaaaactgacccaatcaatggccattattcgctacatcgcagataaacataacatgctgggtggctgccctaaagaacgggctgagatctccatgctggaaggtgcggtgctcgacattcgctacggcgtcagtagaattgcgtatagcaaggatttcgaaactttaaaagtggatttcctgagcaaacttccggagatgctgaaaatgtttgaggataggctttgtcataagacgtatctcaatggtgatcatgttacccacccggactttatgctgtacgacgcccttgatgtcgttctgtatatggatcccatgtgcctggacgccttcccgaaattagtgtgttttaaaaaacgtatcgaagcgattccacagatcgataaatacttgaagtcttctaaatatattgcttggcctctgcaaggctggcaggcaacgttcggtgggggagatcatccgccaaaatcagatctggtgccgcgtgggagccctggcatacaccgcgacggtggttctggtgagaacctgtactttcaaagctcagataatgggcctcaaaaccagcgcaacgctccacgtataaccttcggtggcccgtctgactccacaggcagcaaccagaatggtgagcgtagtggagccaggtctaagcagcgccgtccccagggtctgccgaacaacacgtatagctggtttactgcgcttacccaacacggtaaagaagacttaaaattcccgcgtggccagggcgtcccgatcaacactaactcttccccggatgatcagattggttattaccgcagagcaactcgtcggattcgcggcggcgacggtaaaatgaaagatttgtctccgcgttggtacttttactatctcggcaccggtccggaagctggactgccctacggggcaaacaaggacgggatcatttgggtggctaccgaaggtgccctgaatactccaaaagatcatatcggcacccgtaaccctgctaataacgctgcgatcgttctgcaactgcctcagggtacaactctgccaaaaggcttctatgcagaagggtcgcgtggtggcagccaggcgagtagccgtagcagctcccgctctcgcaactcgtcccgtaactccactccgggctcttctcgcggcacgtccccggctcgtatggcaggtaacggtggtgacgctgctctggcgctgctactgctggacaggctgaaccagctggagtcgaagatgagtggtaaaggccaacagcagcagggccagaccgttaccaaaaagagcgcagctgaagcatctaaaaaaccgcgacagaaacgtaccgcgactaaagcgtacaatgtaacacaggccttcggtcgtcgaggtccggagcaaactcaaggaaactttggcgatcaggaattaatccgccaggggaccgactacaaacactggccgcaaattgcccagttcgccccatccgctagtgcattcttcggtatgagccgcatcggcatggaagtaacgccaagtggtacgtggctgacctacaccggtgctatcaagcttgatgacaaggacccgaactttaaagaccaggttattctgcttaacaaacatattgatgcctataaaactttcccgccgaccgaacccaaaaaggacaaaaagaaaaaagctgatgaaacccaggctctaccgcagcgtcagaaaaaacagcaaactgtgactctgctgccagctgcggacctggatgatttttccaagcagctgcaacagtctatgagctctgcggactctacgcaggcttaa

SEQ ID NO: 295 - DNA, 2016 bp, Artificial Sequence
  Description of Artificial Sequence: Synthetic polynucleotide
atgcaccatcatcaccatcatggtggttctggttcgccgatacttggttattggaagattaaaggactggttcagcccacacgcctcctgctagaatacttagaggaaaaatatgaagagcacctgtacgaacgtgatgagggggacaaatggcgaaacaagaaatttgaattgggcttagaatttccaaatttgccgtattatatcgatggcgacgtaaaactgacccaatcaatggccattattcgctacatcgcagataaacataacatgctgggtggctgccctaaagaacgggctgagatctccatgctggaaggtgcggtgctcgacattcgctacggcgtcagtagaattgcgtatagcaaggatttcgaaactttaaaagtggatttcctgagcaaacttccggagatgctgaaaatgtttgaggataggctttgtcataagacgtatctcaatggtgatcatgttacccacccggactttatgctgtacgacgcccttgatgtcgttctgtatatggatcccatgtgcctggacgccttcccgaaattagtgtgttttaaaaaacgtatcgaagcgattccacagatcgataaatacttgaagtcttctaaatatattgcttggcctctgcaaggctggcaggcaacgttcggtgggggagatcatccgccaaaatcagatctggtgccgcgtgggagccctggcatacaccgcgacggtggttctggtgagaacctgtactttcaaagctcagataatgggcctcaaaaccagcgcaacgctccacgtataaccttcggtggcccgtctgactccacaggcagcaaccagaatggtgagcgtagtggagccaggtctaagcagcgccgtccccagggtctgccgaacaacacggcgagctggtttactgcgcttacccaacacggtaaagaagacttaaaattcccgcgtggccagggcgtcccgacgaacactaactcttccccggatgatcagattggttattaccgcagagcaactcgtcggattcgcggcggcgacggtaaaatgaaagatttgtctccgcgttggtacttttactatctcggcaccggtccggaagctggactgccctacggggcaaacaaggacgggatcatttgggtggctaccgaaggtgccctgaatactccaaaagatcatatcggcacccgtaaccctgctaataacgctgcgatcgttctgcaactgcctcagggtacaactctgccaaaaggcttctatgcagaagggtcgcgtggtggcagccaggcgagtagccgtagcagctcccgctctcgcaactcgtcccgtaactccactccgggctcttctcgcggcacgtccccggctcgtatggcaggtaacggtggtgacgctgctctggcgctgctactgctggacaggctgaaccagctggagtcgaagatgagtggtaaaggccaacagcagcagggccagaccgttaccaaaaagagcgcagctgaagcatctaaaaaaccgcgacagaaacgtaccgcgactaaagcgtacaatgtaacacaggccttcggtcgtcgaggtccggagcaaactcaaggaaactttggcgatcaggaattaatccgccaggggaccgactacaaacactggccgcaaattgcccagttcgccccatccgctagtgcattcttcggtatgagccgcatcggcatggaagtaacgccaagtggtacgtggctgacctacaccggtgctatcaagcttgatgacaaggacccgaactttaaagaccaggttattctgcttaacaaacatattgatgcctataaaactttcccgccgaccgaacccaaaaaggacaaaaagaaaaaagctgatgaaacccaggctctaccgcagcgtcagaaaaaacagcaaactgtgactctgctgccagctgcggacctggatgatttttccaagcagctgcaacagtctatgagctctgcggactctacgcaggcttaa

SEQ ID NO: 296 - DNA, 2016 bp, Artificial Sequence
  Description of Artificial Sequence: Synthetic polynucleotide
atgcaccatcatcaccatcatggtggttctggttcgccgatacttggttattggaagattaaaggactggttcagcccacacgcctcctgctagaatacttagaggaaaaatatgaagagcacctgtacgaacgtgatgagggggacaaatggcgaaacaagaaatttgaattgggcttagaatttccaaatttgccgtattatatcgatggcgacgtaaaactgacccaatcaatggccattattcgctacatcgcagataaacataacatgctgggtggctgccctaaagaacgggctgagatctccatgctggaaggtgcggtgctcgacattcgctacggcgtcagtagaattgcgtatagcaaggatttcgaaactttaaaagtggatttcctgagcaaacttccggagatgctgaaaatgtttgaggataggctttgtcataagacgtatctcaatggtgatcatgttacccacccggactttatgctgtacgacgcccttgatgtcgttctgtatatggatcccatgtgcctggacgccttcccgaaattagtgtgttttaaaaaacgtatcgaagcgattccacagatcgataaatacttgaagtcttctaaatatattgcttggcctctgcaaggctggcaggcaacgttcggtgggggagatcatccgccaaaatcagatctggtgccgcgtgggagccctggcatacaccgcgacggtggttctggtgagaacctgtactttcaaagctcagataatgggcctcaaaaccagcgcaacgctccacgtataaccttcggtggcccgtctgactccacaggcagcaaccagaatggtgagcgtagtggagccaggtctaagcagcgccgtccccagggtctgccgaacaacacggcgagctggtttactgcgcttacccaacacggtaaagaagacttaaaattcccgcgtggccagggcgtcccgatcaacactaactcttccccggatgatcagattggttattaccgcagagcaactcgtcggattcgcggcggcgacggtaaaatgaaagatttgtctccgcgttggtacttttactatctcggcaccggtccggaagctggactgccctacgggcaaaacaaggacgggatcatttgggtggctaccgaaggtgccctgaatactccaaaagatcatatcggcacccgtaaccctgctaataacgctgcgatcgttctgcaactgcctcagggtacaactctgccaaaaggcttctatgcagaagggtcgcgtggtggcagccaggcgagtagccgtagcagctcccgctctcgcaactcgtcccgtaactccactccgggctcttctcgcggcacgtccccggctcgtatggcaggtaacggtggtgacgctgctctggcgctgctactgctggacaggctgaaccagctggagtcgaagatgagtggtaaaggccaacagcagcagggccagaccgttaccaaaaagagcgcagctgaagcatctaaaaaaccgcgacagaaacgtaccgcgactaaagcgtacaatgtaacacaggccttcggtcgtcgaggtccggagcaaactcaaggaaactttggcgatcaggaattaatccgccaggggaccgactacaaacactggccgcaaattgcccagttcgccccatccgctagtgcattcttcggtatgagccgcatcggcatggaagtaacgccaagtggtacgtggctgacctacaccggtgctatcaagcttgatgacaaggacccgaactttaaagaccaggttattctgcttaacaaacatattgatgcctataaaactttcccgccgaccgaacccaaaaaggacaaaaagaaaaaagctgatgaaacccaggctctaccgcagcgtcagaaaaaacagcaaactgtgactctgctgccagctgcggacctggatgatttttccaagcagctgcaacagtctatgagctctgcggactctacgcaggcttaa

SEQ ID NO: 297 - DNA, 2016 bp, Artificial Sequence
  Description of Artificial Sequence: Synthetic polynucleotide
atgcaccatcatcaccatcatggtggttctggttcgccgatacttggttattggaagattaaaggactggttcagcccacacgcctcctgctagaatacttagaggaaaaatatgaagagcacctgtacgaacgtgatgagggggacaaatggcgaaacaagaaatttgaattgggcttagaatttccaaatttgccgtattatatcgatggcgacgtaaaactgacccaatcaatggccattattcgctacatcgcagataaacataacatgctgggtggctgccctaaagaacgggctgagatctccatgctggaaggtgcggtgctcgacattcgctacggcgtcagtagaattgcgtatagcaaggatttcgaaactttaaaagtggatttcctgagcaaacttccggagatgctgaaaatgtttgaggataggctttgtcataagacgtatctcaatggtgatcatgttacccacccggactttatgctgtacgacgcccttgatgtcgttctgtatatggatcccatgtgcctggacgccttcccgaaattagtgtgttttaaaaaacgtatcgaagcgattccacagatcgataaatacttgaagtcttctaaatatattgcttggcctctgcaaggctggcaggcaacgttcggtgggggagatcatccgccaaaatcagatctggtgccgcgtgggagccctggcatacaccgcgacggtggttctggtgagaacctgtactttcaaagctcagataatgggcctcaaaaccagcgcaacgctccacgtataaccttcggtggcccgtctgactccacaggcagcaaccagaatggtgagcgtagtggagccaggtctaagcagcgccgtccccagggtctgccgaacaacacggcgagctggtttactgcgcttacccaacacggtaaagaagacttaaaattcccgccaggccagggcgtcccgatcaacccgaactctaaaccggatgatcagattggttattggcgcagacaaactcgtcggtaccgcggcggcgacggtcaaatgaaagatttgcctccgcgttggtacttttactatctcggcaccggtccggaagctggactgccctacggggcaaacaaggacgggatcatttgggtggctaccgaaggtgccctgaatactccaaaagatcatatcggcacccgtaaccctgctaataacgctgcgatcgttctgcaactgcctcagggtacaactctgccaaaaggcttctatgcagaagggtcgcgtggtggcagccaggcgagtagccgtagcagctcccgctctcgcaactcgtcccgtaactccactccgggctcttctcgcggcacgtccccggctcgtatggcaggtaacggtggtgacgctgctctggcgctgctactgctggacaggctgaaccagctggagtcgaagatgagtggtaaaggccaacagcagcagggccagaccgttaccaaaaagagcgcagctgaagcatctaaaaaaccgcgacagaaacgtaccgcgactaaagcgtacaatgtaacacaggccttcggtcgtcgaggtccggagcaaactcaaggaaactttggcgatcaggaattaatccgccaggggaccgactacaaacactggccgcaaattgcccagttcgccccatccgctagtgcattcttcggtatgagccgcatcggcatggaagtaacgccaagtggtacgtggctgacctacaccggtgctatcaagcttgatgacaaggacccgaactttaaagaccaggttattctgcttaacaaacatattgatgcctataaaactttcccgccgaccgaacccaaaaaggacaaaaagaaaaaagctgatgaaacccaggctctaccgcagcgtcagaaaaaacagcaaactgtgactctgctgccagctgcggacctggatgatttttccaagcagctgcaacagtctatgagctctgcggactctacgcaggcttaa

SEQ ID NO: 298 - DNA, 2016 bp, Artificial Sequence
  Description of Artificial Sequence: Synthetic polynucleotide
atgcaccatcatcaccatcatggtggttctggttcgccgatacttggttattggaagattaaaggactggttcagcccacacgcctcctgctagaatacttagaggaaaaatatgaagagcacctgtacgaacgtgatgagggggacaaatggcgaaacaagaaatttgaattgggcttagaatttccaaatttgccgtattatatcgatggcgacgtaaaactgacccaatcaatggccattattcgctacatcgcagataaacataacatgctgggtggctgccctaaagaacgggctgagatctccatgctggaaggtgcggtgctcgacattcgctacggcgtcagtagaattgcgtatagcaaggatttcgaaactttaaaagtggatttcctgagcaaacttccggagatgctgaaaatgtttgaggataggctttgtcataagacgtatctcaatggtgatcatgttacccacccggactttatgctgtacgacgcccttgatgtcgttctgtatatggatcccatgtgcctggacgccttcccgaaattagtgtgttttaaaaaacgtatcgaagcgattccacagatcgataaatacttgaagtcttctaaatatattgcttggcctctgcaaggctggcaggcaacgttcggtgggggagatcatccgccaaaatcagatctggtgccgcgtgggagccctggcatacaccgcgacggtggttctggtgagaacctgtactttcaaagctcagataatgggcctcaaaaccagcgcaacgctccacgtataaccttcggtggcccgtctgactccacaggcagcaaccagaatggtgagcgtagtggagccaggtctaagcagcgccgtccccagggtctgccgaacaacacggcgagctggtttactgcgcttacccaacacggtaaagaagacttaaaattcccgcgtggccagggcgtcccgatcaacactaactcttccccggatgatcagattggttattaccgcagagcaactcgtcggattcgcggcggcgacggtaaaatgaaagatttgtctccgcgttggtacttttactatctcggcaccggtccggaagctggactgccctacggggcaaacaaggacgggatcatttgggtggctaccgaaggtgccctgaatactccaaaagatcatatcggcacccgtaaccctgctaataacgctgcgatcgttctgcaactgcctcagggtacaactctgccaaaaggcttctatgcagaagggtcgcgtggtggcagccaggcgagtagccgtagcagctcccgctctcgcaactcgtcccgtaactccactccgggctcttctcgcggcacgtccccggctcgtatggcaggtaacggtggtgacgctgctctggcgctgctactgctggacaggctgaaccagctggagtcgaagatgagtggtaaaggccaacagcagcagggccagaccgttaccaaaaagagcgcagctgaagcatctaaaaaaccgcgacagaaacgtaccgcgactaaaggatacaatgtaacacaggccttcggtcgtcgaggtccggagcaaactcaaggaaactttggcgatcaggatttaatccgcgaagggaccgactacaaacactggccgcaaattgcccagttcgccccatccgctagtgcattcttcggtatgagccgcatcggcacggaagaaacgccaagtggtacgtggctgacctacaccggtgctatcaagcttgataagaaggacccgaactttaaagaccaggttattctgcttaacaaacatattgatgcctataaaactttcccgccgaccgaacccaaaaaggacaaaaagaaaaaagctgatgaaacccaggctctaccgcagcgtcagaaaaaacagcaaactgtgactctgctgccagctgcggacctggatgatttttccaagcagctgcaacagtctatgagctctgcggactctacgcaggcttaa

SEQ ID NO: 299 - DNA, 2016 bp, Artificial Sequence
  Description of Artificial Sequence: Synthetic polynucleotide
atgcaccatcatcaccatcatggtggttctggttcgccgatacttggttattggaagattaaaggactggttcagcccacacgcctcctgctagaatacttagaggaaaaatatgaagagcacctgtacgaacgtgatgagggggacaaatggcgaaacaagaaatttgaattgggcttagaatttccaaatttgccgtattatatcgatggcgacgtaaaactgacccaatcaatggccattattcgctacatcgcagataaacataacatgctgggtggctgccctaaagaacgggctgagatctccatgctggaaggtgcggtgctcgacattcgctacggcgtcagtagaattgcgtatagcaaggatttcgaaactttaaaagtggatttcctgagcaaacttccggagatgctgaaaatgtttgaggataggctttgtcataagacgtatctcaatggtgatcatgttacccacccggactttatgctgtacgacgcccttgatgtcgttctgtatatggatcccatgtgcctggacgccttcccgaaattagtgtgttttaaaaaacgtatcgaagcgattccacagatcgataaatacttgaagtcttctaaatatattgcttggcctctgcaaggctggcaggcaacgttcggtgggggagatcatccgccaaaatcagatctggtgccgcgtgggagccctggcatacaccgcgacggtggttctggtgagaacctgtactttcaaagctcagataatgggcctcaaaaccagcgcaacgctccacgtataaccttcggtggcccgtctgactccacaggcagcaaccagaatggtgagcgtagtggagccaggtctaagcagcgccgtccccagggtctgccgaacaacacggcgagctggtttactgcgcttacccaacacggtaaagaagacttaaaattcccgcgtggccagggcgtcccgatcaacactaactcttccccggatgatcagattggtgactaccgcagagcaactcgtcggattcgcggcggcgacggtaaaatgaaagatttgtctccgcgttggtacttttactatctcggcaccggtccggaagctggactgccctacggggcaaacaaggacgggatcatttgggtggctaccgaaggtgccctgaatactccaaaagatcatatcggcacccgtaaccctgctaataacgctgcgatcgttctgcaactgcctcagggtacaactctgccaaaaggcttctatgcagaagggtcgcgtggtggcagccaggcgagtagccgtagcagctcccgctctcgcaactcgtcccgtaactccactccgggctcttctcgcggcacgtccccggctcgtatggcaggtaacggtggtgacgctgctctggcgctgctactgctggacaggctgaaccagctggagtcgaagatgagtggtaaaggccaacagcagcagggccagaccgttaccaaaaagagcgcagctgaagcatctaaaaaaccgcgacagaaacgtaccgcgactaaagcgtacaatgtaacacaggccttcggtcgtcgaggtccggagcaaactcaaggaaactttggcgatcaggaattaatccgccaggggaccgactacaaacactggccgcaaattgcccagttcgccccatccgctagtgcattcttcggtatgagccgcatcggcatggaagtaacgccaagtggtacgtggctgacctacaccggtgctatcaagcttgatgacaaggacccgaactttaaagaccaggttattctgcttaacaaacatattgatgcctataaaactttcccgccgaccgaacccaaaaaggacaaaaagaaaaaagctgatgaaacccaggctctaccgcagcgtcagaaaaaacagcaaactgtgactctgctgccagctgcggacctggatgatttttccaagcagctgcaacagtctatgagctctgcggactctacgcaggcttaa

SEQ ID NO: 300 - DNA, 2016 bp, Artificial Sequence
  Description of Artificial Sequence: Synthetic polynucleotide
atgcaccatcatcaccatcatggtggttctggttcgccgatacttggttattggaagattaaaggactggttcagcccacacgcctcctgctagaatacttagaggaaaaatatgaagagcacctgtacgaacgtgatgagggggacaaatggcgaaacaagaaatttgaattgggcttagaatttccaaatttgccgtattatatcgatggcgacgtaaaactgacccaatcaatggccattattcgctacatcgcagataaacataacatgctgggtggctgccctaaagaacgggctgagatctccatgctggaaggtgcggtgctcgacattcgctacggcgtcagtagaattgcgtatagcaaggatttcgaaactttaaaagtggatttcctgagcaaacttccggagatgctgaaaatgtttgaggataggctttgtcataagacgtatctcaatggtgatcatgttacccacccggactttatgctgtacgacgcccttgatgtcgttctgtatatggatcccatgtgcctggacgccttcccgaaattagtgtgttttaaaaaacgtatcgaagcgattccacagatcgataaatacttgaagtcttctaaatatattgcttggcctctgcaaggctggcaggcaacgttcggtgggggagatcatccgccaaaatcagatctggtgccgcgtgggagccctggcatacaccgcgacggtggttctggtgagaacctgtactttcaaagctcagataatgggcctcaaaaccagcgcaacgctccacgtataaccttcggtggcccgtctgactccacaggcagcaaccagaatggtgagcgtagtggagccaggtctaagcagcgccgtccccagggtctgccgaacaacacggcgagctggtttactgcgcttacccaacacggtaaagaagacttaaaattcccgcgtggccagggcgtcccgatcaacactaactcttccccggatgatcagattggttattaccgcagagcaactcgtcggattcgcggcggcgacggtaaaatgaaagatttgtctccgcgttggtacttttactatctcggcaccggtccggaagctggactgccctacggggcaaacaaggacgggatcatttgggtggctaccgaaggtgccctgaatactccaaaagatcatatcggcacccgtaaccctgctaataacgctgcgatctatctgcaactgcctcagggtacaactctgccaaaaggcttctatgcagaagggtcgcgtggtggcagccaggcgagtagccgtagcagctcccgctctcgcaactcgtcccgtaactccactccgggctcttctcgcggcacgtccccggctcgtatggcaggtaacggtggtgacgctgctctggcgctgctactgctggacaggctgaaccagctggagtcgaagatgagtggtaaaggccaacagcagcagggccagaccgttaccaaaaagagcgcagctgaagcatctaaaaaaccgcgacagaaacgtaccgcgactaaagcgtacaatgtaacacaggccttcggtcgtcgaggtccggagcaaactcaaggaaactttggcgatcaggaattaatccgccaggggaccgactacaaacactggccgcaaattgcccagttcgccccatccgctagtgcattcttcggtatgagccgcatcggcatggaagtaacgccaagtggtacgtggctgacctacaccggtgctatcaagcttgatgacaaggacccgaactttaaagaccaggttattctgcttaacaaacatattgatgcctataaaactttcccgccgaccgaacccaaaaaggacaaaaagaaaaaagctgatgaaacccaggctctaccgcagcgtcagaaaaaacagcaaactgtgactctgctgccagctgcggacctggatgatttttccaagcagctgcaacagtctatgagctctgcggactctacgcaggcttaa

SEQ ID NO: 301 - DNA, 2016 bp, Artificial Sequence
  Description of Artificial Sequence: Synthetic polynucleotide
atgcaccatcatcaccatcatggtggttctggttcgccgatacttggttattggaagattaaaggactggttcagcccacacgcctcctgctagaatacttagaggaaaaatatgaagagcacctgtacgaacgtgatgagggggacaaatggcgaaacaagaaatttgaattgggcttagaatttccaaatttgccgtattatatcgatggcgacgtaaaactgacccaatcaatggccattattcgctacatcgcagataaacataacatgctgggtggctgccctaaagaacgggctgagatctccatgctggaaggtgcggtgctcgacattcgctacggcgtcagtagaattgcgtatagcaaggatttcgaaactttaaaagtggatttcctgagcaaacttccggagatgctgaaaatgtttgaggataggctttgtcataagacgtatctcaatggtgatcatgttacccacccggactttatgctgtacgacgcccttgatgtcgttctgtatatggatcccatgtgcctggacgccttcccgaaattagtgtgttttaaaaaacgtatcgaagcgattccacagatcgataaatacttgaagtcttctaaatatattgcttggcctctgcaaggctggcaggcaacgttcggtgggggagatcatccgccaaaatcagatctggtgccgcgtgggagccctggcatacaccgcgacggtggttctggtgagaacctgtactttcaaagctcagataatgggcctcaaaaccagcgcaacgctccacgtataaccttcggtggcccgtctgactccacaggcagcaaccagaatggtgagcgtagtggagccaggtctaagcagcgccgtccccagggtctgccgaacaacacggcgagctggtttactgcgcttacccaacacggtaaagaagacttaaaattcccgcgtggccagggcgtcccgatcaacactaactcttccccggatgatcagattggtcattaccgcagagcaactcgtcggattcgcggcggcgacggtaaaatgaaagatttgtctccgcgttggtacttttactatctcggcaccggtccggaagctggactgccctacggggcaaacaaggacgggatcatttgggtggctaccgaaggtgccctgaatactccaaaagatcatatcggcacccgtaaccctgctaataacgctgcgatcgttctgcaactgcctcagggtacaactctgccaaaaggcttctatgcagaagggtcgcgtggtggcagccaggcgagtagccgtagcagctcccgctctcgcaactcgtcccgtaactccactccgggctcttctcgcggcacgtccccggctcgtatggcaggtaacggtggtgacgctgctctggcgctgctactgctggacaggctgaaccagctggagtcgaagatgagtggtaaaggccaacagcagcagggccagaccgttaccaaaaagagcgcagctgaagcatctaaaaaaccgcgacagaaacgtaccgcgactaaagcgtacaatgtaacacaggccttcggtcgtcgaggtccggagcaaactcaaggaaactttggcgatcaggaattaatccgccaggggaccgactacaaacactggccgcaaattgcccagttcgccccatccgctagtgcattcttcggtatgagccgcatcggcatggaagtaacgccaagtggtacgtggctgacctacaccggtgctatcaagcttgatgacaaggacccgaactttaaagaccaggttattctgcttaacaaacatattgatgcctataaaactttcccgccgaccgaacccaaaaaggacaaaaagaaaaaagctgatgaaacccaggctctaccgcagcgtcagaaaaaacagcaaactgtgactctgctgccagctgcggacctggatgatttttccaagcagctgcaacagtctatgagctctgcggactctacgcaggcttaa

SEQ ID NO: 302 - DNA, 2016 bp, Artificial Sequence
  Description of Artificial Sequence: Synthetic polynucleotide
atgcaccatcatcaccatcatggtggttctggttcgccgatacttggttattggaagattaaaggactggttcagcccacacgcctcctgctagaatacttagaggaaaaatatgaagagcacctgtacgaacgtgatgagggggacaaatggcgaaacaagaaatttgaattgggcttagaatttccaaatttgccgtattatatcgatggcgacgtaaaactgacccaatcaatggccattattcgctacatcgcagataaacataacatgctgggtggctgccctaaagaacgggctgagatctccatgctggaaggtgcggtgctcgacattcgctacggcgtcagtagaattgcgtatagcaaggatttcgaaactttaaaagtggatttcctgagcaaacttccggagatgctgaaaatgtttgaggataggctttgtcataagacgtatctcaatggtgatcatgttacccacccggactttatgctgtacgacgcccttgatgtcgttctgtatatggatcccatgtgcctggacgccttcccgaaattagtgtgttttaaaaaacgtatcgaagcgattccacagatcgataaatacttgaagtcttctaaatatattgcttggcctctgcaaggctggcaggcaacgttcggtgggggagatcatccgccaaaatcagatctggtgccgcgtgggagccctggcatacaccgcgacggtggttctggtgagaacctgtactttcaaagctcagataatgggcctcaaaaccagcgcaacgctccacgtataaccttcggtggcccgtctgactccacaggcagcaaccagaatggtgagcgtagtggagccaggtctaagcagcgccgtccccagggtctgccgaacaacacggcgagctggtttactcctcttgtccaatttggtaaagaagacttaaaattcccgccgggccagggcgtcccgatcaacactaactcttccccggatgatcagattggttattaccgcagagcaactcgtcggattcgcggcggcgacggtaaaatgaaagatttgccaccgaagtggtacttttactatctcggcaccggtccgcatgctgatctgccctacgggcaaaaacaagacggggtagtgtgggtggctcgacctggtgccctgaatactccaaaagatcatatcggcacccgtaaccctgctaataacgctgcgatcccgctgcaactgcctcccggtacaaagctgccaaaaggcttctatgcagaagggtcgcgtggtggcagccaggcgagtagccgtagcagctcccgctctcgcaactcgtcccgtaactccactccgggctcttctcgcggcacgtccccggctcgtatggcaggtaacggtggtgacgctgctctggcgctgctactgctggacaggctgaaccagctggagtcgaagatgagtggtaaaggccaacagcagcagggccagaccgttaccaaaaagagcgcagctgaagcatctaaaaaaccgcgacagaaacgtaccgcgactaaagcgtacaatgtaacacaggccttcggtcgtcgaggtccggagcaaactcaaggaaactttggcgatcaggaattaatccgccaggggaccgactacaaacactggccgcaaattgcccagttcgccccatccgctagtgcattcttcggtatgagccgcatcggcatggaagtaacgccaagtggtacgtggctgacctacaccggtgctatcaagcttgatgacaaggacccgaactttaaagaccaggttattctgcttaacaaacatattgatgcctataaaactttcccgccgaccgaacccaaaaaggacaaaaagaaaaaagctgatgaaacccaggctctaccgcagcgtcagaaaaaacagcaaactgtgactctgctgccagctgcggacctggatgatttttccaagcagctgcaacagtctatgagctctgcggactctacgcaggcttaa

SEQ ID NO: 303 - DNA, 2016 bp, Artificial Sequence
  Description of Artificial Sequence: Synthetic polynucleotide
atgcaccatcatcaccatcatggtggttctggttcgccgatacttggttattggaagattaaaggactggttcagcccacacgcctcctgctagaatacttagaggaaaaatatgaagagcacctgtacgaacgtgatgagggggacaaatggcgaaacaagaaatttgaattgggcttagaatttccaaatttgccgtattatatcgatggcgacgtaaaactgacccaatcaatggccattattcgctacatcgcagataaacataacatgctgggtggctgccctaaagaacgggctgagatctccatgctggaaggtgcggtgctcgacattcgctacggcgtcagtagaattgcgtatagcaaggatttcgaaactttaaaagtggatttcctgagcaaacttccggagatgctgaaaatgtttgaggataggctttgtcataagacgtatctcaatggtgatcatgttacccacccggactttatgctgtacgacgcccttgatgtcgttctgtatatggatcccatgtgcctggacgccttcccgaaattagtgtgttttaaaaaacgtatcgaagcgattccacagatcgataaatacttgaagtcttctaaatatattgcttggcctctgcaaggctggcaggcaacgttcggtgggggagatcatccgccaaaatcagatctggtgccgcgtgggagccctggcatacaccgcgacggtggttctggtgagaacctgtactttcaaagctcagataatgggcctcaaaaccagcgcaacgctccacgtataaccttcggtggcccgtctgactccacaggcagcaaccagaatggtgagcgtagtggagccaggtctaagcagcgccgtccccagggtctgccgaacaacacggcgagctggtttactccgcttacccaaaatggtaaagaagacttaaaattcccgccaggccagggcgtcccgatcaacactaactcttccccggatgatcagattggttattaccgcagagcaactcgtcggattcgcggcggcgacggtaaaatgaaagatttgcctccgaaatggtacttttactatctcggcaccggtccgcacgctgatctgccctacgggcaaaagcatgacggggttttttgggtggctcgccctggtgccctgaatactccaaaagatcatatcggcacccgtaaccctgctaataacgctgcgatcccgaatcaactgcctccgggtacaaagctgccaaaaggcttctatgcagaagggtcgcgtggtggcagccaggcgagtagccgtagcagctcccgctctcgcaactcgtcccgtaactccactccgggctcttctcgcggcacgtccccggctcgtatggcaggtaacggtggtgacgctgctctggcgctgctactgctggacaggctgaaccagctggagtcgaagatgagtggtaaaggccaacagcagcagggccagaccgttaccaaaaagagcgcagctgaagcatctaaaaaaccgcgacagaaacgtaccgcgactaaagcgtacaatgtaacacaggccttcggtcgtcgaggtccggagcaaactcaaggaaactttggcgatcaggaattaatccgccaggggaccgactacaaacactggccgcaaattgcccagttcgccccatccgctagtgcattcttcggtatgagccgcatcggcatggaagtaacgccaagtggtacgtggctgacctacaccggtgctatcaagcttgatgacaaggacccgaactttaaagaccaggttattctgcttaacaaacatattgatgcctataaaactttcccgccgaccgaacccaaaaaggacaaaaagaaaaaagctgatgaaacccaggctctaccgcagcgtcagaaaaaacagcaaactgtgactctgctgccagctgcggacctggatgatttttccaagcagctgcaacagtctatgagctctgcggactctacgcaggcttaa

SEQ ID NO: 304 - DNA, 2016 bp, Artificial Sequence
  Description of Artificial Sequence: Synthetic polynucleotide
atgcaccatcatcaccatcatggtggttctggttcgccgatacttggttattggaagattaaaggactggttcagcccacacgcctcctgctagaatacttagaggaaaaatatgaagagcacctgtacgaacgtgatgagggggacaaatggcgaaacaagaaatttgaattgggcttagaatttccaaatttgccgtattatatcgatggcgacgtaaaactgacccaatcaatggccattattcgctacatcgcagataaacataacatgctgggtggctgccctaaagaacgggctgagatctccatgctggaaggtgcggtgctcgacattcgctacggcgtcagtagaattgcgtatagcaaggatttcgaaactttaaaagtggatttcctgagcaaacttccggagatgctgaaaatgtttgaggataggctttgtcataagacgtatctcaatggtgatcatgttacccacccggactttatgctgtacgacgcccttgatgtcgttctgtatatggatcccatgtgcctggacgccttcccgaaattagtgtgttttaaaaaacgtatcgaagcgattccacagatcgataaatacttgaagtcttctaaatatattgcttggcctctgcaaggctggcaggcaacgttcggtgggggagatcatccgccaaaatcagatctggtgccgcgtgggagccctggcatacaccgcgacggtggttctggtgagaacctgtactttcaaagctcagataatgggcctcaaaaccagcgcaacgctccacgtataaccttcggtggcccgtctgactccacaggcagcaaccagaatggtgagcgtagtggagccaggtctaagcagcgccgtccccagggtctgccgaacaacacggcgagctggtttactgcgcttacccaacacggtaaagaagacttaaaattcccgcgtggccagggcgtcccgatcaacactaactcttccccggatgatcagattggttattaccgcagagcaactcgtcggattcgcggcggcgacggtaaaatgaaagatttgtctccgcgttggtacttttactatctcggcaccggtccggaagctggactgccctacggggcaaacaaggacgggatcatttgggtggctaccgaaggtgccctgaatactccaaaagatcatatcggcacccgtaaccctgctaataacgctgcgcctgttctgcaactgcctcagggtacaactctgccaaaaggcttctatgcagaagggtcgcgtggtggcagccaggcgagtagccgtagcagctcccgctctcgcaactcgtcccgtaactccactccgggctcttctcgcggcacgtccccggctcgtatggcaggtaacggtggtgacgctgctctggcgctgctactgctggacaggctgaaccagctggagtcgaagatgagtggtaaaggccaacagcagcagggccagaccgttaccaaaaagagcgcagctgaagcatctaaaaaaccgcgacagaaacgtaccgcgactaaagcgtacaatgtaacacaggccttcggtcgtcgaggtccggagcaaactcaaggaaactttggcgatcaggaattaatccgccaggggaccgactacaaacactggccgcaaattgcccagttcgccccatccgctagtgcattcttcggtatgagccgcatcggcatggaagtaacgccaagtggtacgtggctgacctacaccggtgctatcaagcttgatgacaaggacccgaactttaaagaccaggttattctgcttaacaaacatattgatgcctataaaactttcccgccgaccgaacccaaaaaggacaaaaagaaaaaagctgatgaaacccaggctctaccgcagcgtcagaaaaaacagcaaactgtgactctgctgccagctgcggacctggatgatttttccaagcagctgcaacagtctatgagctctgcggactctacgcaggcttaa

SEQ ID NO: 305 - DNA, 2016 bp, Artificial Sequence
  Description of Artificial Sequence: Synthetic polynucleotide
atgcaccatcatcaccatcatggtggttctggttcgccgatacttggttattggaagattaaaggactggttcagcccacacgcctcctgctagaatacttagaggaaaaatatgaagagcacctgtacgaacgtgatgagggggacaaatggcgaaacaagaaatttgaattgggcttagaatttccaaatttgccgtattatatcgatggcgacgtaaaactgacccaatcaatggccattattcgctacatcgcagataaacataacatgctgggtggctgccctaaagaacgggctgagatctccatgctggaaggtgcggtgctcgacattcgctacggcgtcagtagaattgcgtatagcaaggatttcgaaactttaaaagtggatttcctgagcaaacttccggagatgctgaaaatgtttgaggataggctttgtcataagacgtatctcaatggtgatcatgttacccacccggactttatgctgtacgacgcccttgatgtcgttctgtatatggatcccatgtgcctggacgccttcccgaaattagtgtgttttaaaaaacgtatcgaagcgattccacagatcgataaatacttgaagtcttctaaatatattgcttggcctctgcaaggctggcaggcaacgttcggtgggggagatcatccgccaaaatcagatctggtgccgcgtgggagccctggcatacaccgcgacggtggttctggtgagaacctgtactttcaaagctcagataatgggcctcaaaaccagcgcaacgctccacgtataaccttcggtggcccgtctgactccacaggcagcaaccagaatggtgagcgtagtggagccaggtctaagcagcgccgtccccagggtctgccgaacaacacggcgagctggtttactgcgcttacccaacacggtaaagaagacttaaaattcccgcgtggccagggcgtcccgatcaacactaactcttccccggatgatcagattggttattaccgcagagcaactcgtcggattcgcggcggcgacggtaaaatgaaagatttgtctccgcgttggtacttttactatctcggcaccggtccggaagctggactgccctacggggcaaacaaggacgggatcatttgggtggctaccgaaggtgccctgaatactccaaaagatcatatcggcacccgtaaccctgctaataacgctgcgatctggctgcaactgcctcagggtacaactctgccaaaaggcttctatgcagaagggtcgcgtggtggcagccaggcgagtagccgtagcagctcccgctctcgcaactcgtcccgtaactccactccgggctcttctcgcggcacgtccccggctcgtatggcaggtaacggtggtgacgctgctctggcgctgctactgctggacaggctgaaccagctggagtcgaagatgagtggtaaaggccaacagcagcagggccagaccgttaccaaaaagagcgcagctgaagcatctaaaaaaccgcgacagaaacgtaccgcgactaaagcgtacaatgtaacacaggccttcggtcgtcgaggtccggagcaaactcaaggaaactttggcgatcaggaattaatccgccaggggaccgactacaaacactggccgcaaattgcccagttcgccccatccgctagtgcattcttcggtatgagccgcatcggcatggaagtaacgccaagtggtacgtggctgacctacaccggtgctatcaagcttgatgacaaggacccgaactttaaagaccaggttattctgcttaacaaacatattgatgcctataaaactttcccgccgaccgaacccaaaaaggacaaaaagaaaaaagctgatgaaacccaggctctaccgcagcgtcagaaaaaacagcaaactgtgactctgctgccagctgcggacctggatgatttttccaagcagctgcaacagtctatgagctctgcggactctacgcaggcttaa

SEQ ID NO: 306 - DNA, 2016 bp, Artificial Sequence
  Description of Artificial Sequence: Synthetic polynucleotide
atgcaccatcatcaccatcatggtggttctggttcgccgatacttggttattggaagattaaaggactggttcagcccacacgcctcctgctagaatacttagaggaaaaatatgaagagcacctgtacgaacgtgatgagggggacaaatggcgaaacaagaaatttgaattgggcttagaatttccaaatttgccgtattatatcgatggcgacgtaaaactgacccaatcaatggccattattcgctacatcgcagataaacataacatgctgggtggctgccctaaagaacgggctgagatctccatgctggaaggtgcggtgctcgacattcgctacggcgtcagtagaattgcgtatagcaaggatttcgaaactttaaaagtggatttcctgagcaaacttccggagatgctgaaaatgtttgaggataggctttgtcataagacgtatctcaatggtgatcatgttacccacccggactttatgctgtacgacgcccttgatgtcgttctgtatatggatcccatgtgcctggacgccttcccgaaattagtgtgttttaaaaaacgtatcgaagcgattccacagatcgataaatacttgaagtcttctaaatatattgcttggcctctgcaaggctggcaggcaacgttcggtgggggagatcatccgccaaaatcagatctggtgccgcgtgggagccctggcatacaccgcgacggtggttctggtgagaacctgtactttcaaagctcagataatgggcctcaaaaccagcgcaacgctccacgtataaccttcggtggcccgtctgactccacaggcagcaaccagaatggtgagcgtagtggagccaggtctaagcagcgccgtccccagggtctgccgaacaacacggcgagctggtttactgcgcttacccaacacggtaaagaagacttaaaattcccgcgtggccagggcgtcccgatcaacactaactcttccccggatgatcagattggttattaccgcagagcaactcgtcggattcgcggcggcgacggtaaaatgaaagatttgtctccgcgttggtacttttactatctcggcaccggtccggaagctggactgccctacggggcaaacaaggacgggatcatttgggtggctaccgaaggtgccctgaatactccaaaagatcatatcggcacccgtaaccctgctaataacgctgcgatcgttctgcaactgcctcagggtacaactctgccaaaaggcttctatgcagaagggtcgcgtggtggcagccaggcgagtagccgtagcagctcccgctctcgcaactcgtcccgtaactccactccgggctcttctcgcggcacgtccccggctcgtatggcaggtaacggtggtgacgctgctctggcgctgctactgctggacaggctgaaccagctggagtcgaagatgagtggtaaaggccaacagcagcagggccagaccgttaccaaaaagagcgcagctgaagcatctaaaaaaccgcgacagaaacgtaccgcgactaaagggtacaatgtaacacaggccttcggtcgtcgaggtccggagcaaactcaaggaaactttggcgatcaggatttaatcaaactcgggaccgactacaaacactggccgcaaattgcccagttcgccccatccgctagtgcattcttcggtatgagccgcatcggcacggaagaaacgccaagtggtacgtggctgacctacaccggtgctatcaagcttgataaaaaggacccgaactttaaagaccaggttattctgcttaacaaacatattgatgcctataaaactttcccgccgaccgaacccaaaaaggacaaaaagaaaaaagctgatgaaacccaggctctaccgcagcgtcagaaaaaacagcaaactgtgactctgctgccagctgcggacctggatgatttttccaagcagctgcaacagtctatgagctctgcggactctacgcaggcttaa

SEQ ID NO: 307 - DNA, 2016 bp, Artificial Sequence
  Description of Artificial Sequence: Synthetic polynucleotide
atgcaccatcatcaccatcatggtggttctggttcgccgatacttggttattggaagattaaaggactggttcagcccacacgcctcctgctagaatacttagaggaaaaatatgaagagcacctgtacgaacgtgatgagggggacaaatggcgaaacaagaaatttgaattgggcttagaatttccaaatttgccgtattatatcgatggcgacgtaaaactgacccaatcaatggccattattcgctacatcgcagataaacataacatgctgggtggctgccctaaagaacgggctgagatctccatgctggaaggtgcggtgctcgacattcgctacggcgtcagtagaattgcgtatagcaaggatttcgaaactttaaaagtggatttcctgagcaaacttccggagatgctgaaaatgtttgaggataggctttgtcataagacgtatctcaatggtgatcatgttacccacccggactttatgctgtacgacgcccttgatgtcgttctgtatatggatcccatgtgcctggacgccttcccgaaattagtgtgttttaaaaaacgtatcgaagcgattccacagatcgataaatacttgaagtcttctaaatatattgcttggcctctgcaaggctggcaggcaacgttcggtgggggagatcatccgccaaaatcagatctggtgccgcgtgggagccctggcatacaccgcgacggtggttctggtgagaacctgtactttcaaagctcagataatgggcctcaaaaccagcgcaacgctccacgtataaccttcggtggcccgtctgactccacaggcagcaaccagaatggtgagcgtagtggagccaggtctaagcagcgccgtccccagggtctgccgaacaacacggcgagctggtttactgcgcttacccaacacggtaaagaagacttaaaattcccgcgtggccagggcgtcccgatcaacactaactcttccccggatgatcagattggttattaccgcagagcaactcgtcggattcgcggcggcgacggtaaaatgaaagatttgtctccgcgttggtacttttactatctcggcaccggtccggaagctggactgccctacggggcaaacaaggacgggatcatttgggtggctaccgaaggtgccctgaatactccaaaagatcatatcggcacccgtaaccctgctaataacgctgcgatcgttctgcaactgcctcagggtacaactctgccaaaaggcttctatgcagaagggtcgcgtggtggcagccaggcgagtagccgtagcagctcccgctctcgcaactcgtcccgtaactccactccgggctcttctcgcggcacgtccccggctcgtatggcaggtaacggtggtgacgctgctctggcgctgctactgctggacaggctgaaccagctggagtcgaagatgagtggtaaaggccaacagcagcagggccagaccgttaccaaaaagagcgcagctgaagcatctaaaaaaccgcgacagaaacgtaccgcgactaaaggctacaatgtaacacaggccttcggtcgtcgaggtccggagcaaactcaaggaaactttggcgatcaggatttaaataagctcgggaccgactacaaacactggccgcaaattgcccagttcgccccatccgctagtgcattcttcggtatgagccgcatcggcacgcgcgaaacgccaagtggtacgtggctgacctacaccggtgctatcaagcttgataaaaaggacccgaactttaaagaccaggttattctgcttaacaaacatattgatgcctataaaactttcccgccgaccgaacccaaaaaggacaaaaagaaaaaagctgatgaaacccaggctctaccgcagcgtcagaaaaaacagcaaactgtgactctgctgccagctgcggacctggatgatttttccaagcagctgcaacagtctatgagctctgcggactctacgcaggcttaa

SEQ ID NO: 308 - DNA, 2016 bp, Artificial Sequence
  Description of Artificial Sequence: Synthetic polynucleotide
atgcaccatcatcaccatcatggtggttctggttcgccgatacttggttattggaagattaaaggactggttcagcccacacgcctcctgctagaatacttagaggaaaaatatgaagagcacctgtacgaacgtgatgagggggacaaatggcgaaacaagaaatttgaattgggcttagaatttccaaatttgccgtattatatcgatggcgacgtaaaactgacccaatcaatggccattattcgctacatcgcagataaacataacatgctgggtggctgccctaaagaacgggctgagatctccatgctggaaggtgcggtgctcgacattcgctacggcgtcagtagaattgcgtatagcaaggatttcgaaactttaaaagtggatttcctgagcaaacttccggagatgctgaaaatgtttgaggataggctttgtcataagacgtatctcaatggtgatcatgttacccacccggactttatgctgtacgacgcccttgatgtcgttctgtatatggatcccatgtgcctggacgccttcccgaaattagtgtgttttaaaaaacgtatcgaagcgattccacagatcgataaatacttgaagtcttctaaatatattgcttggcctctgcaaggctggcaggcaacgttcggtgggggagatcatccgccaaaatcagatctggtgccgcgtgggagccctggcatacaccgcgacggtggttctggtgagaacctgtactttcaaagctcagataatgggcctcaaaaccagcgcaacgctccacgtataaccttcggtggcccgtctgactccacaggcagcaaccagaatggtgagcgtagtggagccaggtctaagcagcgccgtccccagggtctgccgaacaacacggcgagctggtttactgcgcttacccaacacggtaaagaagacttaaaattcccgaaaggccagggcgtcccgatcaacactaactctaagccggatgatcagattggttattaccgcagacaaactcgtcggtatcgcggcggcgacggtcaaatgaaagatttgaatccgcgttggtacttttactatctcggcaccggtccggaagctggactgccctacggggcaaacaaggacgggatcatttgggtggctaccgaaggtgccctgaatactccaaaagatcatatcggcacccgtaaccctgctaataacgctgcgatcgttctgcaactgcctcagggtacaactctgccaaaaggcttctatgcagaagggtcgcgtggtggcagccaggcgagtagccgtagcagctcccgctctcgcaactcgtcccgtaactccactccgggctcttctcgcggcacgtccccggctcgtatggcaggtaacggtggtgacgctgctctggcgctgctactgctggacaggctgaaccagctggagtcgaagatgagtggtaaaggccaacagcagcagggccagaccgttaccaaaaagagcgcagctgaagcatctaaaaaaccgcgacagaaacgtaccgcgactaaagcgtacaatgtaacacaggccttcggtcgtcgaggtccggagcaaactcaaggaaactttggcgatcaggaattaatccgccaggggaccgactacaaacactggccgcaaattgcccagttcgccccatccgctagtgcattcttcggtatgagccgcatcggcatggaagtaacgccaagtggtacgtggctgacctacaccggtgctatcaagcttgatgacaaggacccgaactttaaagaccaggttattctgcttaacaaacatattgatgcctataaaactttcccgccgaccgaacccaaaaaggacaaaaagaaaaaagctgatgaaacccaggctctaccgcagcgtcagaaaaaacagcaaactgtgactctgctgccagctgcggacctggatgatttttccaagcagctgcaacagtctatgagctctgcggactctacgcaggcttaa

SEQ ID NO: 309 - DNA, 2016 bp, Artificial Sequence
  Description of Artificial Sequence: Synthetic polynucleotide
atgcaccatcatcaccatcatggtggttctggttcgccgatacttggttattggaagattaaaggactggttcagcccacacgcctcctgctagaatacttagaggaaaaatatgaagagcacctgtacgaacgtgatgagggggacaaatggcgaaacaagaaatttgaattgggcttagaatttccaaatttgccgtattatatcgatggcgacgtaaaactgacccaatcaatggccattattcgctacatcgcagataaacataacatgctgggtggctgccctaaagaacgggctgagatctccatgctggaaggtgcggtgctcgacattcgctacggcgtcagtagaattgcgtatagcaaggatttcgaaactttaaaagtggatttcctgagcaaacttccggagatgctgaaaatgtttgaggataggctttgtcataagacgtatctcaatggtgatcatgttacccacccggactttatgctgtacgacgcccttgatgtcgttctgtatatggatcccatgtgcctggacgccttcccgaaattagtgtgttttaaaaaacgtatcgaagcgattccacagatcgataaatacttgaagtcttctaaatatattgcttggcctctgcaaggctggcaggcaacgttcggtgggggagatcatccgccaaaatcagatctggtgccgcgtgggagccctggcatacaccgcgacggtggttctggtgagaacctgtactttcaaagctcagataatgggcctcaaaaccagcgcaacgctccacgtataaccttcggtggcccgtctgactccacaggcagcaaccagaatggtgagcgtagtggagccaggtctaagcagcgccgtccccagggtctgccgaacaacacggcgagctggtttactgcgcttacccaacacggtaaagaagacttaaaattcccgcgtggccagggcgtcccgatcaacactaactcttccccggatgatcagattggttattaccgcagagcaactcgtcggattcgcggcggcgacggtaaaatgaaagatttgtctccgcgttggcatttttactatctcggcaccggtccggaagctggactgccctacggggcaaacaaggacgggatcatttgggtggctaccgaaggtgccctgaatactccaaaagatcatatcggcacccgtaaccctgctaataacgctgcgatcgttctgcaactgcctcagggtacaactctgccaaaaggcttctatgcagaagggtcgcgtggtggcagccaggcgagtagccgtagcagctcccgctctcgcaactcgtcccgtaactccactccgggctcttctcgcggcacgtccccggctcgtatggcaggtaacggtggtgacgctgctctggcgctgctactgctggacaggctgaaccagctggagtcgaagatgagtggtaaaggccaacagcagcagggccagaccgttaccaaaaagagcgcagctgaagcatctaaaaaaccgcgacagaaacgtaccgcgactaaagcgtacaatgtaacacaggccttcggtcgtcgaggtccggagcaaactcaaggaaactttggcgatcaggaattaatccgccaggggaccgactacaaacactggccgcaaattgcccagttcgccccatccgctagtgcattcttcggtatgagccgcatcggcatggaagtaacgccaagtggtacgtggctgacctacaccggtgctatcaagcttgatgacaaggacccgaactttaaagaccaggttattctgcttaacaaacatattgatgcctataaaactttcccgccgaccgaacccaaaaaggacaaaaagaaaaaagctgatgaaacccaggctctaccgcagcgtcagaaaaaacagcaaactgtgactctgctgccagctgcggacctggatgatttttccaagcagctgcaacagtctatgagctctgcggactctacgcaggcttaa

SEQ ID NO: 310 - DNA, 2016 bp, Artificial Sequence
  Description of Artificial Sequence: Synthetic polynucleotide
atgcaccatcatcaccatcatggtggttctggttcgccgatacttggttattggaagattaaaggactggttcagcccacacgcctcctgctagaatacttagaggaaaaatatgaagagcacctgtacgaacgtgatgagggggacaaatggcgaaacaagaaatttgaattgggcttagaatttccaaatttgccgtattatatcgatggcgacgtaaaactgacccaatcaatggccattattcgctacatcgcagataaacataacatgctgggtggctgccctaaagaacgggctgagatctccatgctggaaggtgcggtgctcgacattcgctacggcgtcagtagaattgcgtatagcaaggatttcgaaactttaaaagtggatttcctgagcaaacttccggagatgctgaaaatgtttgaggataggctttgtcataagacgtatctcaatggtgatcatgttacccacccggactttatgctgtacgacgcccttgatgtcgttctgtatatggatcccatgtgcctggacgccttcccgaaattagtgtgttttaaaaaacgtatcgaagcgattccacagatcgataaatacttgaagtcttctaaatatattgcttggcctctgcaaggctggcaggcaacgttcggtgggggagatcatccgccaaaatcagatctggtgccgcgtgggagccctggcatacaccgcgacggtggttctggtgagaacctgtactttcaaagctcagataatgggcctcaaaaccagcgcaacgctccacgtataaccttcggtggcccgtctgactccacaggcagcaaccagaatggtgagcgtagtggagccaggtctaagcagcgccgtccccagggtctgccgaacaacacggcgagctggtttactgcgcttacccaacacggtaaagaagacttaaaattcccgcgtggccagggcgtcccgatcaacactaactcttccccggatgatcagattggttattaccgcagagcaactcgtcggattcgcggcggcgacggtaaaatgaaagatttgtctccgcgttggtacttttactatctcggcaccggtccggaagctggactgccctacggggcaaacaaggacgggatcatttgggtggctaccgaaggtgccctgaatactccaaaagatcatatcggcacccgtaaccctgctaataacgctgcgatcgttctgcaactgcctcagggtacaactctgccaaaaggcttctatgcagaagggtcgcgtggtggcagccaggcgagtagccgtagcagctcccgctctcgcaactcgtcccgtaactccactccgggctcttctcgcggcacgtccccggctcgtatggcaggtaacggtggtgacgctgctctggcgctgctactgctggacaggctgaaccagctggagtcgaagatgagtggtaaaggccaacagcagcagggccagaccgttaccaaaaagagcgcagctgaagcatctaaaaaaccgcgacagaaacgtaccgcgactaaagcgtacaatgtaacacaggccttcggtcgtcgaggtccggagcaaactcaaggaaactttggcgatcaggaattaatccgcttggggaccgactacaaacactggccgcaaattgcccagttcgccccatccgctagtgcattcttcggtatgagccgcatcggcatggaagtaacgccaagtggtacgtggctgacctacaccggtgctatcaagcttgatgacaaggacccgaactttaaagaccaggttattctgcttaacaaacatattgatgcctataaaactttcccgccgaccgaacccaaaaaggacaaaaagaaaaaagctgatgaaacccaggctctaccgcagcgtcagaaaaaacagcaaactgtgactctgctgccagctgcggacctggatgatttttccaagcagctgcaacagtctatgagctctgcggactctacgcaggcttaa

SEQ ID NO: 311 - DNA, 2016 bp, Artificial Sequence
  Description of Artificial Sequence: Synthetic polynucleotide
atgcaccatcatcaccatcatggtggttctggttcgccgatacttggttattggaagattaaaggactggttcagcccacacgcctcctgctagaatacttagaggaaaaatatgaagagcacctgtacgaacgtgatgagggggacaaatggcgaaacaagaaatttgaattgggcttagaatttccaaatttgccgtattatatcgatggcgacgtaaaactgacccaatcaatggccattattcgctacatcgcagataaacataacatgctgggtggctgccctaaagaacgggctgagatctccatgctggaaggtgcggtgctcgacattcgctacggcgtcagtagaattgcgtatagcaaggatttcgaaactttaaaagtggatttcctgagcaaacttccggagatgctgaaaatgtttgaggataggctttgtcataagacgtatctcaatggtgatcatgttacccacccggactttatgctgtacgacgcccttgatgtcgttctgtatatggatcccatgtgcctggacgccttcccgaaattagtgtgttttaaaaaacgtatcgaagcgattccacagatcgataaatacttgaagtcttctaaatatattgcttggcctctgcaaggctggcaggcaacgttcggtgggggagatcatccgccaaaatcagatctggtgccgcgtgggagccctggcatacaccgcgacggtggttctggtgagaacctgtactttcaaagctcagataatgggcctcaaaaccagcgcaacgctccacgtataaccttcggtggcccgtctgactccacaggcagcaaccagaatggtgagcgtagtggagccaggtctaagcagcgccgtccccagggtctgccgaacaacacggcgagctggtttactgcgcttacccaacacggtaaagaagacttaaaattcccgcgtggccagggcgtcccgatcaacactaactcttccccggatgatcagattggttattaccgcagagcaactcgtcggattcgcggcggcgacggtaaaatgaaagatttgtctccgcgttggtacttttactatctcggcaccggtccggaagctggactgccctacggggcaaacaaggacgggatcatttgggtggctaccgaaggtgccctgaatactccaaaagatcatatcggcacccgtaaccctgctaataacgctgcgatcgttctgcaactgcctcagggtacaactctgccaaaaggcttctatgcagaagggtcgcgtggtggcagccaggcgagtagccgtagcagcgagcgctctcgcaactcgtcccgtaactccactccgggcgagtctcgcggcacgtccccggctcgtatggcaggtaacggtggtgacgctgctctggcgctgctactgctggacaggctgaaccagctggagtcgaagatgagtggtaaaggccaacagcagcagggccagaccgttaccaaaaagagcgcagctgaagcatctaaaaaaccgcgacagaaacgtaccgcgactaaagcgtacaatgtaacacaggccttcggtcgtcgaggtccggagcaaactcaaggaaactttggcgatcaggaattaatccgccaggggaccgactacaaacactggccgcaaattgcccagttcgccccatccgctagtgcattcttcggtatgagccgcatcggcatggaagtaacgccaagtggtacgtggctgacctacaccggtgctatcaagcttgatgacaaggacccgaactttaaagaccaggttattctgcttaacaaacatattgatgcctataaaactttcccgccgaccgaacccaaaaaggacaaaaagaaaaaagctgatgaaacccaggctctaccgcagcgtcagaaaaaacagcaaactgtgactctgctgccagctgcggacctggatgatttttccaagcagctgcaacagtctatgagctctgcggactctacgcaggcttaa

SEQ ID NO: 312 - DNA, 2016 bp, Artificial Sequence
  Description of Artificial Sequence: Synthetic polynucleotide
atgcaccatcatcaccatcatggtggttctggttcgccgatacttggttattggaagattaaaggactggttcagcccacacgcctcctgctagaatacttagaggaaaaatatgaagagcacctgtacgaacgtgatgagggggacaaatggcgaaacaagaaatttgaattgggcttagaatttccaaatttgccgtattatatcgatggcgacgtaaaactgacccaatcaatggccattattcgctacatcgcagataaacataacatgctgggtggctgccctaaagaacgggctgagatctccatgctggaaggtgcggtgctcgacattcgctacggcgtcagtagaattgcgtatagcaaggatttcgaaactttaaaagtggatttcctgagcaaacttccggagatgctgaaaatgtttgaggataggctttgtcataagacgtatctcaatggtgatcatgttacccacccggactttatgctgtacgacgcccttgatgtcgttctgtatatggatcccatgtgcctggacgccttcccgaaattagtgtgttttaaaaaacgtatcgaagcgattccacagatcgataaatacttgaagtcttctaaatatattgcttggcctctgcaaggctggcaggcaacgttcggtgggggagatcatccgccaaaatcagatctggtgccgcgtgggagccctggcatacaccgcgacggtggttctggtgagaacctgtactttcaaagctcagataatgggcctcaaaaccagcgcaacgctccacgtataaccttcggtggcccgtctgactccacaggcagcaaccagaatggtgagcgtagtggagccaggtctaagcagcgccgtccccagggtctgccgaacaacacggcgagctggtttactgcgcttacccaacacggtaaagaagacttaaaattcccgcgtggccagggcgtcccgatcaacactaactcttccccggatgatcagattggttattaccgcagagcaactcgtcggattcgcggcggcgacggtaaaatgaaagatttgtctccgcgttggtacttttactatctcggcaccggtccggaagctggactgccctacggggcaaacaagagtgggatcatttgggtggctaccgaaggtgccctgaatactccaaaagatcatatcggcacccgtaaccctgctaataacgctgcgatcgttctgcaactgcctcagggtacaactctgccaaaaggcttctatgcagaagggtcgcgtggtggcagccaggcgagtagccgtagcagctcccgctctcgcaactcgtcccgtaactccactccgggctcttctcgcggcacgtccccggctcgtatggcaggtaacggtggtgacgctgctctggcgctgctactgctggacaggctgaaccagctggagtcgaagatgagtggtaaaggccaacagcagcagggccagaccgttaccaaaaagagcgcagctgaagcatctaaaaaaccgcgacagaaacgtaccgcgactaaagcgtacaatgtaacacaggccttcggtcgtcgaggtccggagcaaactcaaggaaactttggcgatcaggaattaatccgccaggggaccgactacaaacactggccgcaaattgcccagttcgccccatccgctagtgcattcttcggtatgagccgcatcggcatggaagtaacgccaagtggtacgtggctgacctacaccggtgctatcaagcttgatgacaaggacccgaactttaaagaccaggttattctgcttaacaaacatattgatgcctataaaactttcccgccgaccgaacccaaaaaggacaaaaagaaaaaagctgatgaaacccaggctctaccgcagcgtcagaaaaaacagcaaactgtgactctgctgccagctgcggacctggatgatttttccaagcagctgcaacagtctatgagctctgcggactctacgcaggcttaa

SEQ ID NO: 313 - DNA, 2016 bp, Artificial Sequence
  Description of Artificial Sequence: Synthetic polynucleotide
atgcaccatcatcaccatcatggtggttctggttcgccgatacttggttattggaagattaaaggactggttcagcccacacgcctcctgctagaatacttagaggaaaaatatgaagagcacctgtacgaacgtgatgagggggacaaatggcgaaacaagaaatttgaattgggcttagaatttccaaatttgccgtattatatcgatggcgacgtaaaactgacccaatcaatggccattattcgctacatcgcagataaacataacatgctgggtggctgccctaaagaacgggctgagatctccatgctggaaggtgcggtgctcgacattcgctacggcgtcagtagaattgcgtatagcaaggatttcgaaactttaaaagtggatttcctgagcaaacttccggagatgctgaaaatgtttgaggataggctttgtcataagacgtatctcaatggtgatcatgttacccacccggactttatgctgtacgacgcccttgatgtcgttctgtatatggatcccatgtgcctggacgccttcccgaaattagtgtgttttaaaaaacgtatcgaagcgattccacagatcgataaatacttgaagtcttctaaatatattgcttggcctctgcaaggctggcaggcaacgttcggtgggggagatcatccgccaaaatcagatctggtgccgcgtgggagccctggcatacaccgcgacggtggttctggtgagaacctgtactttcaaagctcagataatgggcctcaaaaccagcgcaacgctccacgtataaccttcggtggcccgtctgactccacaggcagcaaccagaatggtgagcgtagtggagccaggtctaagcagcgccgtccccagggtctgccgaacaacacggcgagctggtttactgcgcttacccaacacggtaaagaagacttaaaattcccgcgtggccagggcgtcccgatcaacactaactcttccccggatgatcagattggttattaccgcagagcaactcgtcggattcgcggcggcgacggtaaaatgaaagatttggatccgcgttggtacttttactatctcggcaccggtccggaagctggactgccctacggggcaaacaaggacgggatcatttgggtggctaccgaaggtgccctgaatactccaaaagatcatatcggcacccgtaaccctgctaataacgctgcgatcgttctgcaactgcctcagggtacaactctgccaaaaggcttctatgcagaagggtcgcgtggtggcagccaggcgagtagccgtagcagctcccgctctcgcaactcgtcccgtaactccactccgggctcttctcgcggcacgtccccggctcgtatggcaggtaacggtggtgacgctgctctggcgctgctactgctggacaggctgaaccagctggagtcgaagatgagtggtaaaggccaacagcagcagggccagaccgttaccaaaaagagcgcagctgaagcatctaaaaaaccgcgacagaaacgtaccgcgactaaagcgtacaatgtaacacaggccttcggtcgtcgaggtccggagcaaactcaaggaaactttggcgatcaggaattaatccgccaggggaccgactacaaacactggccgcaaattgcccagttcgccccatccgctagtgcattcttcggtatgagccgcatcggcatggaagtaacgccaagtggtacgtggctgacctacaccggtgctatcaagcttgatgacaaggacccgaactttaaagaccaggttattctgcttaacaaacatattgatgcctataaaactttcccgccgaccgaacccaaaaaggacaaaaagaaaaaagctgatgaaacccaggctctaccgcagcgtcagaaaaaacagcaaactgtgactctgctgccagctgcggacctggatgatttttccaagcagctgcaacagtctatgagctctgcggactctacgcaggcttaa

SEQ ID NO: 314 - DNA, 2016 bp, Artificial Sequence
  Description of Artificial Sequence: Synthetic polynucleotide
atgcaccatcatcaccatcatggtggttctggttcgccgatacttggttattggaagattaaaggactggttcagcccacacgcctcctgctagaatacttagaggaaaaatatgaagagcacctgtacgaacgtgatgagggggacaaatggcgaaacaagaaatttgaattgggcttagaatttccaaatttgccgtattatatcgatggcgacgtaaaactgacccaatcaatggccattattcgctacatcgcagataaacataacatgctgggtggctgccctaaagaacgggctgagatctccatgctggaaggtgcggtgctcgacattcgctacggcgtcagtagaattgcgtatagcaaggatttcgaaactttaaaagtggatttcctgagcaaacttccggagatgctgaaaatgtttgaggataggctttgtcataagacgtatctcaatggtgatcatgttacccacccggactttatgctgtacgacgcccttgatgtcgttctgtatatggatcccatgtgcctggacgccttcccgaaattagtgtgttttaaaaaacgtatcgaagcgattccacagatcgataaatacttgaagtcttctaaatatattgcttggcctctgcaaggctggcaggcaacgttcggtgggggagatcatccgccaaaatcagatctggtgccgcgtgggagccctggcatacaccgcgacggtggttctggtgagaacctgtactttcaaagctcagataatgggcctcaaaaccagcgcaacgctccacgtataaccttcggtggcccgtctgactccacaggcagcaaccagaatggtgagcgtagtggagccaggtctaagcagcgccgtccccagggtctgccgaacaacacggcgagctggtttactgcgcttacccaacacggtaaagaagacttaaaattcccgaaaggccagggcgtcccgatcaacactaactctaagccggatgatcagattggttattggcgcagacaaactcgtcggtaccgcggcggcgacggtcaaatgaaagatttgaatccgcgttggtacttttactatctcggcaccggtccggaagctggactgccctacggggcaaacaaggacgggatcatttgggtggctaccgaaggtgccctgaatactccaaaagatcatatcggcacccgtaaccctgctaataacgctgcgatcgttctgcaactgcctcagggtacaactctgccaaaaggcttctatgcagaagggtcgcgtggtggcagccaggcgagtagccgtagcagctcccgctctcgcaactcgtcccgtaactccactccgggctcttctcgcggcacgtccccggctcgtatggcaggtaacggtggtgacgctgctctggcgctgctactgctggacaggctgaaccagctggagtcgaagatgagtggtaaaggccaacagcagcagggccagaccgttaccaaaaagagcgcagctgaagcatctaaaaaaccgcgacagaaacgtaccgcgactaaagcgtacaatgtaacacaggccttcggtcgtcgaggtccggagcaaactcaaggaaactttggcgatcaggaattaatccgccaggggaccgactacaaacactggccgcaaattgcccagttcgccccatccgctagtgcattcttcggtatgagccgcatcggcatggaagtaacgccaagtggtacgtggctgacctacaccggtgctatcaagcttgatgacaaggacccgaactttaaagaccaggttattctgcttaacaaacatattgatgcctataaaactttcccgccgaccgaacccaaaaaggacaaaaagaaaaaagctgatgaaacccaggctctaccgcagcgtcagaaaaaacagcaaactgtgactctgctgccagctgcggacctggatgatttttccaagcagctgcaacagtctatgagctctgcggactctacgcaggcttaa

SEQ ID NO: 315 - DNA, 2016 bp, Artificial Sequence
  Description of Artificial Sequence: Synthetic polynucleotide
atgcaccatcatcaccatcatggtggttctggttcgccgatacttggttattggaagattaaaggactggttcagcccacacgcctcctgctagaatacttagaggaaaaatatgaagagcacctgtacgaacgtgatgagggggacaaatggcgaaacaagaaatttgaattgggcttagaatttccaaatttgccgtattatatcgatggcgacgtaaaactgacccaatcaatggccattattcgctacatcgcagataaacataacatgctgggtggctgccctaaagaacgggctgagatctccatgctggaaggtgcggtgctcgacattcgctacggcgtcagtagaattgcgtatagcaaggatttcgaaactttaaaagtggatttcctgagcaaacttccggagatgctgaaaatgtttgaggataggctttgtcataagacgtatctcaatggtgatcatgttacccacccggactttatgctgtacgacgcccttgatgtcgttctgtatatggatcccatgtgcctggacgccttcccgaaattagtgtgttttaaaaaacgtatcgaagcgattccacagatcgataaatacttgaagtcttctaaatatattgcttggcctctgcaaggctggcaggcaacgttcggtgggggagatcatccgccaaaatcagatctggtgccgcgtgggagccctggcatacaccgcgacggtggttctggtgagaacctgtactttcaaagctcagataatgggcctcaaaaccagcgcaacgctccacgtataaccttcggtggcccgtctgactccacaggcagcaaccagaatggtgagcgtagtggagccaggtctaagcagcgccgtccccagggtctgccgaacaacacggcgagctggtttactgcgcttacccaacacggtaaagaagacttaaaattcccgcgtggccagggcgtcccgatcaacactaactcttccccggatgatcagattggttattaccgcagagcaactcgtcggattcgcggcggcgacggtaaaatgaaagatttgtctccgcgttggtacttttactatctcggcaccggtccggaagctggactgccctacggggcaaacaaggacgggatcctgtgggtggctaccgaaggtgccctgaatactccaaaagatcatatcggcacccgtaaccctgctaataacgctgcgatcgttctgcaactgcctcagggtacaactctgccaaaaggcttctatgcagaagggtcgcgtggtggcagccaggcgagtagccgtagcagctcccgctctcgcaactcgtcccgtaactccactccgggctcttctcgcggcacgtccccggctcgtatggcaggtaacggtggtgacgctgctctggcgctgctactgctggacaggctgaaccagctggagtcgaagatgagtggtaaaggccaacagcagcagggccagaccgttaccaaaaagagcgcagctgaagcatctaaaaaaccgcgacagaaacgtaccgcgactaaagcgtacaatgtaacacaggccttcggtcgtcgaggtccggagcaaactcaaggaaactttggcgatcaggaattaatccgccaggggaccgactacaaacactggccgcaaattgcccagttcgccccatccgctagtgcattcttcggtatgagccgcatcggcatggaagtaacgccaagtggtacgtggctgacctacaccggtgctatcaagcttgatgacaaggacccgaactttaaagaccaggttattctgcttaacaaacatattgatgcctataaaactttcccgccgaccgaacccaaaaaggacaaaaagaaaaaagctgatgaaacccaggctctaccgcagcgtcagaaaaaacagcaaactgtgactctgctgccagctgcggacctggatgatttttccaagcagctgcaacagtctatgagctctgcggactctacgcaggcttaa

SEQ ID NO: 316 - DNA, 2016 bp, Artificial Sequence
  Description of Artificial Sequence: Synthetic polynucleotide
atgcaccatcatcaccatcatggtggttctggttcgccgatacttggttattggaagattaaaggactggttcagcccacacgcctcctgctagaatacttagaggaaaaatatgaagagcacctgtacgaacgtgatgagggggacaaatggcgaaacaagaaatttgaattgggcttagaatttccaaatttgccgtattatatcgatggcgacgtaaaactgacccaatcaatggccattattcgctacatcgcagataaacataacatgctgggtggctgccctaaagaacgggctgagatctccatgctggaaggtgcggtgctcgacattcgctacggcgtcagtagaattgcgtatagcaaggatttcgaaactttaaaagtggatttcctgagcaaacttccggagatgctgaaaatgtttgaggataggctttgtcataagacgtatctcaatggtgatcatgttacccacccggactttatgctgtacgacgcccttgatgtcgttctgtatatggatcccatgtgcctggacgccttcccgaaattagtgtgttttaaaaaacgtatcgaagcgattccacagatcgataaatacttgaagtcttctaaatatattgcttggcctctgcaaggctggcaggcaacgttcggtgggggagatcatccgccaaaatcagatctggtgccgcgtgggagccctggcatacaccgcgacggtggttctggtgagaacctgtactttcaaagctcagataatgggcctcaaaaccagcgcaacgctccacgtataaccttcggtggcccgtctgactccacaggcagcaaccagaatggtgagcgtagtggagccaggtctaagcagcgccgtccccagggtctgccgaacaacacggcgagctggtttactgcgcttacccaacacggtaaagaagacttaaaattcccgcgtggccagggcgtcccgatcaacactaactcttccccggatgatcagattggttattaccgcagagcaactcgtcggattcgcggcggcgacggtaaaatgaaagatttgtctccgcgttggtacttttactatctcggcaccggtccggaagctggactgccctacggggcaaacaaggacgggatcatttgggtggctaccgaaggtgccctgaatactccaaaagatcatatcggcacccgtaaccctgctaataacgctgcgtatgttctgcaactgcctcagggtacaactctgccaaaaggcttctatgcagaagggtcgcgtggtggcagccaggcgagtagccgtagcagctcccgctctcgcaactcgtcccgtaactccactccgggctcttctcgcggcacgtccccggctcgtatggcaggtaacggtggtgacgctgctctggcgctgctactgctggacaggctgaaccagctggagtcgaagatgagtggtaaaggccaacagcagcagggccagaccgttaccaaaaagagcgcagctgaagcatctaaaaaaccgcgacagaaacgtaccgcgactaaagcgtacaatgtaacacaggccttcggtcgtcgaggtccggagcaaactcaaggaaactttggcgatcaggaattaatccgccaggggaccgactacaaacactggccgcaaattgcccagttcgccccatccgctagtgcattcttcggtatgagccgcatcggcatggaagtaacgccaagtggtacgtggctgacctacaccggtgctatcaagcttgatgacaaggacccgaactttaaagaccaggttattctgcttaacaaacatattgatgcctataaaactttcccgccgaccgaacccaaaaaggacaaaaagaaaaaagctgatgaaacccaggctctaccgcagcgtcagaaaaaacagcaaactgtgactctgctgccagctgcggacctggatgatttttccaagcagctgcaacagtctatgagctctgcggactctacgcaggcttaa

SEQ ID NO: 317 - DNA, 2016 bp, Artificial Sequence
  Description of Artificial Sequence: Synthetic polynucleotide
atgcaccatcatcaccatcatggtggttctggttcgccgatacttggttattggaagattaaaggactggttcagcccacacgcctcctgctagaatacttagaggaaaaatatgaagagcacctgtacgaacgtgatgagggggacaaatggcgaaacaagaaatttgaattgggcttagaatttccaaatttgccgtattatatcgatggcgacgtaaaactgacccaatcaatggccattattcgctacatcgcagataaacataacatgctgggtggctgccctaaagaacgggctgagatctccatgctggaaggtgcggtgctcgacattcgctacggcgtcagtagaattgcgtatagcaaggatttcgaaactttaaaagtggatttcctgagcaaacttccggagatgctgaaaatgtttgaggataggctttgtcataagacgtatctcaatggtgatcatgttacccacccggactttatgctgtacgacgcccttgatgtcgttctgtatatggatcccatgtgcctggacgccttcccgaaattagtgtgttttaaaaaacgtatcgaagcgattccacagatcgataaatacttgaagtcttctaaatatattgcttggcctctgcaaggctggcaggcaacgttcggtgggggagatcatccgccaaaatcagatctggtgccgcgtgggagccctggcatacaccgcgacggtggttctggtgagaacctgtactttcaaagctcagataatgggcctcaaaaccagcgcaacgctccacgtataaccttcggtggcccgtctgactccacaggcagcaaccagaatggtgagcgtagtggagccaggtctaagcagcgccgtccccagggtctgccgaacaacacggcgagctggtttactgcgcttacccaacacggtaaagaagacttaaaattcccgcgtggccagggcgtcccgatcaacactaactcttccccggatgatcagattggttattaccgcagagcaactcgtcggattcgcggcggcgacggtaaaatgaaagatttgtctccgcgttggtacttttactatctcggcaccggtccggaagctggactgccctacggggcaaacaaggacgggatcatttgggtggctaccgaaggtgccctgaatactccaaaagatcatatcggcacccgtaaccctgctaataacgctgcgatcgttctgcaactgcctcagggtacaactctgccaaaaggcttctatgcagaagggtcgcgtggtggcagccaggcgagtagccgtagcagctcccgctctcgcaactcgtcccgtaactccactccgggctcttctcgcggcacgtccccggctcgtatggcaggtaacggtggtgacgctgctctggcgctgctactgctggacaggctgaaccagctggagtcgaagatgagtggtaaaggccaacagcagcagggccagaccgttaccaaaaagagcgcagctgaagcatctaaaaaaccgcgacagaaacgtaccgcgactaaagattacaatgtaacacaggccttcggtcgtcgaggtccggagcaaactcaaggaaactttggcgatcaggatttaatcaaattggggaccgactacaaacactggccgcaaattgcccagttcgccccatccgctagtgcattcttcggtatgagccgcatcagtaccgaagaaacgccaagtggtacgtggctgacctacaccggtgctatcaagcttgataagaaggacccgaactttaaagaccaggttattctgcttaacaaacatattgatgcctataaaactttcccgccgaccgaacccaaaaaggacaaaaagaaaaaagctgatgaaacccaggctctaccgcagcgtcagaaaaaacagcaaactgtgactctgctgccagctgcggacctggatgatttttccaagcagctgcaacagtctatgagctctgcggactctacgcaggcttaa

SEQ ID NO: 318 - DNA, 2016 bp, Artificial Sequence
  Description of Artificial Sequence: Synthetic polynucleotide
atgcaccatcatcaccatcatggtggttctggttcgccgatacttggttattggaagattaaaggactggttcagcccacacgcctcctgctagaatacttagaggaaaaatatgaagagcacctgtacgaacgtgatgagggggacaaatggcgaaacaagaaatttgaattgggcttagaatttccaaatttgccgtattatatcgatggcgacgtaaaactgacccaatcaatggccattattcgctacatcgcagataaacataacatgctgggtggctgccctaaagaacgggctgagatctccatgctggaaggtgcggtgctcgacattcgctacggcgtcagtagaattgcgtatagcaaggatttcgaaactttaaaagtggatttcctgagcaaacttccggagatgctgaaaatgtttgaggataggctttgtcataagacgtatctcaatggtgatcatgttacccacccggactttatgctgtacgacgcccttgatgtcgttctgtatatggatcccatgtgcctggacgccttcccgaaattagtgtgttttaaaaaacgtatcgaagcgattccacagatcgataaatacttgaagtcttctaaatatattgcttggcctctgcaaggctggcaggcaacgttcggtgggggagatcatccgccaaaatcagatctggtgccgcgtgggagccctggcatacaccgcgacggtggttctggtgagaacctgtactttcaaagctcagataatgggcctcaaaaccagcgcaacgctccacgtataaccttcggtggcccgtctgactccacaggcagcaaccagaatggtgagcgtagtggagccaggtctaagcagcgccgtccccagggtctgccgaacaacacggcgagctggtttactgcgcttacccaacacggtaaagaagacttaaaattcccgcgtggccagggcgtcccgatcaacactaactcttccccggatgatcagattggttattaccgcagagcaactcgtcggattcgcggcggcgacggtaaaatgaaagatttgtctccgcgttggtacttttactatctcggcaccggtccggaagctggactgccctacggggcaaacaaggacgggatcatttgggtggctaccgaaggtgccctgaatactccaaaagatcatatcggcacccgtaaccctgctaataacgctgcgatcgttctgcaactgcctcagggtacaactctgccaaaaggcttctatgcagaagggtcgcgtggtggcagccaggcgagtagccgtagcagctcccgctctcgcaactcgtcccgtaactccactccgggctcttctcgcggcacgtccccggctcgtatggcaggtaacggtggtgacgctgctctggcgctgctactgctggacaggctgaaccagctggagtcgaagatgagtggtaaaggccaacagcagcagggccagaccgttaccaaaaagagcgcagctgaagcatctaaaaaaccgcgacagaaacgtaccgcgactaaagcgtacaatgtaacacaggccttcggtcgtcgaggtccggagcaaactcaaggaaactttggcgatcaggaattaatccgccaggggaccgaatacaaacactggccgcaaattgcccagttcgccccatccgctagtgcattcttcggtatgagccgcatcggcatggaagtaacgccaagtggtacgtggctgacctacaccggtgctatcaagcttgatgacaaggacccgaactttaaagaccaggttattctgcttaacaaacatattgatgcctataaaactttcccgccgaccgaacccaaaaaggacaaaaagaaaaaagctgatgaaacccaggctctaccgcagcgtcagaaaaaacagcaaactgtgactctgctgccagctgcggacctggatgatttttccaagcagctgcaacagtctatgagctctgcggactctacgcaggcttaa

SEQ ID NO: 319 - DNA, 2016 bp, Artificial Sequence
  Description of Artificial Sequence: Synthetic polynucleotide
atgcaccatcatcaccatcatggtggttctggttcgccgatacttggttattggaagattaaaggactggttcagcccacacgcctcctgctagaatacttagaggaaaaatatgaagagcacctgtacgaacgtgatgagggggacaaatggcgaaacaagaaatttgaattgggcttagaatttccaaatttgccgtattatatcgatggcgacgtaaaactgacccaatcaatggccattattcgctacatcgcagataaacataacatgctgggtggctgccctaaagaacgggctgagatctccatgctggaaggtgcggtgctcgacattcgctacggcgtcagtagaattgcgtatagcaaggatttcgaaactttaaaagtggatttcctgagcaaacttccggagatgctgaaaatgtttgaggataggctttgtcataagacgtatctcaatggtgatcatgttacccacccggactttatgctgtacgacgcccttgatgtcgttctgtatatggatcccatgtgcctggacgccttcccgaaattagtgtgttttaaaaaacgtatcgaagcgattccacagatcgataaatacttgaagtcttctaaatatattgcttggcctctgcaaggctggcaggcaacgttcggtgggggagatcatccgccaaaatcagatctggtgccgcgtgggagccctggcatacaccgcgacggtggttctggtgagaacctgtactttcaaagctcagataatgggcctcaaaaccagcgcaacgctccacgtataaccttcggtggcccgtctgactccacaggcagcaaccagaatggtgagcgtagtggagccaggtctaagcagcgccgtccccagggtctgccgaacaacacggcgagctggtttactgcgcttacccaacacggtaaagaagacttaaaattcccgcgtggccagggcgtcccgatcaacactaactcttccccggatgatcagattggttattaccgcagagcaactcgtcggattcgcggcggcgacggtaaaatgaaagatttgtctccgcgttggtacttttactatctcggcaccggtccggaagctggactgccctacggggcaaacaaggacgggatcatttgggtggctaccgaaggtgccctgaatactccaaaagatcatatcggcacccgtaaccctgctaataacgctgcgatcgttctgcaactgcctcagggtacaactctgccaaaaggcttctatgcagaagggtcgcgtggtggcagccaggcgagtagccgtagcagctcccgctctcgcaactcgtcccgtaactccactccgggctcttctcgcggcacgtccccggctcgtatggcaggtaacggtggtgacgctgctctggcgctgctactgctggacaggctgaaccagctggagtcgaagatgagtggtaaaggccaacagcagcagggccagaccgttaccaaaaagagcgcagctgaaatgtctaaaaaaccgcgacagaaacgtaccgcgactaaagggtacaatgtaacacagtgtttcggtccccgaggtccggagcaaactcaaggaaactttggcgatgccgatttaatcaaaaaagggaccgactacaaacactggccgcaaattgcccagttcgccccatccgctagtgcattcttcggtatgagccgcatctcatcaaaagaacagccaagtggtacgtggctgacctacaccggtgctatcaagcttgataaagatgacccgaactttaaagaccaggttattctgcttaacaaacatattgatgcctataaaactttcccgccgaccgaacccaaaaaggacaaaaagaaaaaagctgatgaaacccaggctctaccgcagcgtcagaaaaaacagcaaactgtgactctgctgccagctgcggacctggatgatttttccaagcagctgcaacagtctatgagctctgcggactctacgcaggcttaa

SEQ ID NO: 320 - DNA, 2016 bp, Artificial Sequence
  Description of Artificial Sequence: Synthetic polynucleotide
atgcaccatcatcaccatcatggtggttctggttcgccgatacttggttattggaagattaaaggactggttcagcccacacgcctcctgctagaatacttagaggaaaaatatgaagagcacctgtacgaacgtgatgagggggacaaatggcgaaacaagaaatttgaattgggcttagaatttccaaatttgccgtattatatcgatggcgacgtaaaactgacccaatcaatggccattattcgctacatcgcagataaacataacatgctgggtggctgccctaaagaacgggctgagatctccatgctggaaggtgcggtgctcgacattcgctacggcgtcagtagaattgcgtatagcaaggatttcgaaactttaaaagtggatttcctgagcaaacttccggagatgctgaaaatgtttgaggataggctttgtcataagacgtatctcaatggtgatcatgttacccacccggactttatgctgtacgacgcccttgatgtcgttctgtatatggatcccatgtgcctggacgccttcccgaaattagtgtgttttaaaaaacgtatcgaagcgattccacagatcgataaatacttgaagtcttctaaatatattgcttggcctctgcaaggctggcaggcaacgttcggtgggggagatcatccgccaaaatcagatctggtgccgcgtgggagccctggcatacaccgcgacggtggttctggtgagaacctgtactttcaaagctcagataatgggcctcaaaaccagcgcaacgctccacgtataaccttcggtggcccgtctgactccacaggcagcaaccagaatggtgagcgtagtggagccaggtctaagcagcgccgtccccagggtctgccgaacaacacggcgagctggtttactgcgcttacccaacacggtaaagaagacttaaaattcccgcgtggccagggcgtcccgatcaacactaactcttccccggatgatcagattggttattaccgcagagcaactcgtcggattcgcggcggcgacggtaaaatgaaagatttgtctccgcgttggtacttttactatctcggcaccggtccggaagctggactgccctacggggcaaacaaggacgggatcatttgggtggctaccgaaggtgccctgaatactccaaaagatcatatcggcacccgtaaccctgctaataacgctgcgatcgttctgcaactgcctcagggtacaactctgccaaaaggcttctatgcagaagggtcgcgtggtggcagccaggcgagtagccgtagcagctcccgctctcgcaactcgtcccgtaactccactccgggctcttctcgcggcacgtccccggctcgtatggcaggtaacggtggtgacgctgctctggcgctgctactgctggacaggctgaaccagctggagtcgaagatgagtggtaaaggccaacagcagcagggccagaccgttaccaaaaagagcgcagctgaagcatctaaaaaaccgcgacagaaacgtaccgcgactaaagcgtacaatgtaacacaggccttcggtcgtcgaggtccgaagcaaactcaaggaaactttggcgatcaggaattaatccgccaggggaccgactacaaacactggccgcaaattgcccagttcgccccatccgctagtgcattcttcggtatgagccgcatcggcatggaagtaacgccaagtggtacgtggctgacctacaccggtgctatcaagcttgatgacaaggacccgaactttaaagaccaggttattctgcttaacaaacatattgatgcctataaaactttcccgccgaccgaacccaaaaaggacaaaaagaaaaaagctgatgaaacccaggctctaccgcagcgtcagaaaaaacagcaaactgtgactctgctgccagctgcggacctggatgatttttccaagcagctgcaacagtctatgagctctgcggactctacgcaggcttaa

SEQ ID NO: 321 - DNA, 2016 bp, Artificial Sequence
  Description of Artificial Sequence: Synthetic polynucleotide
atgcaccatcatcaccatcatggtggttctggttcgccgatacttggttattggaagattaaaggactggttcagcccacacgcctcctgctagaatacttagaggaaaaatatgaagagcacctgtacgaacgtgatgagggggacaaatggcgaaacaagaaatttgaattgggcttagaatttccaaatttgccgtattatatcgatggcgacgtaaaactgacccaatcaatggccattattcgctacatcgcagataaacataacatgctgggtggctgccctaaagaacgggctgagatctccatgctggaaggtgcggtgctcgacattcgctacggcgtcagtagaattgcgtatagcaaggatttcgaaactttaaaagtggatttcctgagcaaacttccggagatgctgaaaatgtttgaggataggctttgtcataagacgtatctcaatggtgatcatgttacccacccggactttatgctgtacgacgcccttgatgtcgttctgtatatggatcccatgtgcctggacgccttcccgaaattagtgtgttttaaaaaacgtatcgaagcgattccacagatcgataaatacttgaagtcttctaaatatattgcttggcctctgcaaggctggcaggcaacgttcggtgggggagatcatccgccaaaatcagatctggtgccgcgtgggagccctggcatacaccgcgacggtggttctggtgagaacctgtactttcaaagctcagataatgggcctcaaaaccagcgcaacgctccacgtataaccttcggtggcccgtctgactccacaggcagcaaccagaatggtgagcgtagtggagccaggtctaagcagcgccgtccccagggtctgccgaacaacacggcgagctggtttactgcgcttacccaacacggtaaagaagacttaaaattcccgcgtggccagggcgtcccgatcaacactaactcttccccggatgatcagattggttattaccgcagagcaactcgtcggattcgcggcggcgacggtaaaatgaaagatttgtctccgcgttggtacttttactatctcggcaccggtccggaagctggactgccctacggggcaaacaaggacgggatcatttgggtggctaccgaaggtgccctgaatactccaaaagatcatatcggcacccgtaaccctgctaataacgctgcgtgtgttctgcaactgcctcagggtacaactctgccaaaaggcttctatgcagaagggtcgcgtggtggcagccaggcgagtagccgtagcagctcccgctctcgcaactcgtcccgtaactccactccgggctcttctcgcggcacgtccccggctcgtatggcaggtaacggtggtgacgctgctctggcgctgctactgctggacaggctgaaccagctggagtcgaagatgagtggtaaaggccaacagcagcagggccagaccgttaccaaaaagagcgcagctgaagcatctaaaaaaccgcgacagaaacgtaccgcgactaaagcgtacaatgtaacacaggccttcggtcgtcgaggtccggagcaaactcaaggaaactttggcgatcaggaattaatccgccaggggaccgactacaaacactggccgcaaattgcccagttcgccccatccgctagtgcattcttcggtatgagccgcatcggcatggaagtaacgccaagtggtacgtggctgacctacaccggtgctatcaagcttgatgacaaggacccgaactttaaagaccaggttattctgcttaacaaacatattgatgcctataaaactttcccgccgaccgaacccaaaaaggacaaaaagaaaaaagctgatgaaacccaggctctaccgcagcgtcagaaaaaacagcaaactgtgactctgctgccagctgcggacctggatgatttttccaagcagctgcaacagtctatgagctctgcggactctacgcaggcttaa

SEQ ID NO: 322 - DNA, 2016 bp, Artificial Sequence
  Description of Artificial Sequence: Synthetic polynucleotide
atgcaccatcatcaccatcatggtggttctggttcgccgatacttggttattggaagattaaaggactggttcagcccacacgcctcctgctagaatacttagaggaaaaatatgaagagcacctgtacgaacgtgatgagggggacaaatggcgaaacaagaaatttgaattgggcttagaatttccaaatttgccgtattatatcgatggcgacgtaaaactgacccaatcaatggccattattcgctacatcgcagataaacataacatgctgggtggctgccctaaagaacgggctgagatctccatgctggaaggtgcggtgctcgacattcgctacggcgtcagtagaattgcgtatagcaaggatttcgaaactttaaaagtggatttcctgagcaaacttccggagatgctgaaaatgtttgaggataggctttgtcataagacgtatctcaatggtgatcatgttacccacccggactttatgctgtacgacgcccttgatgtcgttctgtatatggatcccatgtgcctggacgccttcccgaaattagtgtgttttaaaaaacgtatcgaagcgattccacagatcgataaatacttgaagtcttctaaatatattgcttggcctctgcaaggctggcaggcaacgttcggtgggggagatcatccgccaaaatcagatctggtgccgcgtgggagccctggcatacaccgcgacggtggttctggtgagaacctgtactttcaaagctcagataatgggcctcaaaaccagcgcaacgctccacgtataaccttcggtggcccgtctgactccacaggcagcaaccagaatggtgagcgtagtggagccaggtctaagcagcgccgtccccagggtctgccgaacaacacggcgagctggtttactccgcttacccaacacggtaaagaagacttaaaattcccgcctggccagggcgtcccgatcaacactaactcttccccggatgatcagattggttattaccgcagagcaactcgtcggattcgcggcggcgacggtaaaatgaaagatttgcctccgcgttggtacttttactatctcggcaccggtccggaagctgatctgccctacgggcaagtaaaggacgggatcgtgtgggtggctgcggaaggtgccctgaatactccaaaagatcatatcggcacccgtaaccctgctaataacgctgcgatcccactgcaactgcctccgggtacaactctgccaaaaggcttctatgcagaagggtcgcgtggtggcagccaggcgagtagccgtagcagctcccgctctcgcaactcgtcccgtaactccactccgggctcttctcgcggcacgtccccggctcgtatggcaggtaacggtggtgacgctgctctggcgctgctactgctggacaggctgaaccagctggagtcgaagatgagtggtaaaggccaacagcagcagggccagaccgttaccaaaaagagcgcagctgaagcatctaaaaaaccgcgacagaaacgtaccgcgactaaagcgtacaatgtaacacaggccttcggtcgtcgaggtccggagcaaactcaaggaaactttggcgatcaggaattaatccgccaggggaccgactacaaacactggccgcaaattgcccagttcgccccatccgctagtgcattcttcggtatgagccgcatcggcatggaagtaacgccaagtggtacgtggctgacctacaccggtgctatcaagcttgatgacaaggacccgaactttaaagaccaggttattctgcttaacaaacatattgatgcctataaaactttcccgccgaccgaacccaaaaaggacaaaaagaaaaaagctgatgaaacccaggctctaccgcagcgtcagaaaaaacagcaaactgtgactctgctgccagctgcggacctggatgatttttccaagcagctgcaacagtctatgagctctgcggactctacgcaggcttaa

SEQ ID NO: 323 - DNA, 2016 bp, Artificial Sequence
  Description of Artificial Sequence: Synthetic polynucleotide
atgcaccatcatcaccatcatggtggttctggttcgccgatacttggttattggaagattaaaggactggttcagcccacacgcctcctgctagaatacttagaggaaaaatatgaagagcacctgtacgaacgtgatgagggggacaaatggcgaaacaagaaatttgaattgggcttagaatttccaaatttgccgtattatatcgatggcgacgtaaaactgacccaatcaatggccattattcgctacatcgcagataaacataacatgctgggtggctgccctaaagaacgggctgagatctccatgctggaaggtgcggtgctcgacattcgctacggcgtcagtagaattgcgtatagcaaggatttcgaaactttaaaagtggatttcctgagcaaacttccggagatgctgaaaatgtttgaggataggctttgtcataagacgtatctcaatggtgatcatgttacccacccggactttatgctgtacgacgcccttgatgtcgttctgtatatggatcccatgtgcctggacgccttcccgaaattagtgtgttttaaaaaacgtatcgaagcgattccacagatcgataaatacttgaagtcttctaaatatattgcttggcctctgcaaggctggcaggcaacgttcggtgggggagatcatccgccaaaatcagatctggtgccgcgtgggagccctggcatacaccgcgacggtggttctggtgagaacctgtactttcaaagctcagataatgggcctcaaaaccagcgcaacgctccacgtataaccttcggtggcccgtctgactccacaggcagcaaccagaatggtgagcgtagtggagccaggtctaagcagcgccgtccccagggtctgccgaacaacacggcgagctggtttactgcgcttacccaacacggtaaagaagacttaaaattcccgcgtggccagggcgtcccgatcaacactaactcttccccggatgatcagattggttattaccgcagagcaactcgtcggattcgcggcggcgacggtaaaatgaaagatttgtctccgcgttggtacttttactatctcggcaccggtccggaagctggactgccctacggggcaaacaaggacgggatcatttgggtggctaccgaaggtgccctgaatactccaaaagatcatatcggcacccgtaaccctgctaataacgctgcgtttgttctgcaactgcctcagggtacaactctgccaaaaggcttctatgcagaagggtcgcgtggtggcagccaggcgagtagccgtagcagctcccgctctcgcaactcgtcccgtaactccactccgggctcttctcgcggcacgtccccggctcgtatggcaggtaacggtggtgacgctgctctggcgctgctactgctggacaggctgaaccagctggagtcgaagatgagtggtaaaggccaacagcagcagggccagaccgttaccaaaaagagcgcagctgaagcatctaaaaaaccgcgacagaaacgtaccgcgactaaagcgtacaatgtaacacaggccttcggtcgtcgaggtccggagcaaactcaaggaaactttggcgatcaggaattaatccgccaggggaccgactacaaacactggccgcaaattgcccagttcgccccatccgctagtgcattcttcggtatgagccgcatcggcatggaagtaacgccaagtggtacgtggctgacctacaccggtgctatcaagcttgatgacaaggacccgaactttaaagaccaggttattctgcttaacaaacatattgatgcctataaaactttcccgccgaccgaacccaaaaaggacaaaaagaaaaaagctgatgaaacccaggctctaccgcagcgtcagaaaaaacagcaaactgtgactctgctgccagctgcggacctggatgatttttccaagcagctgcaacagtctatgagctctgcggactctacgcaggcttaa

SEQ ID NO: 324 - DNA, 2016 bp, Artificial Sequence
  Description of Artificial Sequence: Synthetic polynucleotide
atgcaccatcatcaccatcatggtggttctggttcgccgatacttggttattggaagattaaaggactggttcagcccacacgcctcctgctagaatacttagaggaaaaatatgaagagcacctgtacgaacgtgatgagggggacaaatggcgaaacaagaaatttgaattgggcttagaatttccaaatttgccgtattatatcgatggcgacgtaaaactgacccaatcaatggccattattcgctacatcgcagataaacataacatgctgggtggctgccctaaagaacgggctgagatctccatgctggaaggtgcggtgctcgacattcgctacggcgtcagtagaattgcgtatagcaaggatttcgaaactttaaaagtggatttcctgagcaaacttccggagatgctgaaaatgtttgaggataggctttgtcataagacgtatctcaatggtgatcatgttacccacccggactttatgctgtacgacgcccttgatgtcgttctgtatatggatcccatgtgcctggacgccttcccgaaattagtgtgttttaaaaaacgtatcgaagcgattccacagatcgataaatacttgaagtcttctaaatatattgcttggcctctgcaaggctggcaggcaacgttcggtgggggagatcatccgccaaaatcagatctggtgccgcgtgggagccctggcatacaccgcgacggtggttctggtgagaacctgtactttcaaagctcagataatgggcctcaaaaccagcgcaacgctccacgtataaccttcggtggcccgtctgactccacaggcagcaaccagaatggtgagcgtagtggagccaggtctaagcagcgccgtccccagggtctgccgaacaacacggcgagctggtttactgcgcttacccaacacggtaaagaagacttaaaattcccgcgtggccagggcgtcccgatcaacactaactcttccccggatgatcagattggttattaccgcagagcaactcgtcggattcgcggcggcgacggtaaaatgaaagatttgtctccgcgttggtacttttactatctcggcaccggtccggaagctggactgccctacggggcaaacaaggacgggatcatttgggtggctaccgaaggtgccctgaatactccaaaagatcatatcggcacccgtaaccctgctaataacgctgcgatcgttctgcaactgcctcagggtacaactctgccaaaaggcttctatgcagaagggtcgcgtggtggcagccaggcgagtagccgtagcagctcccgctctcgcaactcgtcccgtaactccactccgggctcttctcgcggcacgtccccggctcgtatggcaggtaacggtggtgacgctgctctggcgctgctactgctggacaggctgaaccagctggagtcgaagatgagtggtaaaggccaacagcagcagggccagaccgttaccaaaaagagcgcagctgaagcatctaaaaaaccgcgacagaaacgtaccgcgactaaagcgtacaatgtaacacaggccttcggtcgtcgaggtccggagcaaactcaaggaaactttggcgatcagaatttaatccgccaggggaccgactacaaacactggccgcaaattgcccagttcgccccatccgctagtgcattcttcggtatgagccgcatcggcatggaagtaacgccaagtggtacgtggctgacctacaccggtgctatcaagcttgatgacaaggacccgaactttaaagaccaggttattctgcttaacaaacatattgatgcctataaaactttcccgccgaccgaacccaaaaaggacaaaaagaaaaaagctgatgaaacccaggctctaccgcagcgtcagaaaaaacagcaaactgtgactctgctgccagctgcggacctggatgatttttccaagcagctgcaacagtctatgagctctgcggactctacgcaggcttaa

SEQ ID NO: 325 - DNA, 2016 bp, Artificial Sequence
  Description of Artificial Sequence: Synthetic polynucleotide
atgcaccatcatcaccatcatggtggttctggttcgccgatacttggttattggaagattaaaggactggttcagcccacacgcctcctgctagaatacttagaggaaaaatatgaagagcacctgtacgaacgtgatgagggggacaaatggcgaaacaagaaatttgaattgggcttagaatttccaaatttgccgtattatatcgatggcgacgtaaaactgacccaatcaatggccattattcgctacatcgcagataaacataacatgctgggtggctgccctaaagaacgggctgagatctccatgctggaaggtgcggtgctcgacattcgctacggcgtcagtagaattgcgtatagcaaggatttcgaaactttaaaagtggatttcctgagcaaacttccggagatgctgaaaatgtttgaggataggctttgtcataagacgtatctcaatggtgatcatgttacccacccggactttatgctgtacgacgcccttgatgtcgttctgtatatggatcccatgtgcctggacgccttcccgaaattagtgtgttttaaaaaacgtatcgaagcgattccacagatcgataaatacttgaagtcttctaaatatattgcttggcctctgcaaggctggcaggcaacgttcggtgggggagatcatccgccaaaatcagatctggtgccgcgtgggagccctggcatacaccgcgacggtggttctggtgagaacctgtactttcaaagctcagataatgggcctcaaaaccagcgcaacgctccacgtataaccttcggtggcccgtctgactccacaggcagcaaccagaatggtgagcgtagtggagccaggtctaagcagcgccgtccccagggtctgccgaacaacacggcgagctggtttactgcgcttacccaacacggtaaagaagacttaaaattcccgcgtggccagggcatgccgatcaacactaactcttccccggatgatcagattggttattaccgcagagcaactcgtcggattcgcggcggcgacggtaaaatgaaagatttgtctccgcgttggtacttttactatctcggcaccggtccggaagctggactgccctacggggcaaacaaggacgggatcatttgggtggctaccgaaggtgccctgaatactccaaaagatcatatcggcacccgtaaccctgctaataacgctgcgatcgttctgcaactgcctcagggtacaactctgccaaaaggcttctatgcagaagggtcgcgtggtggcagccaggcgagtagccgtagcagctcccgctctcgcaactcgtcccgtaactccactccgggctcttctcgcggcacgtccccggctcgtatggcaggtaacggtggtgacgctgctctggcgctgctactgctggacaggctgaaccagctggagtcgaagatgagtggtaaaggccaacagcagcagggccagaccgttaccaaaaagagcgcagctgaagcatctaaaaaaccgcgacagaaacgtaccgcgactaaagcgtacaatgtaacacaggccttcggtcgtcgaggtccggagcaaactcaaggaaactttggcgatcaggaattaatccgccaggggaccgactacaaacactggccgcaaattgcccagttcgccccatccgctagtgcattcttcggtatgagccgcatcggcatggaagtaacgccaagtggtacgtggctgacctacaccggtgctatcaagcttgatgacaaggacccgaactttaaagaccaggttattctgcttaacaaacatattgatgcctataaaactttcccgccgaccgaacccaaaaaggacaaaaagaaaaaagctgatgaaacccaggctctaccgcagcgtcagaaaaaacagcaaactgtgactctgctgccagctgcggacctggatgatttttccaagcagctgcaacagtctatgagctctgcggactctacgcaggcttaa

SEQ ID NO: 326 - DNA, 2016 bp, Artificial Sequence
  Description of Artificial Sequence: Synthetic polynucleotide
atgcaccatcatcaccatcatggtggttctggttcgccgatacttggttattggaagattaaaggactggttcagcccacacgcctcctgctagaatacttagaggaaaaatatgaagagcacctgtacgaacgtgatgagggggacaaatggcgaaacaagaaatttgaattgggcttagaatttccaaatttgccgtattatatcgatggcgacgtaaaactgacccaatcaatggccattattcgctacatcgcagataaacataacatgctgggtggctgccctaaagaacgggctgagatctccatgctggaaggtgcggtgctcgacattcgctacggcgtcagtagaattgcgtatagcaaggatttcgaaactttaaaagtggatttcctgagcaaacttccggagatgctgaaaatgtttgaggataggctttgtcataagacgtatctcaatggtgatcatgttacccacccggactttatgctgtacgacgcccttgatgtcgttctgtatatggatcccatgtgcctggacgccttcccgaaattagtgtgttttaaaaaacgtatcgaagcgattccacagatcgataaatacttgaagtcttctaaatatattgcttggcctctgcaaggctggcaggcaacgttcggtgggggagatcatccgccaaaatcagatctggtgccgcgtgggagccctggcatacaccgcgacggtggttctggtgagaacctgtactttcaaagctcagataatgggcctcaaaaccagcgcaacgctccacgtataaccttcggtggcccgtctgactccacaggcagcaaccagaatggtgagcgtagtggagccaggtctaagcagcgccgtccccagggtctgccgaacaacacggcgagctggtttactgcgcttacccaacacggtaaagaagacttaaaattcccgcgtggccagggcgtcccgatcaacactaactcttccccggatgatcagattggttattaccgcagagcaactcgtcggattcgcggcggcgacggtaaaatgaaagatttgtctccgcgttggtacttttactatctcggcaccggtccggaagctggactgccctacggggataacaaggacgggatcatttgggtggctaccgaaggtgccctgaatactccaaaagatcatatcggcacccgtaaccctgctaataacgctgcgatcgttctgcaactgcctcagggtacaactctgccaaaaggcttctatgcagaagggtcgcgtggtggcagccaggcgagtagccgtagcagctcccgctctcgcaactcgtcccgtaactccactccgggctcttctcgcggcacgtccccggctcgtatggcaggtaacggtggtgacgctgctctggcgctgctactgctggacaggctgaaccagctggagtcgaagatgagtggtaaaggccaacagcagcagggccagaccgttaccaaaaagagcgcagctgaagcatctaaaaaaccgcgacagaaacgtaccgcgactaaagcgtacaatgtaacacaggccttcggtcgtcgaggtccggagcaaactcaaggaaactttggcgatcaggaattaatccgccaggggaccgactacaaacactggccgcaaattgcccagttcgccccatccgctagtgcattcttcggtatgagccgcatcggcatggaagtaacgccaagtggtacgtggctgacctacaccggtgctatcaagcttgatgacaaggacccgaactttaaagaccaggttattctgcttaacaaacatattgatgcctataaaactttcccgccgaccgaacccaaaaaggacaaaaagaaaaaagctgatgaaacccaggctctaccgcagcgtcagaaaaaacagcaaactgtgactctgctgccagctgcggacctggatgatttttccaagcagctgcaacagtctatgagctctgcggactctacgcaggcttaa

SEQ ID NO: 327 - DNA, 2016 bp, Artificial Sequence
  Description of Artificial Sequence: Synthetic polynucleotide
atgcaccatcatcaccatcatggtggttctggttcgccgatacttggttattggaagattaaaggactggttcagcccacacgcctcctgctagaatacttagaggaaaaatatgaagagcacctgtacgaacgtgatgagggggacaaatggcgaaacaagaaatttgaattgggcttagaatttccaaatttgccgtattatatcgatggcgacgtaaaactgacccaatcaatggccattattcgctacatcgcagataaacataacatgctgggtggctgccctaaagaacgggctgagatctccatgctggaaggtgcggtgctcgacattcgctacggcgtcagtagaattgcgtatagcaaggatttcgaaactttaaaagtggatttcctgagcaaacttccggagatgctgaaaatgtttgaggataggctttgtcataagacgtatctcaatggtgatcatgttacccacccggactttatgctgtacgacgcccttgatgtcgttctgtatatggatcccatgtgcctggacgccttcccgaaattagtgtgttttaaaaaacgtatcgaagcgattccacagatcgataaatacttgaagtcttctaaatatattgcttggcctctgcaaggctggcaggcaacgttcggtgggggagatcatccgccaaaatcagatctggtgccgcgtgggagccctggcatacaccgcgacggtggttctggtgagaacctgtactttcaaagctcagataatgggcctcaaaaccagcgcaacgctccacgtataaccttcggtggcccgtctgactccacaggcagcaaccagaatggtgagcgtagtggagccaggtctaagcagcgccgtccccagggtctgccgaacaacacggcgagctggtttactgcgcttacccaacacggtaaagaagacttaaaattcccgcgtggccagggcgtcccgatcaacactaactcttccccggatgatcagattggttattaccgcagagcaactcgtcggattcgcggcggcgacggtaaaatgaaagatttgtctccgcgttggtacttttactatctcggcaccggtccggaagctggactgccctacggggcaaacaaggacgggatcgtgtgggtggctaccgaaggtgccctgaatactccaaaagatcatatcggcacccgtaaccctgctaataacgctgcgatcgttctgcaactgcctcagggtacaactctgccaaaaggcttctatgcagaagggtcgcgtggtggcagccaggcgagtagccgtagcagctcccgctctcgcaactcgtcccgtaactccactccgggctcttctcgcggcacgtccccggctcgtatggcaggtaacggtggtgacgctgctctggcgctgctactgctggacaggctgaaccagctggagtcgaagatgagtggtaaaggccaacagcagcagggccagaccgttaccaaaaagagcgcagctgaagcatctaaaaaaccgcgacagaaacgtaccgcgactaaagcgtacaatgtaacacaggccttcggtcgtcgaggtccggagcaaactcaaggaaactttggcgatcaggaattaatccgccaggggaccgactacaaacactggccgcaaattgcccagttcgccccatccgctagtgcattcttcggtatgagccgcatcggcatggaagtaacgccaagtggtacgtggctgacctacaccggtgctatcaagcttgatgacaaggacccgaactttaaagaccaggttattctgcttaacaaacatattgatgcctataaaactttcccgccgaccgaacccaaaaaggacaaaaagaaaaaagctgatgaaacccaggctctaccgcagcgtcagaaaaaacagcaaactgtgactctgctgccagctgcggacctggatgatttttccaagcagctgcaacagtctatgagctctgcggactctacgcaggcttaa

SEQ ID NO: 328 - DNA, 2016 bp, Artificial Sequence
  Description of Artificial Sequence: Synthetic polynucleotide
atgcaccatcatcaccatcatggtggttctggttcgccgatacttggttattggaagattaaaggactggttcagcccacacgcctcctgctagaatacttagaggaaaaatatgaagagcacctgtacgaacgtgatgagggggacaaatggcgaaacaagaaatttgaattgggcttagaatttccaaatttgccgtattatatcgatggcgacgtaaaactgacccaatcaatggccattattcgctacatcgcagataaacataacatgctgggtggctgccctaaagaacgggctgagatctccatgctggaaggtgcggtgctcgacattcgctacggcgtcagtagaattgcgtatagcaaggatttcgaaactttaaaagtggatttcctgagcaaacttccggagatgctgaaaatgtttgaggataggctttgtcataagacgtatctcaatggtgatcatgttacccacccggactttatgctgtacgacgcccttgatgtcgttctgtatatggatcccatgtgcctggacgccttcccgaaattagtgtgttttaaaaaacgtatcgaagcgattccacagatcgataaatacttgaagtcttctaaatatattgcttggcctctgcaaggctggcaggcaacgttcggtgggggagatcatccgccaaaatcagatctggtgccgcgtgggagccctggcatacaccgcgacggtggttctggtgagaacctgtactttcaaagctcagataatgggcctcaaaaccagcgcaacgctccacgtataaccttcggtggcccgtctgactccacaggcagcaaccagaatggtgagcgtagtggagccaggtctaagcagcgccgtccccagggtctgccgaacaacacggcgagctggtttactgcgcttacccaacacggtaaagaagacttaaaattcccgcgtggccagggcgtcccgatcaacactaactcttccccggatgatcagattggttattaccgcagagcaactcgtcggattcgcggcggcgacggtaaaatgaaagatttgtctccgcgttggtacttttactatctcggcaccggtccggaagctggactgccctacggggcaaacaaggacgggatcatttgggtggctaccgaaggtgccctgaatactccaaaagatcatatcggcacccgtaaccctgctaataacgctgcgatcgttctgcaactgcctcagggtacaactctgccaaaaggcttctatgcagaagggtcgcgtggtggcagccaggcgagtagccgtagcagctcccgctctcgcaactcgtcccgtaactccactccgggctctgagcgcggcacgtccccggctcgtatggcaggtaacggtggtgacgctgctctggcgctgctactgctggacaggctgaaccagctggagtcgaagatgagtggtaaaggccaacagcagcagggccagaccgttaccaaaaagagcgcagctgaagcatctaaaaaaccgcgacagaaacgtaccgcgactaaagcgtacaatgtaacacaggccttcggtcgtcgaggtccggagcaaactcaaggaaactttggcgatcaggaattaatccgccaggggaccgactacaaacactggccgcaaattgcccagttcgccccatccgctagtgcattcttcggtatgagccgcatcggcatggaagtaacgccaagtggtacgtggctgacctacaccggtgctatcaagcttgatgacaaggacccgaactttaaagaccaggttattctgcttaacaaacatattgatgcctataaaactttcccgccgaccgaacccaaaaaggacaaaaagaaaaaagctgatgaaacccaggctctaccgcagcgtcagaaaaaacagcaaactgtgactctgctgccagctgcggacctggatgatttttccaagcagctgcaacagtctatgagctctgcggactctacgcaggcttaa

SEQ ID NO: 329 - DNA, 2016 bp, Artificial Sequence
  Description of Artificial Sequence: Synthetic polynucleotide
atgcaccatcatcaccatcatggtggttctggttcgccgatacttggttattggaagattaaaggactggttcagcccacacgcctcctgctagaatacttagaggaaaaatatgaagagcacctgtacgaacgtgatgagggggacaaatggcgaaacaagaaatttgaattgggcttagaatttccaaatttgccgtattatatcgatggcgacgtaaaactgacccaatcaatggccattattcgctacatcgcagataaacataacatgctgggtggctgccctaaagaacgggctgagatctccatgctggaaggtgcggtgctcgacattcgctacggcgtcagtagaattgcgtatagcaaggatttcgaaactttaaaagtggatttcctgagcaaacttccggagatgctgaaaatgtttgaggataggctttgtcataagacgtatctcaatggtgatcatgttacccacccggactttatgctgtacgacgcccttgatgtcgttctgtatatggatcccatgtgcctggacgccttcccgaaattagtgtgttttaaaaaacgtatcgaagcgattccacagatcgataaatacttgaagtcttctaaatatattgcttggcctctgcaaggctggcaggcaacgttcggtgggggagatcatccgccaaaatcagatctggtgccgcgtgggagccctggcatacaccgcgacggtggttctggtgagaacctgtactttcaaagctcagataatgggcctcaaaaccagcgcaacgctccacgtataaccttcggtggcccgtctgactccacaggcagcaaccagaatggtgagcgtagtggagccaggtctaagcagcgccgtccccagggtctgccgaacaacacggcgagctggtttactgcgcttacccaacacggtaaagaagacttaaaattcccgcgtggccagggcgtcccgatcaacactaactcttccccggatgatcagattggttattaccgcagagcaactcgtcggattcgcggcggcgacggtaaaatgaaagatttgtctccgcgttggtacttttactatctcggcaccggtccggaagctggactgccctacggggcaaacaaggacgggatcatttgggtggctaccgaaggtgccctgaatactccaaaagatcatatcggcacccgtaaccctgctaataacgctgcgatcgttctgcaactgcctcagggtacaactctgccaaaaggcttctatgcagaagggtcgcgtggtggcagccaggcgagtagccgtagcagctcccgctctcgcaactcgtcccgtaactccactccgggctcttctcgcggcacgtccccggctcgtatggcaggtaacggtggtgacgctgctctggcgctgctactgctggacaggctgaaccagctggagtcgaagatgagtggtaaaggccaacagcagcagggccagaccgttaccaaaaagagcgcagctgaaatgtctaaaaaaccgcgacagaaacgtaccgcgactaaaggctgcaatgtaacacagtgtttcggtccacgaggtccggagcaaactcaaggaaactttggcgatgccgatttagtgaaaaaagggaccgactacaaacactggccgcaaattgcccagttcgccccatccgctagtgcattcttcggtatgagccgcatctcgtcaaaagaacaaccaagtggtacgtggctgacctacaccggtgctatcaagcttgataaggatgacccgaactttaaagaccaggttattctgcttaacaaacatattgatgcctataaaactttcccgccgaccgaacccaaaaaggacaaaaagaaaaaagctgatgaaacccaggctctaccgcagcgtcagaaaaaacagcaaactgtgactctgctgccagctgcggacctggatgatttttccaagcagctgcaacagtctatgagctctgcggactctacgcaggcttaa

SEQ ID NO: 330 - DNA, 2016 bp, Artificial Sequence
  Description of Artificial Sequence: Synthetic polynucleotide
atgcaccatcatcaccatcatggtggttctggttcgccgatacttggttattggaagattaaaggactggttcagcccacacgcctcctgctagaatacttagaggaaaaatatgaagagcacctgtacgaacgtgatgagggggacaaatggcgaaacaagaaatttgaattgggcttagaatttccaaatttgccgtattatatcgatggcgacgtaaaactgacccaatcaatggccattattcgctacatcgcagataaacataacatgctgggtggctgccctaaagaacgggctgagatctccatgctggaaggtgcggtgctcgacattcgctacggcgtcagtagaattgcgtatagcaaggatttcgaaactttaaaagtggatttcctgagcaaacttccggagatgctgaaaatgtttgaggataggctttgtcataagacgtatctcaatggtgatcatgttacccacccggactttatgctgtacgacgcccttgatgtcgttctgtatatggatcccatgtgcctggacgccttcccgaaattagtgtgttttaaaaaacgtatcgaagcgattccacagatcgataaatacttgaagtcttctaaatatattgcttggcctctgcaaggctggcaggcaacgttcggtgggggagatcatccgccaaaatcagatctggtgccgcgtgggagccctggcatacaccgcgacggtggttctggtgagaacctgtactttcaaagctcagataatgggcctcaaaaccagcgcaacgctccacgtataaccttcggtggcccgtctgactccacaggcagcaaccagaatggtgagcgtagtggagccaggtctaagcagcgccgtccccagggtctgccgaacaacacggcgagctggtttactgcgcttacccaacacggtaaagaagacttaaaattcccgcgtggccagggcgtcccgatcaacactaactcttccccggatgatcagattggttattaccgcagagcaactcgtcggattcgcggcggcgacggtaaaatgaaagatttgtctccgcgttggtacttttactatctcggcaccggtccggaagctggactgccctacggggcaaacaaggacgggatcatttgggtggctaccgaaggtgccctgaatactccaaaagatcatatcggcacccgtaaccctgctaataacgctgcgatcgttctgcaactgcctcagggtacaactctgccaaaaggcttctatgcagaagggtcgcgtggtggcagccaggcgagtagccgtagcagctcccgctctcgcaactcgtcccgtaactccactccgggctcttctcgcggcacgtccccggctcgtatggcaggtaacggtggtgacgctgctctggcgctgctactgctggacaggctgaaccagctggagtcgaagatgagtggtaaaggccaacagcagcagggccagaccgttaccaaaaagagcgcagctgaagcatctaaaaaaccgcgacagaaacgtaccgcgactaaagcgtacaatgtaacacaggccttcggtcgtcgaggtccggagcaaactcaaggaaactttggcgatcaggaattaatccgccaggggaccgactacaaacactggccgcaaattgcccagttcgccccatccgctagtgcattcttcggtatgagccgcatcggcatggaagtaacgccaagtggtacgtggctgacctacaccggtgctatcaagcttgatgacaaggacccgaactttaaaaatcaggttattctgcttaacaaacatattgatgcctataaaactttcccgccgaccgaacccaaaaaggacaaaaagaaaaaagctgatgaaacccaggctctaccgcagcgtcagaaaaaacagcaaactgtgactctgctgccagctgcggacctggatgatttttccaagcagctgcaacagtctatgagctctgcggactctacgcaggcttaa

SEQ ID NO: 331 - DNA, 2016 bp, Artificial Sequence
  Description of Artificial Sequence: Synthetic polynucleotide
atgcaccatcatcaccatcatggtggttctggttcgccgatacttggttattggaagattaaaggactggttcagcccacacgcctcctgctagaatacttagaggaaaaatatgaagagcacctgtacgaacgtgatgagggggacaaatggcgaaacaagaaatttgaattgggcttagaatttccaaatttgccgtattatatcgatggcgacgtaaaactgacccaatcaatggccattattcgctacatcgcagataaacataacatgctgggtggctgccctaaagaacgggctgagatctccatgctggaaggtgcggtgctcgacattcgctacggcgtcagtagaattgcgtatagcaaggatttcgaaactttaaaagtggatttcctgagcaaacttccggagatgctgaaaatgtttgaggataggctttgtcataagacgtatctcaatggtgatcatgttacccacccggactttatgctgtacgacgcccttgatgtcgttctgtatatggatcccatgtgcctggacgccttcccgaaattagtgtgttttaaaaaacgtatcgaagcgattccacagatcgataaatacttgaagtcttctaaatatattgcttggcctctgcaaggctggcaggcaacgttcggtgggggagatcatccgccaaaatcagatctggtgccgcgtgggagccctggcatacaccgcgacggtggttctggtgagaacctgtactttcaaagctcagataatgggcctcaaaaccagcgcaacgctccacgtataaccttcggtggcccgtctgactccacaggcagcaaccagaatggtgagcgtagtggagccaggtctaagcagcgccgtccccagggtctgccgaacaacacggcgagctggtttactgcgcttacccaacacggtaaagaagacttaaaattcccgcgtggccagggcgtcccgatcaacactaactcttccccggatgatcagattggttattaccgcagagcaactcgtcggattcgcggcggcgacggtaaaatgaaagatttgtctccgcgttggtacttttactatctcggcaccggtccggaagctggactgccctacggggcaaacaaggacgggatcatttgggtggctaccgaaggtgccctgaatactccaaaagatcatatcggcacccgtaaccctgctaataacgctgcgatcgttctgcaactgcctcagggtacaactctgccaaaaggcttctatgcagaagggtcgcgtggtggcagccaggcgagtagccgtagcagctcccgctctcgcaactcgtcccgtaactccactccgggctcttctcgcggcacgtccccggctcgtatggcaggtaacggtggtgacgctgctctggcgctgctactgctggacaggctgaaccagctggagtcgaagatgagtggtaaaggccaacagcagcagggccagaccgttaccaaaaagagcgcagctgaagcatctaaaaaaccgcgacagaaacgtaccgcgactaaagcgtacaatgtaacacaggccttcggtcgtcgaggtccggagcaaactcaaggaaactttggcgatcaggaattaatccgccaggggaccgactacaaacactggccgcaaattgcccagttcgccccatccgctagtgcattcttcggtatgagccgcatcggcatggaaatgacgccaagtggtacgtggctgacctacaccggtgctatcaagcttgatgacaaggacccgaactttaaagaccaggttattctgcttaacaaacatattgatgcctataaaactttcccgccgaccgaacccaaaaaggacaaaaagaaaaaagctgatgaaacccaggctctaccgcagcgtcagaaaaaacagcaaactgtgactctgctgccagctgcggacctggatgatttttccaagcagctgcaacagtctatgagctctgcggactctacgcaggcttaa

SEQ ID NO: 332 - DNA, 2016 bp, Artificial Sequence
  Description of Artificial Sequence: Synthetic polynucleotide
atgcaccatcatcaccatcatggtggttctggttcgccgatacttggttattggaagattaaaggactggttcagcccacacgcctcctgctagaatacttagaggaaaaatatgaagagcacctgtacgaacgtgatgagggggacaaatggcgaaacaagaaatttgaattgggcttagaatttccaaatttgccgtattatatcgatggcgacgtaaaactgacccaatcaatggccattattcgctacatcgcagataaacataacatgctgggtggctgccctaaagaacgggctgagatctccatgctggaaggtgcggtgctcgacattcgctacggcgtcagtagaattgcgtatagcaaggatttcgaaactttaaaagtggatttcctgagcaaacttccggagatgctgaaaatgtttgaggataggctttgtcataagacgtatctcaatggtgatcatgttacccacccggactttatgctgtacgacgcccttgatgtcgttctgtatatggatcccatgtgcctggacgccttcccgaaattagtgtgttttaaaaaacgtatcgaagcgattccacagatcgataaatacttgaagtcttctaaatatattgcttggcctctgcaaggctggcaggcaacgttcggtgggggagatcatccgccaaaatcagatctggtgccgcgtgggagccctggcatacaccgcgacggtggttctggtgagaacctgtactttcaaagctcagataatgggcctcaaaaccagcgcaacgctccacgtataaccttcggtggcccgtctgactccacaggcagcaaccagaatggtgagcgtagtggagccaggtctaagcagcgccgtccccagggtctgccgaacaacacggcgagctggtttactgcgcttacccaacacggtaaagaagacttaaaattcccgcgtggccagggcgtcccgatcaacactaactcttccccggatgatcagattggttattaccgcagagcaactcgtcggattcgcggcggcgacggtaaaatgaaagatttgtctccgcgttggtacttttactatctcggcaccggtccggaagctggactgccctacggggcaaacaaggacgggatcatttgggtggctaccgaaggtgccctgaatactccaaaagatcatatcggcacccgtaaccctgctaataacgctgcgatcgttctgcaactgcctcagggtacaactctgccaaaaggcttctatgcagaagggtcgcgtggtggcagccaggcgagtagccgtagcagctcccgctctcgcaactcgtcccgtaactccactccgggctcttctcgcggcacgtccccggctcgtatggcaggtaacggtggtgacgctgctctggcgctgctactgctggacaggctgaaccagctggagtcgaagatgagtggtaaaggccaacagcagcagggccagaccgttaccaaaaagagcgcagctgaagcatctaaagcgccgcgacagaaacgtaccgcgactaaagcgtacaatgtaacacaggccttcggtcgtcgaggtccggagcaaactcaaggaaactttggcgatcaggaattaatccgccaggggaccgactacaaacactggccgcaaattgcccagttcgccccatccgctagtgcattcttcggtatgagccgcatcggcatggaagtaacgccaagtggtacgtggctgacctacaccggtgctatcaagcttgatgacaaggacccgaactttaaagaccaggttattctgcttaacaaacatattgatgcctataaaactttcccgccgaccgaacccaaaaaggacaaaaagaaaaaagctgatgaaacccaggctctaccgcagcgtcagaaaaaacagcaaactgtgactctgctgccagctgcggacctggatgatttttccaagcagctgcaacagtctatgagctctgcggactctacgcaggcttaa

SEQ ID NO: 333 - DNA, 2016 bp, Artificial Sequence
  Description of Artificial Sequence: Synthetic polynucleotide
atgcaccatcatcaccatcatggtggttctggttcgccgatacttggttattggaagattaaaggactggttcagcccacacgcctcctgctagaatacttagaggaaaaatatgaagagcacctgtacgaacgtgatgagggggacaaatggcgaaacaagaaatttgaattgggcttagaatttccaaatttgccgtattatatcgatggcgacgtaaaactgacccaatcaatggccattattcgctacatcgcagataaacataacatgctgggtggctgccctaaagaacgggctgagatctccatgctggaaggtgcggtgctcgacattcgctacggcgtcagtagaattgcgtatagcaaggatttcgaaactttaaaagtggatttcctgagcaaacttccggagatgctgaaaatgtttgaggataggctttgtcataagacgtatctcaatggtgatcatgttacccacccggactttatgctgtacgacgcccttgatgtcgttctgtatatggatcccatgtgcctggacgccttcccgaaattagtgtgttttaaaaaacgtatcgaagcgattccacagatcgataaatacttgaagtcttctaaatatattgcttggcctctgcaaggctggcaggcaacgttcggtgggggagatcatccgccaaaatcagatctggtgccgcgtgggagccctggcatacaccgcgacggtggttctggtgagaacctgtactttcaaagctcagataatgggcctcaaaaccagcgcaacgctccacgtataaccttcggtggcccgtctgactccacaggcagcaaccagaatggtgagcgtagtggagccaggtctaagcagcgccgtccccagggtctgccgaacaacacggcgagctggtttactgcgcttacccaacacggtaaagaagacttaaaattcccgcgtggccagggcgtcccgatcaacactaactcttccccggatgatcagattggttattaccgcagagcaactcgtcggattcgcggcggcgacggtaaaatgaaagatttgtctccgcgttggtacttttactatctcggcaccggtccggaagctggactgccctacggggcaaacaaggacgggatcatttgggtggctaccgaaggtgccctgaatactccaaaagatcatatcggcacccgtaaccctgctaataacgctgcgatcgttctgcaactgcctcagggtacaactctgccaaaaggcttctatgcagaagggtcgcgtggtggcagccaggcgagtagccgtagcagctcccgctctcgcaactcgtcccgtaactccactccgggctcttctcgcggcacgtccccggctcgtatggcaggtaacggtggtgacgctgctctggcgctgctactgctggacaggctgaaccagctggagtcgaagatgagtggtaaaggccaacagcagcagggccagaccgttaccaaaaagagcgcagctgaaatgtctaaaaaaccgcgacagaaacgtaccgcgactaaagagtgcaatgtaacacagtgtttcggtccacgaggtccggagcaaactcaaggaaactttggcgatgccgaattagtcaagaaagggaccgactacaaacactggccgcaaattgcccagttcgccccatccgctagtgcattcttcggtatgagccgcatctcatcgaaggaaacgccaagtggtacgtggctgacctacaccggtgctatcaagcttgataaggatgacccgaactttaaagaccaggttattctgcttaacaaacatattgatgcctataaaactttcccgccgaccgaacccaaaaaggacaaaaagaaaaaagctgatgaaacccaggctctaccgcagcgtcagaaaaaacagcaaactgtgactctgctgccagctgcggacctggatgatttttccaagcagctgcaacagtctatgagctctgcggactctacgcaggcttaa

SEQ ID NO: 334 - DNA, 2016 bp, Artificial Sequence
  Description of Artificial Sequence: Synthetic polynucleotide
atgcaccatcatcaccatcatggtggttctggttcgccgatacttggttattggaagattaaaggactggttcagcccacacgcctcctgctagaatacttagaggaaaaatatgaagagcacctgtacgaacgtgatgagggggacaaatggcgaaacaagaaatttgaattgggcttagaatttccaaatttgccgtattatatcgatggcgacgtaaaactgacccaatcaatggccattattcgctacatcgcagataaacataacatgctgggtggctgccctaaagaacgggctgagatctccatgctggaaggtgcggtgctcgacattcgctacggcgtcagtagaattgcgtatagcaaggatttcgaaactttaaaagtggatttcctgagcaaacttccggagatgctgaaaatgtttgaggataggctttgtcataagacgtatctcaatggtgatcatgttacccacccggactttatgctgtacgacgcccttgatgtcgttctgtatatggatcccatgtgcctggacgccttcccgaaattagtgtgttttaaaaaacgtatcgaagcgattccacagatcgataaatacttgaagtcttctaaatatattgcttggcctctgcaaggctggcaggcaacgttcggtgggggagatcatccgccaaaatcagatctggtgccgcgtgggagccctggcatacaccgcgacggtggttctggtgagaacctgtactttcaaagctcagataatgggcctcaaaaccagcgcaacgctccacgtataaccttcggtggcccgtctgactccacaggcagcaaccagaatggtgagcgtagtggagccaggtctaagcagcgccgtccccagggtctgccgaacaacacggcgagctggtttactgcgcttacccaacacggtaaagaagacttaaaattcccgcgtggccagggcgtcccgatcaacactaactcttccccggatgatcagattggttattaccgcagagcaactcgtcggattcgcggcggcgacggtaaaatgaaagatttgtctccgcgttggtacttttactatctcggcaccggtccggaagctggactgccctacggggcaaacaaggacgggatcatttgggtggctaccgaaggtgccctgaatactccaaaagatcatatcggcacccgtaaccctgctaataacgctgcgatcgttctgcaactgcctcagggtacaactctgccaaaaggcttctatgcagaagggtcgcgtggtggcagccaggcgagtagccgtagcagctcccgctctcgcaactcgtcccgtaactccactccgggctcttctcgcggcacgtccccggctcgtatggcaggtaacggtggtgacgctgctctggcgctgctactgctggacaggctgaaccagctggagtcgaagatgagtggtaaaggccaacagcagcagggccagaccgttaccaaaaagagcgcagctgaaatgtctaaaaaaccgcgacagaaacgtaccgcgactaaaggatgcaatgtaacacagtgtttcggtccccgaggtccggagcaaactcaaggaaactttggcgatgccgaattaaataagaaaggggtggactacaaacactggccgcaaattgcccagttcgccccatccgctagtgcattcttcggtatgagccgcatctcaagtaaagaaacgccaagtggtacgtggctgacctacaccggtgctatcaagcttgataaagatgacccgaactttaaagaccaggttattctgcttaacaaacatattgatgcctataaaactttcccgccgaccgaacccaaaaaggacaaaaagaaaaaagctgatgaaacccaggctctaccgcagcgtcagaaaaaacagcaaactgtgactctgctgccagctgcggacctggatgatttttccaagcagctgcaacagtctatgagctctgcggactctacgcaggcttaa

SEQ ID NO: 335 - DNA, 2016 bp, Artificial Sequence
  Description of Artificial Sequence: Synthetic polynucleotide
atgcaccatcatcaccatcatggtggttctggttcgccgatacttggttattggaagattaaaggactggttcagcccacacgcctcctgctagaatacttagaggaaaaatatgaagagcacctgtacgaacgtgatgagggggacaaatggcgaaacaagaaatttgaattgggcttagaatttccaaatttgccgtattatatcgatggcgacgtaaaactgacccaatcaatggccattattcgctacatcgcagataaacataacatgctgggtggctgccctaaagaacgggctgagatctccatgctggaaggtgcggtgctcgacattcgctacggcgtcagtagaattgcgtatagcaaggatttcgaaactttaaaagtggatttcctgagcaaacttccggagatgctgaaaatgtttgaggataggctttgtcataagacgtatctcaatggtgatcatgttacccacccggactttatgctgtacgacgcccttgatgtcgttctgtatatggatcccatgtgcctggacgccttcccgaaattagtgtgttttaaaaaacgtatcgaagcgattccacagatcgataaatacttgaagtcttctaaatatattgcttggcctctgcaaggctggcaggcaacgttcggtgggggagatcatccgccaaaatcagatctggtgccgcgtgggagccctggcatacaccgcgacggtggttctggtgagaacctgtactttcaaagctcagataatgggcctcaaaaccagcgcaacgctccacgtataaccttcggtggcccgtctgactccacaggcagcaaccagaatggtgagcgtagtggagccaggtctaagcagcgccgtccccagggtctgccgaacaacacggcgagctggtttactgcgcttacccaacacggtaaagaagacttaaaattcccgcgtggccagggcgtcccgatcaacactaactcttccccggatgatcagattggttattaccgcagagcaactcgtcggattcgcggcggcgacggtaaaatgaaagatttgtctccgaagtggtacttttactatctcggcaccggtccggaagctggactgccctacggggcaaacaaggacgggatcatttgggtggctaccgaaggtgccctgaatactccaaaagatcatatcggcacccgtaaccctgctaataacgctgcgatcgttctgcaactgcctcagggtacaactctgccaaaaggcttctatgcagaagggtcgcgtggtggcagccaggcgagtagccgtagcagctcccgctctcgcaactcgtcccgtaactccactccgggctcttctcgcggcacgtccccggctcgtatggcaggtaacggtggtgacgctgctctggcgctgctactgctggacaggctgaaccagctggagtcgaagatgagtggtaaaggccaacagcagcagggccagaccgttaccaaaaagagcgcagctgaagcatctaaaaaaccgcgacagaaacgtaccgcgactaaagcgtacaatgtaacacaggccttcggtcgtcgaggtccggagcaaactcaaggaaactttggcgatcaggaattaatccgccaggggaccgactacaaacactggccgcaaattgcccagttcgccccatccgctagtgcattcttcggtatgagccgcatcggcatggaagtaacgccaagtggtacgtggctgacctacaccggtgctatcaagcttgatgacaaggacccgaactttaaagaccaggttattctgcttaacaaacatattgatgcctataaaactttcccgccgaccgaacccaaaaaggacaaaaagaaaaaagctgatgaaacccaggctctaccgcagcgtcagaaaaaacagcaaactgtgactctgctgccagctgcggacctggatgatttttccaagcagctgcaacagtctatgagctctgcggactctacgcaggcttaa

SEQ ID NO: 336 - DNA, 2016 bp, Artificial Sequence
  Description of Artificial Sequence: Synthetic polynucleotide
atgcaccatcatcaccatcatggtggttctggttcgccgatacttggttattggaagattaaaggactggttcagcccacacgcctcctgctagaatacttagaggaaaaatatgaagagcacctgtacgaacgtgatgagggggacaaatggcgaaacaagaaatttgaattgggcttagaatttccaaatttgccgtattatatcgatggcgacgtaaaactgacccaatcaatggccattattcgctacatcgcagataaacataacatgctgggtggctgccctaaagaacgggctgagatctccatgctggaaggtgcggtgctcgacattcgctacggcgtcagtagaattgcgtatagcaaggatttcgaaactttaaaagtggatttcctgagcaaacttccggagatgctgaaaatgtttgaggataggctttgtcataagacgtatctcaatggtgatcatgttacccacccggactttatgctgtacgacgcccttgatgtcgttctgtatatggatcccatgtgcctggacgccttcccgaaattagtgtgttttaaaaaacgtatcgaagcgattccacagatcgataaatacttgaagtcttctaaatatattgcttggcctctgcaaggctggcaggcaacgttcggtgggggagatcatccgccaaaatcagatctggtgccgcgtgggagccctggcatacaccgcgacggtggttctggtgagaacctgtactttcaaagctcagataatgggcctcaaaaccagcgcaacgctccacgtataaccttcggtggcccgtctgactccacaggcagcaaccagaatggtgagcgtagtggagccaggtctaagcagcgccgtccccagggtctgccgaacaacacggcgagctggtttactgcgcttacccaacacggtaaagaagacttaaaattcccgcgtggccagggcgtcccgatcaacactaactcttccccggatgatcagattggttattaccgcagagcaactcgtcggattcgcggcggcgacggtaaaatgaaagatttgtctccgcgttggtacttttactatctcggcaccggtccggaagctggactgccctacggggcaaacaaggacgggatcatttgggtggctaccgaaggtgccctgaatactccaaaagatcatatcggcacccgtaaccctgctaataacgctgcgatcgttctgcaactgcctcagggtacaactctgccaaaaggcttctatgcagaagggtcgcgtggtggcagccaggcgagtagccgtagcagctcccgctctcgcaactcgtcccgtaactccactccgggctcttctcgcggcacgtccccggctcgtatggcaggtaacggtggtgacgctgctctggcgctgctactgctggacaggctgaaccagctggagtcgaagatgagtggtaaaggccaacagcagcagggccagaccgttaccaaaaagagcgcagctgaaatgtctaaaaaaccgcgacagaaacgtaccgcgactaaagaatgtaatgtaacacagtgcttcggtcctcgaggtccggagcaaactcaaggaaactttggcgatgcagaattaaataaaaagggggtcgactacaaacactggccgcaaattgcccagttcgccccatccgctagtgcattcttcggtatgagccgcatctcgagcaaggaaacgccaagtggtacgtggctgacctacaccggtgctatcaagcttgataaagatgacccgaactttaaagaccaggttattctgcttaacaaacatattgatgcctataaaactttcccgccgaccgaacccaaaaaggacaaaaagaaaaaagctgatgaaacccaggctctaccgcagcgtcagaaaaaacagcaaactgtgactctgctgccagctgcggacctggatgatttttccaagcagctgcaacagtctatgagctctgcggactctacgcaggcttaa

SEQ ID NO: 337 - DNA, 2016 bp, Artificial Sequence
  Description of Artificial Sequence: Synthetic polynucleotide
atgcaccatcatcaccatcatggtggttctggttcgccgatacttggttattggaagattaaaggactggttcagcccacacgcctcctgctagaatacttagaggaaaaatatgaagagcacctgtacgaacgtgatgagggggacaaatggcgaaacaagaaatttgaattgggcttagaatttccaaatttgccgtattatatcgatggcgacgtaaaactgacccaatcaatggccattattcgctacatcgcagataaacataacatgctgggtggctgccctaaagaacgggctgagatctccatgctggaaggtgcggtgctcgacattcgctacggcgtcagtagaattgcgtatagcaaggatttcgaaactttaaaagtggatttcctgagcaaacttccggagatgctgaaaatgtttgaggataggctttgtcataagacgtatctcaatggtgatcatgttacccacccggactttatgctgtacgacgcccttgatgtcgttctgtatatggatcccatgtgcctggacgccttcccgaaattagtgtgttttaaaaaacgtatcgaagcgattccacagatcgataaatacttgaagtcttctaaatatattgcttggcctctgcaaggctggcaggcaacgttcggtgggggagatcatccgccaaaatcagatctggtgccgcgtgggagccctggcatacaccgcgacggtggttctggtgagaacctgtactttcaaagctcagataatgggcctcaaaaccagcgcaacgctccacgtataaccttcggtggcccgtctgactccacaggcagcaaccagaatggtgagcgtagtggagccaggtctaagcagcgccgtccccagggtctgccgaacaacacggcgagctggtttactgcgcttacccaacacggtaaagaagacttaaaattcccgcgtggccagggcgtcccgatcaacactaactcttccccggatgatcagattggttattaccgcagagcaactcgtcggattcgcggcggcgacggtaaaatgaaagatttgtctccgcgttggtacttttactatctcggcaccggtccggaagctggactgccctacggggcaaacaaggacgggatcatttgggtggctaccgaaggtgccctgaatactccaaaagatcatatcggcacccgtaaccctgctaataacgctgcgatcgttaatcaactgcctcagggtacaactctgccaaaaggcttctatgcagaagggtcgcgtggtggcagccaggcgagtagccgtagcagctcccgctctcgcaactcgtcccgtaactccactccgggctcttctcgcggcacgtccccggctcgtatggcaggtaacggtggtgacgctgctctggcgctgctactgctggacaggctgaaccagctggagtcgaagatgagtggtaaaggccaacagcagcagggccagaccgttaccaaaaagagcgcagctgaagcatctaaaaaaccgcgacagaaacgtaccgcgactaaagcgtacaatgtaacacaggccttcggtcgtcgaggtccggagcaaactcaaggaaactttggcgatcaggaattaatccgccaggggaccgactacaaacactggccgcaaattgcccagttcgccccatccgctagtgcattcttcggtatgagccgcatcggcatggaagtaacgccaagtggtacgtggctgacctacaccggtgctatcaagcttgatgacaaggacccgaactttaaagaccaggttattctgcttaacaaacatattgatgcctataaaactttcccgccgaccgaacccaaaaaggacaaaaagaaaaaagctgatgaaacccaggctctaccgcagcgtcagaaaaaacagcaaactgtgactctgctgccagctgcggacctggatgatttttccaagcagctgcaacagtctatgagctctgcggactctacgcaggcttaa

SEQ ID NO: 338 - DNA, 2016 bp, Artificial Sequence
  Description of Artificial Sequence: Synthetic polynucleotide
atgcaccatcatcaccatcatggtggttctggttcgccgatacttggttattggaagattaaaggactggttcagcccacacgcctcctgctagaatacttagaggaaaaatatgaagagcacctgtacgaacgtgatgagggggacaaatggcgaaacaagaaatttgaattgggcttagaatttccaaatttgccgtattatatcgatggcgacgtaaaactgacccaatcaatggccattattcgctacatcgcagataaacataacatgctgggtggctgccctaaagaacgggctgagatctccatgctggaaggtgcggtgctcgacattcgctacggcgtcagtagaattgcgtatagcaaggatttcgaaactttaaaagtggatttcctgagcaaacttccggagatgctgaaaatgtttgaggataggctttgtcataagacgtatctcaatggtgatcatgttacccacccggactttatgctgtacgacgcccttgatgtcgttctgtatatggatcccatgtgcctggacgccttcccgaaattagtgtgttttaaaaaacgtatcgaagcgattccacagatcgataaatacttgaagtcttctaaatatattgcttggcctctgcaaggctggcaggcaacgttcggtgggggagatcatccgccaaaatcagatctggtgccgcgtgggagccctggcatacaccgcgacggtggttctggtgagaacctgtactttcaaagctcagataatgggcctcaaaaccagcgcaacgctccacgtataaccttcggtggcccgtctgactccacaggcagcaaccagaatggtgagcgtagtggagccaggtctaagcagcgccgtccccagggtctgccgaacaacacggcgagctggtttactccgcttacccaatttggtaaagaagacttaaaattcccgccaggccagggcgtcccgatcaacactaactcttccccggatgatcagattggttattaccgcagagcaactcgtcggattcgcggcggcgacggtaaaatgaaagatttgcctccgaaatggtacttttactatctcggcaccggtccgcacgctgatctgccctacgggcaaaagcaagacggggttgtatgggtggctcgaccaggtgccctgaatactccaaaagatcatatcggcacccgtaaccctgctaataacgctgcgatcccgctgcaactgcctccgggtacaaaactgccaaaaggcttctatgcagaagggtcgcgtggtggcagccaggcgagtagccgtagcagctcccgctctcgcaactcgtcccgtaactccactccgggctcttctcgcggcacgtccccggctcgtatggcaggtaacggtggtgacgctgctctggcgctgctactgctggacaggctgaaccagctggagtcgaagatgagtggtaaaggccaacagcagcagggccagaccgttaccaaaaagagcgcagctgaagcatctaaaaaaccgcgacagaaacgtaccgcgactaaagcgtacaatgtaacacaggccttcggtcgtcgaggtccggagcaaactcaaggaaactttggcgatcaggaattaatccgccaggggaccgactacaaacactggccgcaaattgcccagttcgccccatccgctagtgcattcttcggtatgagccgcatcggcatggaagtaacgccaagtggtacgtggctgacctacaccggtgctatcaagcttgatgacaaggacccgaactttaaagaccaggttattctgcttaacaaacatattgatgcctataaaactttcccgccgaccgaacccaaaaaggacaaaaagaaaaaagctgatgaaacccaggctctaccgcagcgtcagaaaaaacagcaaactgtgactctgctgccagctgcggacctggatgatttttccaagcagctgcaacagtctatgagctctgcggactctacgcaggcttaa

SEQ ID NO: 339 - DNA, 2016 bp, Artificial Sequence
  Description of Artificial Sequence: Synthetic polynucleotide
atgcaccatcatcaccatcatggtggttctggttcgccgatacttggttattggaagattaaaggactggttcagcccacacgcctcctgctagaatacttagaggaaaaatatgaagagcacctgtacgaacgtgatgagggggacaaatggcgaaacaagaaatttgaattgggcttagaatttccaaatttgccgtattatatcgatggcgacgtaaaactgacccaatcaatggccattattcgctacatcgcagataaacataacatgctgggtggctgccctaaagaacgggctgagatctccatgctggaaggtgcggtgctcgacattcgctacggcgtcagtagaattgcgtatagcaaggatttcgaaactttaaaagtggatttcctgagcaaacttccggagatgctgaaaatgtttgaggataggctttgtcataagacgtatctcaatggtgatcatgttacccacccggactttatgctgtacgacgcccttgatgtcgttctgtatatggatcccatgtgcctggacgccttcccgaaattagtgtgttttaaaaaacgtatcgaagcgattccacagatcgataaatacttgaagtcttctaaatatattgcttggcctctgcaaggctggcaggcaacgttcggtgggggagatcatccgccaaaatcagatctggtgccgcgtgggagccctggcatacaccgcgacggtggttctggtgagaacctgtactttcaaagctcagataatgggcctcaaaaccagcgcaacgctccacgtataaccttcggtggcccgtctgactccacaggcagcaaccagaatggtgagcgtagtggagccaggtctaagcagcgccgtccccagggtctgccgaacaacacggcgagctggtttactgcgcttacccaacacggtaaagaagacttaaaattcccgcgtggccagggcgtcccgatcaacactaactcttccccggatgatcagattggttattaccgcagagcaactcgtcggattcgcggcggcgacggtaaaatgaaagatttgtctccgcgttggtacttttactatctcggcaccggtccggaagctggactgccctacggggcaaacaaggacgggatcatttgggtggctaccgaaggtgccctgaatactccaaaagatcatatcggcacccgtaaccctgctaataacgctgcgatccaactgcaactgcctcagggtacaactctgccaaaaggcttctatgcagaagggtcgcgtggtggcagccaggcgagtagccgtagcagctcccgctctcgcaactcgtcccgtaactccactccgggctcttctcgcggcacgtccccggctcgtatggcaggtaacggtggtgacgctgctctggcgctgctactgctggacaggctgaaccagctggagtcgaagatgagtggtaaaggccaacagcagcagggccagaccgttaccaaaaagagcgcagctgaagcatctaaaaaaccgcgacagaaacgtaccgcgactaaagcgtacaatgtaacacaggccttcggtcgtcgaggtccggagcaaactcaaggaaactttggcgatcaggaattaatccgccaggggaccgactacaaacactggccgcaaattgcccagttcgccccatccgctagtgcattcttcggtatgagccgcatcggcatggaagtaacgccaagtggtacgtggctgacctacaccggtgctatcaagcttgatgacaaggacccgaactttaaagaccaggttattctgcttaacaaacatattgatgcctataaaactttcccgccgaccgaacccaaaaaggacaaaaagaaaaaagctgatgaaacccaggctctaccgcagcgtcagaaaaaacagcaaactgtgactctgctgccagctgcggacctggatgatttttccaagcagctgcaacagtctatgagctctgcggactctacgcaggcttaa

SEQ ID NO: 340 - DNA, 2016 bp, Artificial Sequence
  Description of Artificial Sequence: Synthetic polynucleotide
atgcaccatcatcaccatcatggtggttctggttcgccgatacttggttattggaagattaaaggactggttcagcccacacgcctcctgctagaatacttagaggaaaaatatgaagagcacctgtacgaacgtgatgagggggacaaatggcgaaacaagaaatttgaattgggcttagaatttccaaatttgccgtattatatcgatggcgacgtaaaactgacccaatcaatggccattattcgctacatcgcagataaacataacatgctgggtggctgccctaaagaacgggctgagatctccatgctggaaggtgcggtgctcgacattcgctacggcgtcagtagaattgcgtatagcaaggatttcgaaactttaaaagtggatttcctgagcaaacttccggagatgctgaaaatgtttgaggataggctttgtcataagacgtatctcaatggtgatcatgttacccacccggactttatgctgtacgacgcccttgatgtcgttctgtatatggatcccatgtgcctggacgccttcccgaaattagtgtgttttaaaaaacgtatcgaagcgattccacagatcgataaatacttgaagtcttctaaatatattgcttggcctctgcaaggctggcaggcaacgttcggtgggggagatcatccgccaaaatcagatctggtgccgcgtgggagccctggcatacaccgcgacggtggttctggtgagaacctgtactttcaaagctcagataatgggcctcaaaaccagcgcaacgctccacgtataaccttcggtggcccgtctgactccacaggcagcaaccagaatggtgagcgtagtggagccaggtctaagcagcgccgtccccagggtctgccgaacaacacggcgagctggtttactgcgcttacccaacacggtaaagaagacttaaaattcccgcgtggccagggcgtcccgatcaacactaactcttccccggatgatcagattggttattaccgcagagcaactcgtcggattcgcggcggcgacggtaaaatgaaagatttgtctccgcgttggtacttttactatctcggcaccggtccggaagctggactgccctacggggcaaacaaggacgggatcatttgggtggctaccgaaggtgccctgaatactccaaaagatcatatcggcacccgtaaccctgctaataacgctgcgatcgttctgcaactgcctcagggtacaactctgccaaaaggcttctatgcagaagggtcgcgtggtggcagccaggcgagtagccgtagcagctcccgctctcgcaactcgtcccgtaactccactccgggctcttctcgcggcacgtccccggctcgtatggcaggtaacggtggtgacgctgctctggcgctgctactgctggacaggctgaaccagctggagtcgaagatgagtggtaaaggccaacagcagcagggccagaccgttaccaaaaagagcgcagctgaagcatctaaaaaaccgcgacagaaacgtaccgcgactaaagcgtacaatgtaacacaggccttcggtcgtcgaggtccggagcaaactcaaggaaactttggcgatcaggaattaatccgccaggggaccgactacaaacactggccgcaaattgcccagttcgccccatccgctagtgcattcttcggtatgagccgcatcaagatggaagtaacgccaagtggtacgtggctgacctacaccggtgctatcaagcttgatgacaaggacccgaactttaaagaccaggttattctgcttaacaaacatattgatgcctataaaactttcccgccgaccgaacccaaaaaggacaaaaagaaaaaagctgatgaaacccaggctctaccgcagcgtcagaaaaaacagcaaactgtgactctgctgccagctgcggacctggatgatttttccaagcagctgcaacagtctatgagctctgcggactctacgcaggcttaa

SEQ ID NO: 341 - DNA, 2016 bp, Artificial Sequence
  Description of Artificial Sequence: Synthetic polynucleotide
atgcaccatcatcaccatcatggtggttctggttcgccgatacttggttattggaagattaaaggactggttcagcccacacgcctcctgctagaatacttagaggaaaaatatgaagagcacctgtacgaacgtgatgagggggacaaatggcgaaacaagaaatttgaattgggcttagaatttccaaatttgccgtattatatcgatggcgacgtaaaactgacccaatcaatggccattattcgctacatcgcagataaacataacatgctgggtggctgccctaaagaacgggctgagatctccatgctggaaggtgcggtgctcgacattcgctacggcgtcagtagaattgcgtatagcaaggatttcgaaactttaaaagtggatttcctgagcaaacttccggagatgctgaaaatgtttgaggataggctttgtcataagacgtatctcaatggtgatcatgttacccacccggactttatgctgtacgacgcccttgatgtcgttctgtatatggatcccatgtgcctggacgccttcccgaaattagtgtgttttaaaaaacgtatcgaagcgattccacagatcgataaatacttgaagtcttctaaatatattgcttggcctctgcaaggctggcaggcaacgttcggtgggggagatcatccgccaaaatcagatctggtgccgcgtgggagccctggcatacaccgcgacggtggttctggtgagaacctgtactttcaaagctcagataatgggcctcaaaaccagcgcaacgctccacgtataaccttcggtggcccgtctgactccacaggcagcaaccagaatggtgagcgtagtggagccaggtctaagcagcgccgtccccagggtctgccgaacaacacggcgagctggtttactgcgcttacccaacacggtaaagaagacttaaaattcccgcgtggccagggcgtcccgatcaacactaactcttccccggatgatcagattggttattaccgcagagcaactcgtcggattcgcggcggcgacggtaaaatgaaagatttgtctccgcgttggtacttttactatctcggcaccggtccggaagctggactgccctacggggcaaacaaggacgggatcatttgggtggctaccgaaggtgccctgaatactccaaaagatcatatcggcacccgtaaccctgctaataacgctgcgatcgttctgcaactgcctcagggtacaactctgccaaaaggcttctatgcagaagggtcgcgtggtggcagccaggcgagtagccgtagcagctcccgctctcgcaactcgtcccgtaactccactccgggctcttctcgcggcacgtccccggctcgtatggcaggtaacggtggtgacgctgctctggcgctgctactgctggacaggctgaaccagctggagtcgaagatgagtggtaaaggccaacagcagcagggccagaccgttaccaaaaagagcgcagctgaagcatctaaaaaaccgcgacagaaacgtaccgcgactaaagcgtacaatgtaacacaggccttcggtcgtcgaggtccggagcaaactcaaggaaactttggcgatcaggaattaatccgccaggggaccgactacaaacactggccgcaaattgcccagttcgccccatccacgagtgcattcttcggtatgagccgcatcggcatggaagtaacgccaagtggtacgtggctgacctacaccggtgctatcaagcttgatgacaaggacccgaactttaaagaccaggttattctgcttaacaaacatattgatgcctataaaactttcccgccgaccgaacccaaaaaggacaaaaagaaaaaagctgatgaaacccaggctctaccgcagcgtcagaaaaaacagcaaactgtgactctgctgccagctgcggacctggatgatttttccaagcagctgcaacagtctatgagctctgcggactctacgcaggcttaa

SEQ ID NO: 342 - DNA, 2016 bp, Artificial Sequence
  Description of Artificial Sequence: Synthetic polynucleotide
atgcaccatcatcaccatcatggtggttctggttcgccgatacttggttattggaagattaaaggactggttcagcccacacgcctcctgctagaatacttagaggaaaaatatgaagagcacctgtacgaacgtgatgagggggacaaatggcgaaacaagaaatttgaattgggcttagaatttccaaatttgccgtattatatcgatggcgacgtaaaactgacccaatcaatggccattattcgctacatcgcagataaacataacatgctgggtggctgccctaaagaacgggctgagatctccatgctggaaggtgcggtgctcgacattcgctacggcgtcagtagaattgcgtatagcaaggatttcgaaactttaaaagtggatttcctgagcaaacttccggagatgctgaaaatgtttgaggataggctttgtcataagacgtatctcaatggtgatcatgttacccacccggactttatgctgtacgacgcccttgatgtcgttctgtatatggatcccatgtgcctggacgccttcccgaaattagtgtgttttaaaaaacgtatcgaagcgattccacagatcgataaatacttgaagtcttctaaatatattgcttggcctctgcaaggctggcaggcaacgttcggtgggggagatcatccgccaaaatcagatctggtgccgcgtgggagccctggcatacaccgcgacggtggttctggtgagaacctgtactttcaaagctcagataatgggcctcaaaaccagcgcaacgctccacgtataaccttcggtggcccgtctgactccacaggcagcaaccagaatggtgagcgtagtggagccaggtctaagcagcgccgtccccagggtctgccgaacaacacggcgagctggtttactgcgcttacccaacacggtaaagaagacttaaaattcccgcgtggccagggcgtcccgatcaacactaactcttccccggatgatcagattggttattaccgcagagcaactcgtcggattcgcggcggcgacggtaaaatgaaagatttgtctccgcgttggtacttttactatctcggcaccggtccggaagctggactgccctacggggcaaacaaggacgggatcatttgggtggctaccgaaggtgccctgaatactccaaaagatcatatcggcacccgtaaccctgctaataacgctgcgatcgttctgcaactgcctcagggtacaactctgccaaaaggcttctatgcagaagggtcgcgtggtggcagccaggcgagtagccgtagcagctcccgctctcgcaactcgtcccgtaactccactccgggctcttctcgcggcacgtccccggctcgtatggcaggtaacggtggtgacgctgctctggcgctgctactgctggacaggctgaaccagctggagtcgaagatgagtggtaaaggccaacagcagcagggccagaccgttaccaaaaagagcgcagctgaagcatctaaaaaaccgcgacagaaacgtaccgcgactaaagcgtacaatgtaacacaggccttcggtcgtcgaggtccggagcaaactcaaggaaactttggcgatcaggaattaatccgccaggggaccgactacaaacactggccgcaaattgcccagttcgccccatccgctagtgcattcttcggtatgagccgcatcggcgtcgaagtaacgccaagtggtacgtggctgacctacaccggtgctatcaagcttgatgacaaggacccgaactttaaagaccaggttattctgcttaacaaacatattgatgcctataaaactttcccgccgaccgaacccaaaaaggacaaaaagaaaaaagctgatgaaacccaggctctaccgcagcgtcagaaaaaacagcaaactgtgactctgctgccagctgcggacctggatgatttttccaagcagctgcaacagtctatgagctctgcggactctacgcaggcttaa

SEQ ID NO: 343 - DNA, 2016 bp, Artificial Sequence
  Description of Artificial Sequence: Synthetic polynucleotide
atgcaccatcatcaccatcatggtggttctggttcgccgatacttggttattggaagattaaaggactggttcagcccacacgcctcctgctagaatacttagaggaaaaatatgaagagcacctgtacgaacgtgatgagggggacaaatggcgaaacaagaaatttgaattgggcttagaatttccaaatttgccgtattatatcgatggcgacgtaaaactgacccaatcaatggccattattcgctacatcgcagataaacataacatgctgggtggctgccctaaagaacgggctgagatctccatgctggaaggtgcggtgctcgacattcgctacggcgtcagtagaattgcgtatagcaaggatttcgaaactttaaaagtggatttcctgagcaaacttccggagatgctgaaaatgtttgaggataggctttgtcataagacgtatctcaatggtgatcatgttacccacccggactttatgctgtacgacgcccttgatgtcgttctgtatatggatcccatgtgcctggacgccttcccgaaattagtgtgttttaaaaaacgtatcgaagcgattccacagatcgataaatacttgaagtcttctaaatatattgcttggcctctgcaaggctggcaggcaacgttcggtgggggagatcatccgccaaaatcagatctggtgccgcgtgggagccctggcatacaccgcgacggtggttctggtgagaacctgtactttcaaagctcagataatgggcctcaaaaccagcgcaacgctccacgtataaccttcggtggcccgtctgactccacaggcagcaaccagaatggtgagcgtagtggagccaggtctaagcagcgccgtccccagggtctgccgaacaacacggcgagctggtttactgcgcttacccaacacggtaaagaagacttaaaattcccgcgtggccagggcgtcccgatcaacactaactcttccccggatgatcagattggttattaccgcagagcaactcgtcggattcgcggcggcgacggtaaaatgaaagatttgtctccgcgttggtacttttactatctcggcaccggtccggaagctggactgccctacggggcaaacaaggacgggatcatttgggtggctaccgaaggtgccctgaatactccaaaagatcatatcggcacccgtaaccctgctaataacgctgcgatcgttctgcaactgcctcagggtacaactctgccaaaaggcttctatgcagaagggtcgcgtggtggcagccaggcgagtagccgtagcagctcccgctctcgcaactcgtcccgtaactccactccgggctcttctcgcggcacgtccccggctcgtatggcaggtaacggtggtgacgctgctctggcgctgctactgctggacaggctgaaccagctggagtcgaagatgagtggtaaaggccaacagcagcagggccagaccgttaccaaaaagagcgcagctgaagcatctaaaaaaccgcgacagaaacgtaccgcgactaaagcgtacaatgtaacacaggccttcggtcgtcgaggtccggagcaaactcaaggaaactttggcgatcagaagttaatccgccaggggaccgactacaaacactggccgcaaattgcccagttcgccccatccgctagtgcattcttcggtatgagccgcatcggcatggaagtaacgccaagtggtacgtggctgacctacaccggtgctatcaagcttgatgacaaggacccgaactttaaagaccaggttattctgcttaacaaacatattgatgcctataaaactttcccgccgaccgaacccaaaaaggacaaaaagaaaaaagctgatgaaacccaggctctaccgcagcgtcagaaaaaacagcaaactgtgactctgctgccagctgcggacctggatgatttttccaagcagctgcaacagtctatgagctctgcggactctacgcaggcttaa

SEQ ID NO: 344 - DNA, 2016 bp, Artificial Sequence
  Description of Artificial Sequence: Synthetic polynucleotide
atgcaccatcatcaccatcatggtggttctggttcgccgatacttggttattggaagattaaaggactggttcagcccacacgcctcctgctagaatacttagaggaaaaatatgaagagcacctgtacgaacgtgatgagggggacaaatggcgaaacaagaaatttgaattgggcttagaatttccaaatttgccgtattatatcgatggcgacgtaaaactgacccaatcaatggccattattcgctacatcgcagataaacataacatgctgggtggctgccctaaagaacgggctgagatctccatgctggaaggtgcggtgctcgacattcgctacggcgtcagtagaattgcgtatagcaaggatttcgaaactttaaaagtggatttcctgagcaaacttccggagatgctgaaaatgtttgaggataggctttgtcataagacgtatctcaatggtgatcatgttacccacccggactttatgctgtacgacgcccttgatgtcgttctgtatatggatcccatgtgcctggacgccttcccgaaattagtgtgttttaaaaaacgtatcgaagcgattccacagatcgataaatacttgaagtcttctaaatatattgcttggcctctgcaaggctggcaggcaacgttcggtgggggagatcatccgccaaaatcagatctggtgccgcgtgggagccctggcatacaccgcgacggtggttctggtgagaacctgtactttcaaagctcagataatgggcctcaaaaccagcgcaacgctccacgtataaccttcggtggcccgtctgactccacaggcagcaaccagaatggtgagcgtagtggagccaggtctaagcagcgccgtccccagggtctgccgaacaacacggcgagctggtttactgcgcttacccaacacggtaaagaagacttaaaattcccgcgtggccagggcgtcccgatcaacactaactcttccccggatgatcagattggttattaccgcagagcaactcgtcggattcgcggcggcgacggtaaaatgaaagatttgtctccgcgttggtacttttactatctcggcaccggtccggaagctggactgccctacggggcaaacaaggacgggatcatttgggtggctaccgaaggtgccctgaatactccaaaagatcatatcggcacccgtaaccctgctaataacgctgcgatcgttctgcaactgcctcagggtacaactctgccaaaaggcttctatgcagaagggtcgcgtggtggcagccaggcgagtagccgtagcagctcccgctctcgcaactcgtcccgtaactccactccgggctcttctcgcggcacgtccccggctcgtatggcaggtaacggtggtgacgctgctctggcgctgctactgctggacaggctgaaccagctggagtcgaagatgagtggtaaaggccaacagcagcagggccagaccgttaccaaaaagagcgcagctgaagcatctaaaaaaccgcgacagaaacgtaccgcgactaaagcgtacaatgtaacacaggccttcggtcgtcgaggtccggagcaaactcaaggaaactttggcgatcaggaattaatccgccaggggaccgactacaaacactggccgcaaattgcccagttcgccccatccgctagtgcattcttcggtatgagccgcatcggcatggaatcgacgccaagtggtacgtggctgacctacaccggtgctatcaagcttgatgacaaggacccgaactttaaagaccaggttattctgcttaacaaacatattgatgcctataaaactttcccgccgaccgaacccaaaaaggacaaaaagaaaaaagctgatgaaacccaggctctaccgcagcgtcagaaaaaacagcaaactgtgactctgctgccagctgcggacctggatgatttttccaagcagctgcaacagtctatgagctctgcggactctacgcaggcttaa

SEQ ID NO: 345 - DNA, 2016 bp, Artificial Sequence
  Description of Artificial Sequence: Synthetic polynucleotide
atgcaccatcatcaccatcatggtggttctggttcgccgatacttggttattggaagattaaaggactggttcagcccacacgcctcctgctagaatacttagaggaaaaatatgaagagcacctgtacgaacgtgatgagggggacaaatggcgaaacaagaaatttgaattgggcttagaatttccaaatttgccgtattatatcgatggcgacgtaaaactgacccaatcaatggccattattcgctacatcgcagataaacataacatgctgggtggctgccctaaagaacgggctgagatctccatgctggaaggtgcggtgctcgacattcgctacggcgtcagtagaattgcgtatagcaaggatttcgaaactttaaaagtggatttcctgagcaaacttccggagatgctgaaaatgtttgaggataggctttgtcataagacgtatctcaatggtgatcatgttacccacccggactttatgctgtacgacgcccttgatgtcgttctgtatatggatcccatgtgcctggacgccttcccgaaattagtgtgttttaaaaaacgtatcgaagcgattccacagatcgataaatacttgaagtcttctaaatatattgcttggcctctgcaaggctggcaggcaacgttcggtgggggagatcatccgccaaaatcagatctggtgccgcgtgggagccctggcatacaccgcgacggtggttctggtgagaacctgtactttcaaagctcagataatgggcctcaaaaccagcgcaacgctccacgtataaccttcggtggcccgtctgactccacaggcagcaaccagaatggtgagcgtagtggagccaggtctaagcagcgccgtccccagggtctgccgaacaacacggcgagctggtttactgcgcttacccaacacggtaaagaagacttaaaattcccgcgtggccagggcgtcccgatcaacactaactcttccccggatgatcagattggttattaccgcagagcaactcgtcggattcgcggcggcgacggtaaaatgaaagatttgtctccgcgttggtacttttactatctcggcaccggtccggaagctggactgccctacggggcaaacaaggacgggatcatttgggtggctaccgaaggtgccctgaatactccaaaagatcatatcggcacccgtaaccctgctaataacgctgcgatcgttctgcaactgcctcagggtacaactctgccaaaaggcttctatgcagaagggtcgcgtggtggcagccaggcgagtagccgtagcagctcccgctctcgcaactcgtcccgtaactccactccgggctcttctcgcggcacgtccccggctcgtatggcaggtaacggtggtgacgctgctctggcgctgctactgctggacaggctgaaccagctggagtcgaagatgagtggtaaaggccaacagcagcagggccagaccgttaccaaaaagagcgcagctgaaatgtctaaaaaaccgcgacagaaacgtaccgcgactaaaggctgcaatgtaacacagtgtttcggtccacgaggtccggagcaaactcaaggaaactttggcgatgcggatttaaataagaaagggaccgactacaaacactggccgcaaattgcccagttcgccccatccgctagtgcattcttcggtatgagccgcatctcgtcgaaagaaacgccaagtggtacgtggctgacctacaccggtgctatcaagcttgataaagatgacccgaactttaaagaccaggttattctgcttaacaaacatattgatgcctataaaactttcccgccgaccgaacccaaaaaggacaaaaagaaaaaagctgatgaaacccaggctctaccgcagcgtcagaaaaaacagcaaactgtgactctgctgccagctgcggacctggatgatttttccaagcagctgcaacagtctatgagctctgcggactctacgcaggcttaa

SEQ ID NO: 346 - DNA, 2016 bp, Artificial Sequence
  Description of Artificial Sequence: Synthetic polynucleotide
atgcaccatcatcaccatcatggtggttctggttcgccgatacttggttattggaagattaaaggactggttcagcccacacgcctcctgctagaatacttagaggaaaaatatgaagagcacctgtacgaacgtgatgagggggacaaatggcgaaacaagaaatttgaattgggcttagaatttccaaatttgccgtattatatcgatggcgacgtaaaactgacccaatcaatggccattattcgctacatcgcagataaacataacatgctgggtggctgccctaaagaacgggctgagatctccatgctggaaggtgcggtgctcgacattcgctacggcgtcagtagaattgcgtatagcaaggatttcgaaactttaaaagtggatttcctgagcaaacttccggagatgctgaaaatgtttgaggataggctttgtcataagacgtatctcaatggtgatcatgttacccacccggactttatgctgtacgacgcccttgatgtcgttctgtatatggatcccatgtgcctggacgccttcccgaaattagtgtgttttaaaaaacgtatcgaagcgattccacagatcgataaatacttgaagtcttctaaatatattgcttggcctctgcaaggctggcaggcaacgttcggtgggggagatcatccgccaaaatcagatctggtgccgcgtgggagccctggcatacaccgcgacggtggttctggtgagaacctgtactttcaaagctcagataatgggcctcaaaaccagcgcaacgctccacgtataaccttcggtggcccgtctgactccacaggcagcaaccagaatggtgagcgtagtggagccaggtctaagcagcgccgtccccagggtctgccgaacaacacggcgagctggtttactgcgcttacccaacacggtaaagaagacttaaaattcccgcgtggccagggcgtcccgatcaacactaactcttccccggatgatcagattggttattaccgcagagcaactcgtcggattcgcggcggcgacggtaaaatgaaagatttgtctccgcgttggtacttttactatctcggcaccggtccgcatgctggactgccctacggggcaaacaaggacgggatcatttgggtggctaccgaaggtgccctgaatactccaaaagatcatatcggcacccgtaaccctgctaataacgctgcgatcgttctgcaactgcctcagggtacaactctgccaaaaggcttctatgcagaagggtcgcgtggtggcagccaggcgagtagccgtagcagctcccgctctcgcaactcgtcccgtaactccactccgggctcttctcgcggcacgtccccggctcgtatggcaggtaacggtggtgacgctgctctggcgctgctactgctggacaggctgaaccagctggagtcgaagatgagtggtaaaggccaacagcagcagggccagaccgttaccaaaaagagcgcagctgaagcatctaaaaaaccgcgacagaaacgtaccgcgactaaagcgtacaatgtaacacaggccttcggtcgtcgaggtccggagcaaactcaaggaaactttggcgatcaggaattaatccgccaggggaccgactacaaacactggccgcaaattgcccagttcgccccatccgctagtgcattcttcggtatgagccgcatcggcatggaagtaacgccaagtggtacgtggctgacctacaccggtgctatcaagcttgatgacaaggacccgaactttaaagaccaggttattctgcttaacaaacatattgatgcctataaaactttcccgccgaccgaacccaaaaaggacaaaaagaaaaaagctgatgaaacccaggctctaccgcagcgtcagaaaaaacagcaaactgtgactctgctgccagctgcggacctggatgatttttccaagcagctgcaacagtctatgagctctgcggactctacgcaggcttaa

SEQ ID NO: 347 - DNA, 2016 bp, Artificial Sequence
  Description of Artificial Sequence: Synthetic polynucleotide
atgcaccatcatcaccatcatggtggttctggttcgccgatacttggttattggaagattaaaggactggttcagcccacacgcctcctgctagaatacttagaggaaaaatatgaagagcacctgtacgaacgtgatgagggggacaaatggcgaaacaagaaatttgaattgggcttagaatttccaaatttgccgtattatatcgatggcgacgtaaaactgacccaatcaatggccattattcgctacatcgcagataaacataacatgctgggtggctgccctaaagaacgggctgagatctccatgctggaaggtgcggtgctcgacattcgctacggcgtcagtagaattgcgtatagcaaggatttcgaaactttaaaagtggatttcctgagcaaacttccggagatgctgaaaatgtttgaggataggctttgtcataagacgtatctcaatggtgatcatgttacccacccggactttatgctgtacgacgcccttgatgtcgttctgtatatggatcccatgtgcctggacgccttcccgaaattagtgtgttttaaaaaacgtatcgaagcgattccacagatcgataaatacttgaagtcttctaaatatattgcttggcctctgcaaggctggcaggcaacgttcggtgggggagatcatccgccaaaatcagatctggtgccgcgtgggagccctggcatacaccgcgacggtggttctggtgagaacctgtactttcaaagctcagataatgggcctcaaaaccagcgcaacgctccacgtataaccttcggtggcccgtctgactccacaggcagcaaccagaatggtgagcgtagtggagccaggtctaagcagcgccgtccccagggtctgccgaacaacacggcgagctggtttactgcgcttacccaacacggtaaagaagacttaaaattcccgcgtggccagggcgtcccgatcaacactaactcttccccggatgatcagattggttattaccgcagagcaactcgtcggattcgcggcggcgacggtaaaatgaaagatttgtctccgcgttggtacttttactatctcggcaccggtccggaagctggactgccctacggggcaaacatggacgggatcatttgggtggctaccgaaggtgccctgaatactccaaaagatcatatcggcacccgtaaccctgctaataacgctgcgatcgttctgcaactgcctcagggtacaactctgccaaaaggcttctatgcagaagggtcgcgtggtggcagccaggcgagtagccgtagcagctcccgctctcgcaactcgtcccgtaactccactccgggctcttctcgcggcacgtccccggctcgtatggcaggtaacggtggtgacgctgctctggcgctgctactgctggacaggctgaaccagctggagtcgaagatgagtggtaaaggccaacagcagcagggccagaccgttaccaaaaagagcgcagctgaagcatctaaaaaaccgcgacagaaacgtaccgcgactaaagcgtacaatgtaacacaggccttcggtcgtcgaggtccggagcaaactcaaggaaactttggcgatcaggaattaatccgccaggggaccgactacaaacactggccgcaaattgcccagttcgccccatccgctagtgcattcttcggtatgagccgcatcggcatggaagtaacgccaagtggtacgtggctgacctacaccggtgctatcaagcttgatgacaaggacccgaactttaaagaccaggttattctgcttaacaaacatattgatgcctataaaactttcccgccgaccgaacccaaaaaggacaaaaagaaaaaagctgatgaaacccaggctctaccgcagcgtcagaaaaaacagcaaactgtgactctgctgccagctgcggacctggatgatttttccaagcagctgcaacagtctatgagctctgcggactctacgcaggcttaa

SEQ ID NO: 348 - DNA, 2016 bp, Artificial Sequence
  Description of Artificial Sequence: Synthetic polynucleotide
atgcaccatcatcaccatcatggtggttctggttcgccgatacttggttattggaagattaaaggactggttcagcccacacgcctcctgctagaatacttagaggaaaaatatgaagagcacctgtacgaacgtgatgagggggacaaatggcgaaacaagaaatttgaattgggcttagaatttccaaatttgccgtattatatcgatggcgacgtaaaactgacccaatcaatggccattattcgctacatcgcagataaacataacatgctgggtggctgccctaaagaacgggctgagatctccatgctggaaggtgcggtgctcgacattcgctacggcgtcagtagaattgcgtatagcaaggatttcgaaactttaaaagtggatttcctgagcaaacttccggagatgctgaaaatgtttgaggataggctttgtcataagacgtatctcaatggtgatcatgttacccacccggactttatgctgtacgacgcccttgatgtcgttctgtatatggatcccatgtgcctggacgccttcccgaaattagtgtgttttaaaaaacgtatcgaagcgattccacagatcgataaatacttgaagtcttctaaatatattgcttggcctctgcaaggctggcaggcaacgttcggtgggggagatcatccgccaaaatcagatctggtgccgcgtgggagccctggcatacaccgcgacggtggttctggtgagaacctgtactttcaaagctcagataatgggcctcaaaaccagcgcaacgctccacgtataaccttcggtggcccgtctgactccacaggcagcaaccagaatggtgagcgtagtggagccaggtctaagcagcgccgtccccagggtctgccgaacaacacggcgagctggtttactgcgcttacccaacacggtaaagaagacttaaaattcccgcgtggccagggcgtcccgatcaacactaactcttccccggatgatcagattggttattaccgcagagcaactcgtcggattcgcggcggcgacggtaaaatgaaagatttgtctccgcgttggtacttttactatctcggcaccggtccggaagctggactgccctacggggcaaacaaggacgggatcatttgggtggctcgagaaggtgccctgaatactccaaaagatcatatcggcacccgtaaccctgctaataacgctgcgatcgttctgcaactgcctcagggtacaactctgccaaaaggcttctatgcagaagggtcgcgtggtggcagccaggcgagtagccgtagcagctcccgctctcgcaactcgtcccgtaactccactccgggctcttctcgcggcacgtccccggctcgtatggcaggtaacggtggtgacgctgctctggcgctgctactgctggacaggctgaaccagctggagtcgaagatgagtggtaaaggccaacagcagcagggccagaccgttaccaaaaagagcgcagctgaagcatctaaaaaaccgcgacagaaacgtaccgcgactaaagcgtacaatgtaacacaggccttcggtcgtcgaggtccggagcaaactcaaggaaactttggcgatcaggaattaatccgccaggggaccgactacaaacactggccgcaaattgcccagttcgccccatccgctagtgcattcttcggtatgagccgcatcggcatggaagtaacgccaagtggtacgtggctgacctacaccggtgctatcaagcttgatgacaaggacccgaactttaaagaccaggttattctgcttaacaaacatattgatgcctataaaactttcccgccgaccgaacccaaaaaggacaaaaagaaaaaagctgatgaaacccaggctctaccgcagcgtcagaaaaaacagcaaactgtgactctgctgccagctgcggacctggatgatttttccaagcagctgcaacagtctatgagctctgcggactctacgcaggcttaa

SEQ ID NO: 349 - DNA, 2016 bp, Artificial Sequence
  Description of Artificial Sequence: Synthetic polynucleotide
atgcaccatcatcaccatcatggtggttctggttcgccgatacttggttattggaagattaaaggactggttcagcccacacgcctcctgctagaatacttagaggaaaaatatgaagagcacctgtacgaacgtgatgagggggacaaatggcgaaacaagaaatttgaattgggcttagaatttccaaatttgccgtattatatcgatggcgacgtaaaactgacccaatcaatggccattattcgctacatcgcagataaacataacatgctgggtggctgccctaaagaacgggctgagatctccatgctggaaggtgcggtgctcgacattcgctacggcgtcagtagaattgcgtatagcaaggatttcgaaactttaaaagtggatttcctgagcaaacttccggagatgctgaaaatgtttgaggataggctttgtcataagacgtatctcaatggtgatcatgttacccacccggactttatgctgtacgacgcccttgatgtcgttctgtatatggatcccatgtgcctggacgccttcccgaaattagtgtgttttaaaaaacgtatcgaagcgattccacagatcgataaatacttgaagtcttctaaatatattgcttggcctctgcaaggctggcaggcaacgttcggtgggggagatcatccgccaaaatcagatctggtgccgcgtgggagccctggcatacaccgcgacggtggttctggtgagaacctgtactttcaaagctcagataatgggcctcaaaaccagcgcaacgctccacgtataaccttcggtggcccgtctgactccacaggcagcaaccagaatggtgagcgtagtggagccaggtctaagcagcgccgtccccagggtctgccgaacaacacggcgagctggtttactgcgcttacccaacacggtaaagaagacttaaaattcccgcgtggccagggcgtcccgatcaacactaactcttccccggatgatcagattggttattaccgcagagcaactcgtcggattcgcggcggcgacggtaaaatgaaagatttgtctccgcgttggtacttttactatctcggcaccggtccggaagctggactgccctacggggcaaacaaggacgggatcatttgggtggctaccgaaggtgccctgaatactccaaaagatcatatcggcacccgtaaccctgctaataacgctgcgatcgttctgcaactgcctcagggtacaactctgccaaaaggcttctatgcagaagggtcgcgtggtggcagccaggcgagtagccgtagcagctcccgctctcgcaactcgtcccgtaactccactccgggctcttctcgcggcacgtccccggctcgtatggcaggtaacggtggtgacgctgctctggcgctgctactgctggacaggctgaaccagctggagtcgaagatgagtggtaaaggccaacagcagcagggccagaccgttaccaaaaagagcgcagctgaagcatctaaaaaaccgcgacagaaacgtaccgcgactaaagagtacaatgtaacacaggccttcggtcgtcgaggtccggagcaaactcaaggaaactttggcgatcaggatttaatcaaattggggaccgactacaaacactggccgcaaattgcccagttcgccccatccgctagtgcattcttcggtatgagccgcatctcgacgcgcgaaacgccaagtggtacgtggctgacctacaccggtgctatcaagcttgataagaaggacccgaactttaaagaccaggttattctgcttaacaaacatattgatgcctataaaactttcccgccgaccgaacccaaaaaggacaaaaagaaaaaagctgatgaaacccaggctctaccgcagcgtcagaaaaaacagcaaactgtgactctgctgccagctgcggacctggatgatttttccaagcagctgcaacagtctatgagctctgcggactctacgcaggcttaa

SEQ ID NO: 350 - DNA, 2016 bp, Artificial Sequence
  Description of Artificial Sequence: Synthetic polynucleotide
atgcaccatcatcaccatcatggtggttctggttcgccgatacttggttattggaagattaaaggactggttcagcccacacgcctcctgctagaatacttagaggaaaaatatgaagagcacctgtacgaacgtgatgagggggacaaatggcgaaacaagaaatttgaattgggcttagaatttccaaatttgccgtattatatcgatggcgacgtaaaactgacccaatcaatggccattattcgctacatcgcagataaacataacatgctgggtggctgccctaaagaacgggctgagatctccatgctggaaggtgcggtgctcgacattcgctacggcgtcagtagaattgcgtatagcaaggatttcgaaactttaaaagtggatttcctgagcaaacttccggagatgctgaaaatgtttgaggataggctttgtcataagacgtatctcaatggtgatcatgttacccacccggactttatgctgtacgacgcccttgatgtcgttctgtatatggatcccatgtgcctggacgccttcccgaaattagtgtgttttaaaaaacgtatcgaagcgattccacagatcgataaatacttgaagtcttctaaatatattgcttggcctctgcaaggctggcaggcaacgttcggtgggggagatcatccgccaaaatcagatctggtgccgcgtgggagccctggcatacaccgcgacggtggttctggtgagaacctgtactttcaaagctcagataatgggcctcaaaaccagcgcaacgctccacgtataaccttcggtggcccgtctgactccacaggcagcaaccagaatggtgagcgtagtggagccaggtctaagcagcgccgtccccagggtctgccgaacaacacggcgagctggtttactgcgcttacccaacacggtaaagaagacttaaaattcccgcgtggccagggcgcaccgatcaacactaactcttccccggatgatcagattggttattaccgcagagcaactcgtcggattcgcggcggcgacggtaaaatgaaagatttgtctccgcgttggtacttttactatctcggcaccggtccggaagctggactgccctacggggcaaacaaggacgggatcatttgggtggctaccgaaggtgccctgaatactccaaaagatcatatcggcacccgtaaccctgctaataacgctgcgatcgttctgcaactgcctcagggtacaactctgccaaaaggcttctatgcagaagggtcgcgtggtggcagccaggcgagtagccgtagcagctcccgctctcgcaactcgtcccgtaactccactccgggctcttctcgcggcacgtccccggctcgtatggcaggtaacggtggtgacgctgctctggcgctgctactgctggacaggctgaaccagctggagtcgaagatgagtggtaaaggccaacagcagcagggccagaccgttaccaaaaagagcgcagctgaagcatctaaaaaaccgcgacagaaacgtaccgcgactaaagcgtacaatgtaacacaggccttcggtcgtcgaggtccggagcaaactcaaggaaactttggcgatcaggaattaatccgccaggggaccgactacaaacactggccgcaaattgcccagttcgccccatccgctagtgcattcttcggtatgagccgcatcggcatggaagtaacgccaagtggtacgtggctgacctacaccggtgctatcaagcttgatgacaaggacccgaactttaaagaccaggttattctgcttaacaaacatattgatgcctataaaactttcccgccgaccgaacccaaaaaggacaaaaagaaaaaagctgatgaaacccaggctctaccgcagcgtcagaaaaaacagcaaactgtgactctgctgccagctgcggacctggatgatttttccaagcagctgcaacagtctatgagctctgcggactctacgcaggcttaa

SEQ ID NO: 351 - DNA, 2016 bp, Artificial Sequence
  Description of Artificial Sequence: Synthetic polynucleotide
atgcaccatcatcaccatcatggtggttctggttcgccgatacttggttattggaagattaaaggactggttcagcccacacgcctcctgctagaatacttagaggaaaaatatgaagagcacctgtacgaacgtgatgagggggacaaatggcgaaacaagaaatttgaattgggcttagaatttccaaatttgccgtattatatcgatggcgacgtaaaactgacccaatcaatggccattattcgctacatcgcagataaacataacatgctgggtggctgccctaaagaacgggctgagatctccatgctggaaggtgcggtgctcgacattcgctacggcgtcagtagaattgcgtatagcaaggatttcgaaactttaaaagtggatttcctgagcaaacttccggagatgctgaaaatgtttgaggataggctttgtcataagacgtatctcaatggtgatcatgttacccacccggactttatgctgtacgacgcccttgatgtcgttctgtatatggatcccatgtgcctggacgccttcccgaaattagtgtgttttaaaaaacgtatcgaagcgattccacagatcgataaatacttgaagtcttctaaatatattgcttggcctctgcaaggctggcaggcaacgttcggtgggggagatcatccgccaaaatcagatctggtgccgcgtgggagccctggcatacaccgcgacggtggttctggtgagaacctgtactttcaaagctcagataatgggcctcaaaaccagcgcaacgctccacgtataaccttcggtggcccgtctgactccacaggcagcaaccagaatggtgagcgtagtggagccaggtctaagcagcgccgtccccagggtctgccgaacaacacggcgagctggtttactgcgcttacccaacacggtaaagaagacttaaaattcccgcgtggccagggcgtcccgatcaacactaactcttccccggatgatcagattggttattaccgcagagcaactcgtcggattcgcggcggcgacggtaaaatgaaagatttgtctccgcgttggtacttttactatctcggcaccggtccggaagctggactgccctacggggcaaacaaggacgggatcatttgggtggctaccgaaggtgccctgaatactccaaaagatcatatcggcacccgtaaccctgctaataacgctgcgatcgttctgcaactgcctcagggtacaactctgccaaaaggcttctatgcagaagggtcgcgtggtggcagccaggcgagtagccgtagcagctcccgctctcgcaactcgtcccgtaactccactccgggctcttctcgcggcacgtccccggctcgtatggcaggtaacggtggtgacgctgctctggcgctgctactgctggacaggctgaaccagctggagtcgaagatgagtggtaaaggccaacagcagcagggccagaccgttaccaaaaagagcgcagctgaagcatctaaaaaaccgcgacagaaacgtaccgcgactaaagcgtacaatgtaacacaggccttcggtcgtcgaggtccggagcaaactcaaggaaactttggcgatcaggaattaatccgccaggggaccgactacaaacactggccgcaaattgcccagttcgccccatccgctagtgcattcttcggtatgagccgcatcggcatggaagtaacgccaagtggtacgtggctgacctacaccggttccatcaagcttgatgacaaggacccgaactttaaagaccaggttattctgcttaacaaacatattgatgcctataaaactttcccgccgaccgaacccaaaaaggacaaaaagaaaaaagctgatgaaacccaggctctaccgcagcgtcagaaaaaacagcaaactgtgactctgctgccagctgcggacctggatgatttttccaagcagctgcaacagtctatgagctctgcggactctacgcaggcttaa

SEQ ID NO: 352 - DNA, 2016 bp, Artificial Sequence
  Description of Artificial Sequence: Synthetic polynucleotide
atgcaccatcatcaccatcatggtggttctggttcgccgatacttggttattggaagattaaaggactggttcagcccacacgcctcctgctagaatacttagaggaaaaatatgaagagcacctgtacgaacgtgatgagggggacaaatggcgaaacaagaaatttgaattgggcttagaatttccaaatttgccgtattatatcgatggcgacgtaaaactgacccaatcaatggccattattcgctacatcgcagataaacataacatgctgggtggctgccctaaagaacgggctgagatctccatgctggaaggtgcggtgctcgacattcgctacggcgtcagtagaattgcgtatagcaaggatttcgaaactttaaaagtggatttcctgagcaaacttccggagatgctgaaaatgtttgaggataggctttgtcataagacgtatctcaatggtgatcatgttacccacccggactttatgctgtacgacgcccttgatgtcgttctgtatatggatcccatgtgcctggacgccttcccgaaattagtgtgttttaaaaaacgtatcgaagcgattccacagatcgataaatacttgaagtcttctaaatatattgcttggcctctgcaaggctggcaggcaacgttcggtgggggagatcatccgccaaaatcagatctggtgccgcgtgggagccctggcatacaccgcgacggtggttctggtgagaacctgtactttcaaagctcagataatgggcctcaaaaccagcgcaacgctccacgtataaccttcggtggcccgtctgactccacaggcagcaaccagaatggtgagcgtagtggagccaggtctaagcagcgccgtccccagggtctgccgaacaacacggcgagctggtttactgcgcttacccaacacggtaaagaagacttaaaattcccgcgtggccagggcgtcccgatcaacactaactcttccccggatgatcagattggttattaccgcagagcaactcgtcggattcgcggcggcgacggtaaaatgaaagatttgtctccgcgttggtacttttactatctcggcaccggtccggaagctggactgccctacggggcaaacaaggacgggatcatttgggtggctaccgaaggtgccctgaatactccaaaagatcatatcggcacccgtaaccctgctaataacgctgcgatcgttctgcaactgcctcagggtacaactctgccaaaaggcttctatgcagaagggtcgcgtggtggcagccaggcgagtagccgtagcagctcccgctctcgcaactcgtcccgtaactccactccgggctcttctcgcggcacgtccccggctcgtatggcaggtaacggtggtgacgctgctctggcgctgctactgctggacaggctgaaccagctggagtcgaagatgagtggtaaaggccaacagcagcagggccagaccgttaccaaaaagagcgcagctgaagcatctaaaaaaccgcgacagaaacgtaccgcgactaaaaaatacaatgtaacacaggccttcggtcgtcgaggtccggagcaaactcaaggaaactttggcgatcaggaattaatccgccaggggaccgactacaaacactggccgcaaattgcccagttcgccccatccgctagtgcattcttcggtatgagccgcatcggcatggaagtaacgccaagtggtacgtggctgacctacaccggtgctatcaagcttgatgacaaggacccgaactttaaagaccaggttattctgcttaacaaacatattgatgcctataaaactttcccgccgaccgaacccaaaaaggacaaaaagaaaaaagctgatgaaacccaggctctaccgcagcgtcagaaaaaacagcaaactgtgactctgctgccagctgcggacctggatgatttttccaagcagctgcaacagtctatgagctctgcggactctacgcaggcttaa

SEQ ID NO: 353 - DNA, 2016 bp, Artificial Sequence
  Description of Artificial Sequence: Synthetic polynucleotide
atgcaccatcatcaccatcatggtggttctggttcgccgatacttggttattggaagattaaaggactggttcagcccacacgcctcctgctagaatacttagaggaaaaatatgaagagcacctgtacgaacgtgatgagggggacaaatggcgaaacaagaaatttgaattgggcttagaatttccaaatttgccgtattatatcgatggcgacgtaaaactgacccaatcaatggccattattcgctacatcgcagataaacataacatgctgggtggctgccctaaagaacgggctgagatctccatgctggaaggtgcggtgctcgacattcgctacggcgtcagtagaattgcgtatagcaaggatttcgaaactttaaaagtggatttcctgagcaaacttccggagatgctgaaaatgtttgaggataggctttgtcataagacgtatctcaatggtgatcatgttacccacccggactttatgctgtacgacgcccttgatgtcgttctgtatatggatcccatgtgcctggacgccttcccgaaattagtgtgttttaaaaaacgtatcgaagcgattccacagatcgataaatacttgaagtcttctaaatatattgcttggcctctgcaaggctggcaggcaacgttcggtgggggagatcatccgccaaaatcagatctggtgccgcgtgggagccctggcatacaccgcgacggtggttctggtgagaacctgtactttcaaagctcagataatgggcctcaaaaccagcgcaacgctccacgtataaccttcggtggcccgtctgactccacaggcagcaaccagaatggtgagcgtagtggagccaggtctaagcagcgccgtccccagggtctgccgaacaacacggcgagctggtttactgcgcttacccaacacggtaaagaagacttaaaattcccgcgtggccagggcgtcccgatcaacactaactcttccccggatgatcagattggttattaccgcagagcaactcgtcggattcgcggcggcgacggtaaaatgaaagatttgtctccgcgttggtacttttactatctcggcaccggtccggaagctggactgccctacggggcaaacaaggacgggatcatttgggtggctaccgaaggtgccctgaatactccaaaagatcatatcggcacccgtaaccctgctaataacgctgcgatcgttctgcaactgcctcagggtacaactctgccaaaaggcttctatgcagaagggtcgcgtggtggcagccaggcgagtagccgtagcagctcccgctctcgcaactcgtcccgtaactccactccgggctcttctcgcggcacgtccccggctcgtatggcaggtaacggtggtgacgctgctctggcgctgctactgctggacaggctgaaccagctggagtcgaagatgagtggtaaaggccaacagcagcagggccagaccgttaccaaaaagagcgcagctgaagcatctaaaaaaccgcgacagaaacgtaccgcgactaaagcgtacaatgtaacacaggccttcggtcgtcgaggtccggagcaaactcaaggaaactttggcgatcaggaattaatccgccaggggaccgactacaaacactggccgcaaattgcccagttcgccccatccgctagtgcattcttcggtatgagccgcatcggcatggaagtacaaccaagtggtacgtggctgacctacaccggtgctatcaagcttgatgacaaggacccgaactttaaagaccaggttattctgcttaacaaacatattgatgcctataaaactttcccgccgaccgaacccaaaaaggacaaaaagaaaaaagctgatgaaacccaggctctaccgcagcgtcagaaaaaacagcaaactgtgactctgctgccagctgcggacctggatgatttttccaagcagctgcaacagtctatgagctctgcggactctacgcaggcttaa

SEQ ID NO: 354 - DNA, 2016 bp, Artificial Sequence
  Description of Artificial Sequence: Synthetic polynucleotide
atgcaccatcatcaccatcatggtggttctggttcgccgatacttggttattggaagattaaaggactggttcagcccacacgcctcctgctagaatacttagaggaaaaatatgaagagcacctgtacgaacgtgatgagggggacaaatggcgaaacaagaaatttgaattgggcttagaatttccaaatttgccgtattatatcgatggcgacgtaaaactgacccaatcaatggccattattcgctacatcgcagataaacataacatgctgggtggctgccctaaagaacgggctgagatctccatgctggaaggtgcggtgctcgacattcgctacggcgtcagtagaattgcgtatagcaaggatttcgaaactttaaaagtggatttcctgagcaaacttccggagatgctgaaaatgtttgaggataggctttgtcataagacgtatctcaatggtgatcatgttacccacccggactttatgctgtacgacgcccttgatgtcgttctgtatatggatcccatgtgcctggacgccttcccgaaattagtgtgttttaaaaaacgtatcgaagcgattccacagatcgataaatacttgaagtcttctaaatatattgcttggcctctgcaaggctggcaggcaacgttcggtgggggagatcatccgccaaaatcagatctggtgccgcgtgggagccctggcatacaccgcgacggtggttctggtgagaacctgtactttcaaagctcagataatgggcctcaaaaccagcgcaacgctccacgtataaccttcggtggcccgtctgactccacaggcagcaaccagaatggtgagcgtagtggagccaggtctaagcagcgccgtccccagggtctgccgaacaacacggcgagctggtttactgcgcttacccaacacggtaaagaagacttaaaattcccgcgtggccagggcgtcccgatcaacactaactcttccccggatgatcagattggttattaccgcagagcaactcgtcggattcgcggcggcgacggtaaaatgaaagatttgtctccgcgttggtacttttactatctcggcaccggtccggaagctggactgccctacggggcaaacaaggacgggatcatttgggtggctaccgaaggtgccctgaatactccaaaagatcatatcggcacccgtaaccctgctaataacgctgcgatcgttctgcaactgcctcagggtacaactctgccaaaaggcttctatatggaagggtcgcgtggtggcagccaggcgagtagccgtagcagctcccgctctcgcaactcgtcccgtaactccactccgggctcttctcgcggcacgtccccggctcgtatggcaggtaacggtggtgacgctgctctggcgctgctactgctggacaggctgaaccagctggagtcgaagatgagtggtaaaggccaacagcagcagggccagaccgttaccaaaaagagcgcagctgaagcatctaaaaaaccgcgacagaaacgtaccgcgactaaagcgtacaatgtaacacaggccttcggtcgtcgaggtccggagcaaactcaaggaaactttggcgatcaggaattaatccgccaggggaccgactacaaacactggccgcaaattgcccagttcgccccatccgctagtgcattcttcggtatgagccgcatcggcatggaagtaacgccaagtggtacgtggctgacctacaccggtgctatcaagcttgatgacaaggacccgaactttaaagaccaggttattctgcttaacaaacatattgatgcctataaaactttcccgccgaccgaacccaaaaaggacaaaaagaaaaaagctgatgaaacccaggctctaccgcagcgtcagaaaaaacagcaaactgtgactctgctgccagctgcggacctggatgatttttccaagcagctgcaacagtctatgagctctgcggactctacgcaggcttaa

SEQ ID NO: 355 - DNA, 2016 bp, Artificial Sequence
  Description of Artificial Sequence: Synthetic polynucleotide
atgcaccatcatcaccatcatggtggttctggttcgccgatacttggttattggaagattaaaggactggttcagcccacacgcctcctgctagaatacttagaggaaaaatatgaagagcacctgtacgaacgtgatgagggggacaaatggcgaaacaagaaatttgaattgggcttagaatttccaaatttgccgtattatatcgatggcgacgtaaaactgacccaatcaatggccattattcgctacatcgcagataaacataacatgctgggtggctgccctaaagaacgggctgagatctccatgctggaaggtgcggtgctcgacattcgctacggcgtcagtagaattgcgtatagcaaggatttcgaaactttaaaagtggatttcctgagcaaacttccggagatgctgaaaatgtttgaggataggctttgtcataagacgtatctcaatggtgatcatgttacccacccggactttatgctgtacgacgcccttgatgtcgttctgtatatggatcccatgtgcctggacgccttcccgaaattagtgtgttttaaaaaacgtatcgaagcgattccacagatcgataaatacttgaagtcttctaaatatattgcttggcctctgcaaggctggcaggcaacgttcggtgggggagatcatccgccaaaatcagatctggtgccgcgtgggagccctggcatacaccgcgacggtggttctggtgagaacctgtactttcaaagctcagataatgggcctcaaaaccagcgcaacgctccacgtataaccttcggtggcccgtctgactccacaggcagcaaccagaatggtgagcgtagtggagccaggtctaagcagcgccgtccccagggtctgccgaacaacacggcgagctggtttactccgcttacccaacacggtaaagaagacttaaaattcccgccgggccagggcgtcccgatcaacactaactcttccccggatgatcagattggttattaccgcagagcaactcgtcggattcgcggcggcgacggtaaaatgaaagatttgccaccgaagtggtacttttactatctcggcaccggtccgcatgctgatctgccctacgggcaaaaacaagacggggtagtgtgggtggctcgaccaggtgccctgaatactccaaaagatcatatcggcacccgtaaccctgctaataacgctgcgatccctctgcaactgcctccgggtacaaaactgccaaaaggcttctatgcagaagggtcgcgtggtggcagccaggcgagtagccgtagcagctcccgctctcgcaactcgtcccgtaactccactccgggctcttctcgcggcacgtccccggctcgtatggcaggtaacggtggtgacgctgctctggcgctgctactgctggacaggctgaaccagctggagtcgaagatgagtggtaaaggccaacagcagcagggccagaccgttaccaaaaagagcgcagctgaagcatctaaaaaaccgcgacagaaacgtaccgcgactaaagcgtacaatgtaacacaggccttcggtcgtcgaggtccggagcaaactcaaggaaactttggcgatcaggaattaatccgccaggggaccgactacaaacactggccgcaaattgcccagttcgccccatccgctagtgcattcttcggtatgagccgcatcggcatggaagtaacgccaagtggtacgtggctgacctacaccggtgctatcaagcttgatgacaaggacccgaactttaaagaccaggttattctgcttaacaaacatattgatgcctataaaactttcccgccgaccgaacccaaaaaggacaaaaagaaaaaagctgatgaaacccaggctctaccgcagcgtcagaaaaaacagcaaactgtgactctgctgccagctgcggacctggatgatttttccaagcagctgcaacagtctatgagctctgcggactctacgcaggcttaa

SEQ ID NO: 356 - DNA, 2016 bp, Artificial Sequence
  Description of Artificial Sequence: Synthetic polynucleotide
atgcaccatcatcaccatcatggtggttctggttcgccgatacttggttattggaagattaaaggactggttcagcccacacgcctcctgctagaatacttagaggaaaaatatgaagagcacctgtacgaacgtgatgagggggacaaatggcgaaacaagaaatttgaattgggcttagaatttccaaatttgccgtattatatcgatggcgacgtaaaactgacccaatcaatggccattattcgctacatcgcagataaacataacatgctgggtggctgccctaaagaacgggctgagatctccatgctggaaggtgcggtgctcgacattcgctacggcgtcagtagaattgcgtatagcaaggatttcgaaactttaaaagtggatttcctgagcaaacttccggagatgctgaaaatgtttgaggataggctttgtcataagacgtatctcaatggtgatcatgttacccacccggactttatgctgtacgacgcccttgatgtcgttctgtatatggatcccatgtgcctggacgccttcccgaaattagtgtgttttaaaaaacgtatcgaagcgattccacagatcgataaatacttgaagtcttctaaatatattgcttggcctctgcaaggctggcaggcaacgttcggtgggggagatcatccgccaaaatcagatctggtgccgcgtgggagccctggcatacaccgcgacggtggttctggtgagaacctgtactttcaaagctcagataatgggcctcaaaaccagcgcaacgctccacgtataaccttcggtggcccgtctgactccacaggcagcaaccagaatggtgagcgtagtggagccaggtctaagcagcgccgtccccagggtctgccgaacaacacggcgagctggtttactgcgcttacccaacacggtaaagaagacttaaaattcccgcgtggccagggcgtcccgatcaacactaactcttccccggatgatcagattggttattaccgcagagcaactcgtcggattcgcggcggcgacggtaaaatgaaagatttgtctccgcgttggtacttttactatctcggcaccggtccggaagctggactgccctacggggcaaacaaggacgggatcatttgggtggctaccgaaggtgccctgaatactccaaaagatcatatcggcacccgtaaccctgctaataacgctgcgatcggcctgcaactgcctcagggtacaactctgccaaaaggcttctatgcagaagggtcgcgtggtggcagccaggcgagtagccgtagcagctcccgctctcgcaactcgtcccgtaactccactccgggctcttctcgcggcacgtccccggctcgtatggcaggtaacggtggtgacgctgctctggcgctgctactgctggacaggctgaaccagctggagtcgaagatgagtggtaaaggccaacagcagcagggccagaccgttaccaaaaagagcgcagctgaagcatctaaaaaaccgcgacagaaacgtaccgcgactaaagcgtacaatgtaacacaggccttcggtcgtcgaggtccggagcaaactcaaggaaactttggcgatcaggaattaatccgccaggggaccgactacaaacactggccgcaaattgcccagttcgccccatccgctagtgcattcttcggtatgagccgcatcggcatggaagtaacgccaagtggtacgtggctgacctacaccggtgctatcaagcttgatgacaaggacccgaactttaaagaccaggttattctgcttaacaaacatattgatgcctataaaactttcccgccgaccgaacccaaaaaggacaaaaagaaaaaagctgatgaaacccaggctctaccgcagcgtcagaaaaaacagcaaactgtgactctgctgccagctgcggacctggatgatttttccaagcagctgcaacagtctatgagctctgcggactctacgcaggcttaa

SEQ ID NO: 357 - DNA, 2016 bp, Artificial Sequence
  Description of Artificial Sequence: Synthetic polynucleotide
atgcaccatcatcaccatcatggtggttctggttcgccgatacttggttattggaagattaaaggactggttcagcccacacgcctcctgctagaatacttagaggaaaaatatgaagagcacctgtacgaacgtgatgagggggacaaatggcgaaacaagaaatttgaattgggcttagaatttccaaatttgccgtattatatcgatggcgacgtaaaactgacccaatcaatggccattattcgctacatcgcagataaacataacatgctgggtggctgccctaaagaacgggctgagatctccatgctggaaggtgcggtgctcgacattcgctacggcgtcagtagaattgcgtatagcaaggatttcgaaactttaaaagtggatttcctgagcaaacttccggagatgctgaaaatgtttgaggataggctttgtcataagacgtatctcaatggtgatcatgttacccacccggactttatgctgtacgacgcccttgatgtcgttctgtatatggatcccatgtgcctggacgccttcccgaaattagtgtgttttaaaaaacgtatcgaagcgattccacagatcgataaatacttgaagtcttctaaatatattgcttggcctctgcaaggctggcaggcaacgttcggtgggggagatcatccgccaaaatcagatctggtgccgcgtgggagccctggcatacaccgcgacggtggttctggtgagaacctgtactttcaaagctcagataatgggcctcaaaaccagcgcaacgctccacgtataaccttcggtggcccgtctgactccacaggcagcaaccagaatggtgagcgtagtggagccaggtctaagcagcgccgtccccagggtctgccgaacaacacggcgagctggtttactgcgcttacccaatttggtaaagaagacttaaaattcccgcgtggccagggcgtcccgatcaacactaactcttccccggatgatcagattggttattaccgcagagcaactcgtcggattcgcggcggcgacggtaaaatgaaagatttgtctccgcgttggtacttttactatctcggcaccggtccggaagctggactgccctacggggcaaacaaggacgggatcatttgggtggctaccgaaggtgccctgaatactccaaaagatcatatcggcacccgtaaccctgctaataacgctgcgatcgttctgcaactgcctcagggtacaactctgccaaaaggcttctatgcagaagggtcgcgtggtggcagccaggcgagtagccgtagcagctcccgctctcgcaactcgtcccgtaactccactccgggctcttctcgcggcacgtccccggctcgtatggcaggtaacggtggtgacgctgctctggcgctgctactgctggacaggctgaaccagctggagtcgaagatgagtggtaaaggccaacagcagcagggccagaccgttaccaaaaagagcgcagctgaagcatctaaaaaaccgcgacagaaacgtaccgcgactaaagcgtacaatgtaacacaggccttcggtcgtcgaggtccggagcaaactcaaggaaactttggcgatcaggaattaatccgccaggggaccgactacaaacactggccgcaaattgcccagttcgccccatccgctagtgcattcttcggtatgagccgcatcggcatggaagtaacgccaagtggtacgtggctgacctacaccggtgctatcaagcttgatgacaaggacccgaactttaaagaccaggttattctgcttaacaaacatattgatgcctataaaactttcccgccgaccgaacccaaaaaggacaaaaagaaaaaagctgatgaaacccaggctctaccgcagcgtcagaaaaaacagcaaactgtgactctgctgccagctgcggacctggatgatttttccaagcagctgcaacagtctatgagctctgcggactctacgcaggcttaa

SEQ ID NO: 358 - DNA, 2016 bp, Artificial Sequence
  Description of Artificial Sequence: Synthetic polynucleotide
atgcaccatcatcaccatcatggtggttctggttcgccgatacttggttattggaagattaaaggactggttcagcccacacgcctcctgctagaatacttagaggaaaaatatgaagagcacctgtacgaacgtgatgagggggacaaatggcgaaacaagaaatttgaattgggcttagaatttccaaatttgccgtattatatcgatggcgacgtaaaactgacccaatcaatggccattattcgctacatcgcagataaacataacatgctgggtggctgccctaaagaacgggctgagatctccatgctggaaggtgcggtgctcgacattcgctacggcgtcagtagaattgcgtatagcaaggatttcgaaactttaaaagtggatttcctgagcaaacttccggagatgctgaaaatgtttgaggataggctttgtcataagacgtatctcaatggtgatcatgttacccacccggactttatgctgtacgacgcccttgatgtcgttctgtatatggatcccatgtgcctggacgccttcccgaaattagtgtgttttaaaaaacgtatcgaagcgattccacagatcgataaatacttgaagtcttctaaatatattgcttggcctctgcaaggctggcaggcaacgttcggtgggggagatcatccgccaaaatcagatctggtgccgcgtgggagccctggcatacaccgcgacggtggttctggtgagaacctgtactttcaaagctcagataatgggcctcaaaaccagcgcaacgctccacgtataaccttcggtggcccgtctgactccacaggcagcaaccagaatggtgagcgtagtggagccaggtctaagcagcgccgtccccagggtctgccgaacaacacggcgagctggtttactcctcttacccaacacggtaaagaagacttaaaattcccgccgggccagggcgtcccgatcaacactaactcttccccggatgatcagattggttattaccgcagagcaactcgtcggattcgcggcggcgacggtaaaatgaaagatttgccaccgcgttggtacttttactatctcggcaccggtccggaagctgatctgccctacggggcagtaaaggacgggatcttttgggtggctgaagaaggtgccctgaatactccaaaagatcatatcggcacccgtaaccctgctaataacgctgcgatcccactgcaactgcctccgggtacaactctgccaaaaggcttctatgcagaagggtcgcgtggtggcagccaggcgagtagccgtagcagctcccgctctcgcaactcgtcccgtaactccactccgggctcttctcgcggcacgtccccggctcgtatggcaggtaacggtggtgacgctgctctggcgctgctactgctggacaggctgaaccagctggagtcgaagatgagtggtaaaggccaacagcagcagggccagaccgttaccaaaaagagcgcagctgaagcatctaaaaaaccgcgacagaaacgtaccgcgactaaagcgtacaatgtaacacaggccttcggtcgtcgaggtccggagcaaactcaaggaaactttggcgatcaggaattaatccgccaggggaccgactacaaacactggccgcaaattgcccagttcgccccatccgctagtgcattcttcggtatgagccgcatcggcatggaagtaacgccaagtggtacgtggctgacctacaccggtgctatcaagcttgatgacaaggacccgaactttaaagaccaggttattctgcttaacaaacatattgatgcctataaaactttcccgccgaccgaacccaaaaaggacaaaaagaaaaaagctgatgaaacccaggctctaccgcagcgtcagaaaaaacagcaaactgtgactctgctgccagctgcggacctggatgatttttccaagcagctgcaacagtctatgagctctgcggactctacgcaggcttaa

SEQ ID NO: 359 - DNA, 2016 bp, Artificial Sequence
  Description of Artificial Sequence: Synthetic polynucleotide
atgcaccatcatcaccatcatggtggttctggttcgccgatacttggttattggaagattaaaggactggttcagcccacacgcctcctgctagaatacttagaggaaaaatatgaagagcacctgtacgaacgtgatgagggggacaaatggcgaaacaagaaatttgaattgggcttagaatttccaaatttgccgtattatatcgatggcgacgtaaaactgacccaatcaatggccattattcgctacatcgcagataaacataacatgctgggtggctgccctaaagaacgggctgagatctccatgctggaaggtgcggtgctcgacattcgctacggcgtcagtagaattgcgtatagcaaggatttcgaaactttaaaagtggatttcctgagcaaacttccggagatgctgaaaatgtttgaggataggctttgtcataagacgtatctcaatggtgatcatgttacccacccggactttatgctgtacgacgcccttgatgtcgttctgtatatggatcccatgtgcctggacgccttcccgaaattagtgtgttttaaaaaacgtatcgaagcgattccacagatcgataaatacttgaagtcttctaaatatattgcttggcctctgcaaggctggcaggcaacgttcggtgggggagatcatccgccaaaatcagatctggtgccgcgtgggagccctggcatacaccgcgacggtggttctggtgagaacctgtactttcaaagctcagataatgggcctcaaaaccagcgcaacgctccacgtataaccttcggtggcccgtctgactccacaggcagcaaccagaatggtgagcgtagtggagccaggtctaagcagcgccgtccccagggtctgccgaacaacacggcgagctggtttactgcgcttacccaacacggtaaagaagacttaaaattcccgccgggccagggcgtcccgatcaacactaactcttccccggatgatcagattggttattaccgcagagcaactcgtcggattcgcggcggcgacggtaaaatgaaagatttgtctccgcgttggtacttttactatctcggcaccggtccggaagctggactgccctacggggcaaacaaggacgggatcatttgggtggctaccgaaggtgccctgaatactccaaaagatcatatcggcacccgtaaccctgctaataacgctgcgatcgttctgcaactgcctcagggtacaactctgccaaaaggcttctatgcagaagggtcgcgtggtggcagccaggcgagtagccgtagcagctcccgctctcgcaactcgtcccgtaactccactccgggctcttctcgcggcacgtccccggctcgtatggcaggtaacggtggtgacgctgctctggcgctgctactgctggacaggctgaaccagctggagtcgaagatgagtggtaaaggccaacagcagcagggccagaccgttaccaaaaagagcgcagctgaagcatctaaaaaaccgcgacagaaacgtaccgcgactaaagcgtacaatgtaacacaggccttcggtcgtcgaggtccggagcaaactcaaggaaactttggcgatcaggaattaatccgccaggggaccgactacaaacactggccgcaaattgcccagttcgccccatccgctagtgcattcttcggtatgagccgcatcggcatggaagtaacgccaagtggtacgtggctgacctacaccggtgctatcaagcttgatgacaaggacccgaactttaaagaccaggttattctgcttaacaaacatattgatgcctataaaactttcccgccgaccgaacccaaaaaggacaaaaagaaaaaagctgatgaaacccaggctctaccgcagcgtcagaaaaaacagcaaactgtgactctgctgccagctgcggacctggatgatttttccaagcagctgcaacagtctatgagctctgcggactctacgcaggcttaa

SEQ ID NO: 360 - DNA, 2016 bp, Artificial Sequence
  Description of Artificial Sequence: Synthetic polynucleotide
atgcaccatcatcaccatcatggtggttctggttcgccgatacttggttattggaagattaaaggactggttcagcccacacgcctcctgctagaatacttagaggaaaaatatgaagagcacctgtacgaacgtgatgagggggacaaatggcgaaacaagaaatttgaattgggcttagaatttccaaatttgccgtattatatcgatggcgacgtaaaactgacccaatcaatggccattattcgctacatcgcagataaacataacatgctgggtggctgccctaaagaacgggctgagatctccatgctggaaggtgcggtgctcgacattcgctacggcgtcagtagaattgcgtatagcaaggatttcgaaactttaaaagtggatttcctgagcaaacttccggagatgctgaaaatgtttgaggataggctttgtcataagacgtatctcaatggtgatcatgttacccacccggactttatgctgtacgacgcccttgatgtcgttctgtatatggatcccatgtgcctggacgccttcccgaaattagtgtgttttaaaaaacgtatcgaagcgattccacagatcgataaatacttgaagtcttctaaatatattgcttggcctctgcaaggctggcaggcaacgttcggtgggggagatcatccgccaaaatcagatctggtgccgcgtgggagccctggcatacaccgcgacggtggttctggtgagaacctgtactttcaaagctcagataatgggcctcaaaaccagcgcaacgctccacgtataaccttcggtggcccgtctgactccacaggcagcaaccagaatggtgagcgtagtggagccaggtctaagcagcgccgtccccagggtctgccgaacaacacggcgagctggtttactgcgcttacccaacacggtaaagaagacttaaaattcccgcgtggccagggcgtcccgatcaacactaactcttccccggatgatcagattggttattaccgcagagcaactcgtcggattcgcggcggcgacggtaaaatgaaagatttgtctccgcgttggtacttttactatctcggcaccggtccggaagctggactgccctacggggcaaacaaggacgggatcatttgggtggctaccgaaggtgccctgaatactccaaaagatcatatcggcacccgtaaccctgctaataacgctgcgatcgttctgcaactgcctcagggtacaactctgccaaaaggcttctatgcagaagggtcgcgtggtggcagccaggcgagtagccgtagcagctcccgctctcgcaactcgtcccgtaactccactccgggctcttctcgcggcacgtccccggctcgtatggcaggtaacggtggtgacgctgctctggcgctgctactgctggacaggctgaaccagctggagtcgaagatgagtggtaaaggccaacagcagcagggccagaccgttaccaaaaagagcgcagctgaagcatctaaaaaaccgcgacagaaacgtaccgcgactaaaggctacaatgtaacacaggccttcggtcgtcgaggtccggagcaaactcaaggaaactttggcgatcaggatttaaataaattggggaccgactacaaacactggccgcaaattgcccagttcgccccatccgctagtgcattcttcggtatgagccgcatctcgacggaagaaacgccaagtggtacgtggctgacctacaccggtgctatcaagcttgataaaaaggacccgaactttaaagaccaggttattctgcttaacaaacatattgatgcctataaaactttcccgccgaccgaacccaaaaaggacaaaaagaaaaaagctgatgaaacccaggctctaccgcagcgtcagaaaaaacagcaaactgtgactctgctgccagctgcggacctggatgatttttccaagcagctgcaacagtctatgagctctgcggactctacgcaggcttaa

SEQ ID NO: 361 - DNA, 2016 bp, Artificial Sequence
  Description of Artificial Sequence: Synthetic polynucleotide
atgcaccatcatcaccatcatggtggttctggttcgccgatacttggttattggaagattaaaggactggttcagcccacacgcctcctgctagaatacttagaggaaaaatatgaagagcacctgtacgaacgtgatgagggggacaaatggcgaaacaagaaatttgaattgggcttagaatttccaaatttgccgtattatatcgatggcgacgtaaaactgacccaatcaatggccattattcgctacatcgcagataaacataacatgctgggtggctgccctaaagaacgggctgagatctccatgctggaaggtgcggtgctcgacattcgctacggcgtcagtagaattgcgtatagcaaggatttcgaaactttaaaagtggatttcctgagcaaacttccggagatgctgaaaatgtttgaggataggctttgtcataagacgtatctcaatggtgatcatgttacccacccggactttatgctgtacgacgcccttgatgtcgttctgtatatggatcccatgtgcctggacgccttcccgaaattagtgtgttttaaaaaacgtatcgaagcgattccacagatcgataaatacttgaagtcttctaaatatattgcttggcctctgcaaggctggcaggcaacgttcggtgggggagatcatccgccaaaatcagatctggtgccgcgtgggagccctggcatacaccgcgacggtggttctggtgagaacctgtactttcaaagctcagataatgggcctcaaaaccagcgcaacgctccacgtataaccttcggtggcccgtctgactccacaggcagcaaccagaatggtgagcgtagtggagccaggtctaagcagcgccgtccccagggtctgccgaacaacacggcgagctggtttactgcgcttacccaacacggtaaagaagacttaaaattcccgcgtggccagggcgtcccgatcaacactaactcttccccggatgatcagattggttattaccgcagagcaactcgtcggattcgcggcggcgacggtaaaatgaaagatttgtctccgcgttggtacttttactatctcggcaccggtccggaagctggactgccctacggggcaaacaaggacgggatcatttgggtggctaccgaaggtgccctgaatactccaaaagatcatatcggcacccgtaaccctgctaataacgctgcgatcgttctgcaactgcctcagggtacaactctgccaaaaggcttctatgcagaagggtcgcgtggtggcagccaggcgagtagccgtagcagctcccgctctcgcaactcgtcccgtaactccactccgggctcttctcgcggcacgtccccggctcgtatggcaggtaacggtggtgacgctgctctggcgctgctactgctggacaggctgaaccagctggagtcgaagatgagtggtaaaggccaacagcagcagggccagaccgttaccaaaaagagcgcagctgaagcatctaaaaaaccgcgacagaaacgtaccgcgactaaagcgtacaatgtaacacaggccttcggtcgtcgaggtccggagcaaactcaaggaaactttggcgatcaggaattaatccgccaggggaccgactacaaacactggccgcaaattgcccagttcgccccatccgctagtgcattcttcggtatgagccgcatcggcatggtggtaacgccaagtggtacgtggctgacctacaccggtgctatcaagcttgatgacaaggacccgaactttaaagaccaggttattctgcttaacaaacatattgatgcctataaaactttcccgccgaccgaacccaaaaaggacaaaaagaaaaaagctgatgaaacccaggctctaccgcagcgtcagaaaaaacagcaaactgtgactctgctgccagctgcggacctggatgatttttccaagcagctgcaacagtctatgagctctgcggactctacgcaggcttaa

SEQ ID NO: 362 - DNA, 2016 bp, Artificial Sequence
  Description of Artificial Sequence: Synthetic polynucleotide
atgcaccatcatcaccatcatggtggttctggttcgccgatacttggttattggaagattaaaggactggttcagcccacacgcctcctgctagaatacttagaggaaaaatatgaagagcacctgtacgaacgtgatgagggggacaaatggcgaaacaagaaatttgaattgggcttagaatttccaaatttgccgtattatatcgatggcgacgtaaaactgacccaatcaatggccattattcgctacatcgcagataaacataacatgctgggtggctgccctaaagaacgggctgagatctccatgctggaaggtgcggtgctcgacattcgctacggcgtcagtagaattgcgtatagcaaggatttcgaaactttaaaagtggatttcctgagcaaacttccggagatgctgaaaatgtttgaggataggctttgtcataagacgtatctcaatggtgatcatgttacccacccggactttatgctgtacgacgcccttgatgtcgttctgtatatggatcccatgtgcctggacgccttcccgaaattagtgtgttttaaaaaacgtatcgaagcgattccacagatcgataaatacttgaagtcttctaaatatattgcttggcctctgcaaggctggcaggcaacgttcggtgggggagatcatccgccaaaatcagatctggtgccgcgtgggagccctggcatacaccgcgacggtggttctggtgagaacctgtactttcaaagctcagataatgggcctcaaaaccagcgcaacgctccacgtataaccttcggtggcccgtctgactccacaggcagcaaccagaatggtgagcgtagtggagccaggtctaagcagcgccgtccccagggtctgccgaacaacacggcgagctggtttactgcgcttacccaacacggtaaagaagacttaaaattcccgcgtggccagggcgtcccgatcaacactaactcttccccggatgatcagattggttattaccgcagagcaactcgtcggattcgcggcggcgacggtaaaatgaaagatttgtctccgcgttggtacttttactatctcggcaccggtccggaagctggactgccctacggggcaaacaaggacgggatcatttgggtggctaccgaaggtgccctgaatactccaaaagatcatatcggcacccgtaaccctgctaataacgctgcgatcgttctgcaactgcctcagggtacaactctgccaaaaggcttctatgcagaagggtcgcgtggtggcagccaggcgagtagccgtagcagcgagcgctctcgcaactcgtcccgtaactccactccgggctctgagcgcggcacggaaccggctcgtatggcaggtaacggtggtgacgctgctctggcgctgctactgctggacaggctgaaccagctggagtcgaagatgagtggtaaaggccaacagcagcagggccagaccgttaccaaaaagagcgcagctgaagcatctaaaaaaccgcgacagaaacgtaccgcgactaaagcgtacaatgtaacacaggccttcggtcgtcgaggtccggagcaaactcaaggaaactttggcgatcaggaattaatccgccaggggaccgactacaaacactggccgcaaattgcccagttcgccccatccgctagtgcattcttcggtatgagccgcatcggcatggaagtaacgccaagtggtacgtggctgacctacaccggtgctatcaagcttgatgacaaggacccgaactttaaagaccaggttattctgcttaacaaacatattgatgcctataaaactttcccgccgaccgaacccaaaaaggacaaaaagaaaaaagctgatgaaacccaggctctaccgcagcgtcagaaaaaacagcaaactgtgactctgctgccagctgcggacctggatgatttttccaagcagctgcaacagtctatgagctctgcggactctacgcaggcttaa

SEQ ID NO: 363 - DNA, 2016 bp, Artificial Sequence
  Description of Artificial Sequence: Synthetic polynucleotide
atgcaccatcatcaccatcatggtggttctggttcgccgatacttggttattggaagattaaaggactggttcagcccacacgcctcctgctagaatacttagaggaaaaatatgaagagcacctgtacgaacgtgatgagggggacaaatggcgaaacaagaaatttgaattgggcttagaatttccaaatttgccgtattatatcgatggcgacgtaaaactgacccaatcaatggccattattcgctacatcgcagataaacataacatgctgggtggctgccctaaagaacgggctgagatctccatgctggaaggtgcggtgctcgacattcgctacggcgtcagtagaattgcgtatagcaaggatttcgaaactttaaaagtggatttcctgagcaaacttccggagatgctgaaaatgtttgaggataggctttgtcataagacgtatctcaatggtgatcatgttacccacccggactttatgctgtacgacgcccttgatgtcgttctgtatatggatcccatgtgcctggacgccttcccgaaattagtgtgttttaaaaaacgtatcgaagcgattccacagatcgataaatacttgaagtcttctaaatatattgcttggcctctgcaaggctggcaggcaacgttcggtgggggagatcatccgccaaaatcagatctggtgccgcgtgggagccctggcatacaccgcgacggtggttctggtgagaacctgtactttcaaagctcagataatgggcctcaaaaccagcgcaacgctccacgtataaccttcggtggcccgtctgactccacaggcagcaaccagaatggtgagcgtagtggagccaggtctaagcagcgccgtccccagggtctgccgaacaacacggcgagctggtttactgcgcttacccaacacggtaaagaagacttaaaattcccgcgtggccagggcgtcccgatcaacactaactcttccccggatgatcagattggttattaccgcagagcaactcgtcggattcgcggcggcgacggtaaaatgaaagatttgtctccgcgttggtacttttactatctcggcaccggtccggaagctggactgccctacggggcaaacaaggacgggatcatttgggtggctaccgaaggtgccctgaatactccaaaagatcatatcggcacccgtaaccctgctaataacgctgcgatcgttctgcaactgcctcagggtacaactctgccaaaaggcttctatgcagaagggtcgcgtggtggcagccaggcgagtagccgtagcagctcccgctctcgcaactcgtcccgtaactccactccgggctcttctcgcggcacgtccccggctcgtatggcaggtaacggtggtgacgctgctctggcgctgctactgctggacaggctgaaccagctggagtcgaagatgagtggtaaaggccaacagcagcagggccagaccgttaccaaaaagagcgcagctgaagcatctaaaaaaccgcgacagaaacgtaccgcgactaaagaatacaatgtaacacaggccttcggtcgtcgaggtccggagcaaactcaaggaaactttggcgatcaggatttaatcaaactcgggaccgactacaaacactggccgcaaattgcccagttcgccccatccgctagtgcattcttcggtatgagccgcatcggcatggaagaaacgccaagtggtacgtggctgacctacaccggtgctatcaagcttgataaaaaggacccgaactttaaagaccaggttattctgcttaacaaacatattgatgcctataaaactttcccgccgaccgaacccaaaaaggacaaaaagaaaaaagctgatgaaacccaggctctaccgcagcgtcagaaaaaacagcaaactgtgactctgctgccagctgcggacctggatgatttttccaagcagctgcaacagtctatgagctctgcggactctacgcaggcttaa

SEQ ID NO: 364 - DNA, 2016 bp, Artificial Sequence
  Description of Artificial Sequence: Synthetic polynucleotide
atgcaccatcatcaccatcatggtggttctggttcgccgatacttggttattggaagattaaaggactggttcagcccacacgcctcctgctagaatacttagaggaaaaatatgaagagcacctgtacgaacgtgatgagggggacaaatggcgaaacaagaaatttgaattgggcttagaatttccaaatttgccgtattatatcgatggcgacgtaaaactgacccaatcaatggccattattcgctacatcgcagataaacataacatgctgggtggctgccctaaagaacgggctgagatctccatgctggaaggtgcggtgctcgacattcgctacggcgtcagtagaattgcgtatagcaaggatttcgaaactttaaaagtggatttcctgagcaaacttccggagatgctgaaaatgtttgaggataggctttgtcataagacgtatctcaatggtgatcatgttacccacccggactttatgctgtacgacgcccttgatgtcgttctgtatatggatcccatgtgcctggacgccttcccgaaattagtgtgttttaaaaaacgtatcgaagcgattccacagatcgataaatacttgaagtcttctaaatatattgcttggcctctgcaaggctggcaggcaacgttcggtgggggagatcatccgccaaaatcagatctggtgccgcgtgggagccctggcatacaccgcgacggtggttctggtgagaacctgtactttcaaagctcagataatgggcctcaaaaccagcgcaacgctccacgtataaccttcggtggcccgtctgactccacaggcagcaaccagaatggtgagcgtagtggagccaggtctaagcagcgccgtccccagggtctgccgaacaacacggcgagctggtttactggccttacccaacacggtaaagaagacttaaaattcccgccaggccagggcgtcccgatcaacactaactcttccccggatgatcagattggttattaccgcagagcaactcgtcggattcgcggcggcgacggtaaaatgaaagatttgcctccgcgttggtacttttactatctcggcaccggtccggaagctgatctgccctacgggcaagttaaggacgggatcttttgggtggctgaagaaggtgccctgaatactccaaaagatcatatcggcacccgtaaccctgctaataacgctgcgatcccgctgcaactgcctccgggtacaactctgccaaaaggcttctatgcagaagggtcgcgtggtggcagccaggcgagtagccgtagcagctcccgctctcgcaactcgtcccgtaactccactccgggctcttctcgcggcacgtccccggctcgtatggcaggtaacggtggtgacgctgctctggcgctgctactgctggacaggctgaaccagctggagtcgaagatgagtggtaaaggccaacagcagcagggccagaccgttaccaaaaagagcgcagctgaagcatctaaaaaaccgcgacagaaacgtaccgcgactaaagcgtacaatgtaacacaggccttcggtcgtcgaggtccggagcaaactcaaggaaactttggcgatcaggaattaatccgccaggggaccgactacaaacactggccgcaaattgcccagttcgccccatccgctagtgcattcttcggtatgagccgcatcggcatggaagtaacgccaagtggtacgtggctgacctacaccggtgctatcaagcttgatgacaaggacccgaactttaaagaccaggttattctgcttaacaaacatattgatgcctataaaactttcccgccgaccgaacccaaaaaggacaaaaagaaaaaagctgatgaaacccaggctctaccgcagcgtcagaaaaaacagcaaactgtgactctgctgccagctgcggacctggatgatttttccaagcagctgcaacagtctatgagctctgcggactctacgcaggcttaa

SEQ ID NO: 365 - DNA, 2016 bp, Artificial Sequence
  Description of Artificial Sequence: Synthetic polynucleotide
atgcaccatcatcaccatcatggtggttctggttcgccgatacttggttattggaagattaaaggactggttcagcccacacgcctcctgctagaatacttagaggaaaaatatgaagagcacctgtacgaacgtgatgagggggacaaatggcgaaacaagaaatttgaattgggcttagaatttccaaatttgccgtattatatcgatggcgacgtaaaactgacccaatcaatggccattattcgctacatcgcagataaacataacatgctgggtggctgccctaaagaacgggctgagatctccatgctggaaggtgcggtgctcgacattcgctacggcgtcagtagaattgcgtatagcaaggatttcgaaactttaaaagtggatttcctgagcaaacttccggagatgctgaaaatgtttgaggataggctttgtcataagacgtatctcaatggtgatcatgttacccacccggactttatgctgtacgacgcccttgatgtcgttctgtatatggatcccatgtgcctggacgccttcccgaaattagtgtgttttaaaaaacgtatcgaagcgattccacagatcgataaatacttgaagtcttctaaatatattgcttggcctctgcaaggctggcaggcaacgttcggtgggggagatcatccgccaaaatcagatctggtgccgcgtgggagccctggcatacaccgcgacggtggttctggtgagaacctgtactttcaaagctcagataatgggcctcaaaaccagcgcaacgctccacgtataaccttcggtggcccgtctgactccacaggcagcaaccagaatggtgagcgtagtggagccaggtctaagcagcgccgtccccagggtctgccgaacaacacggcgagctggtttactgcgcttacccaacacggtaaagaagacttaaaattcccgcgtggccagggcgtcccgatcaacactaactcttccccggatgatcagattggttattaccgcagagcaactcgtcggattcgcggcggcgacggtaaaatgaaagatttgtctccgcgttggtacttttactatctcggcaccggtccggaagctggactgccctacggggcaaacaaggacgggatcatttgggtggctaccgaaggtgccctgaatactccaaaagatcatatcggcaaacgtaaccctgctaataacgctgcgatcgttctgcaactgcctcagggtacaactctgccaaaaggcttctatgcagaagggtcgcgtggtggcagccaggcgagtagccgtagcagctcccgctctcgcaactcgtcccgtaactccactccgggctcttctcgcggcacgtccccggctcgtatggcaggtaacggtggtgacgctgctctggcgctgctactgctggacaggctgaaccagctggagtcgaagatgagtggtaaaggccaacagcagcagggccagaccgttaccaaaaagagcgcagctgaagcatctaaaaaaccgcgacagaaacgtaccgcgactaaagcgtacaatgtaacacaggccttcggtcgtcgaggtccggagcaaactcaaggaaactttggcgatcaggaattaatccgccaggggaccgactacaaacactggccgcaaattgcccagttcgccccatccgctagtgcattcttcggtatgagccgcatcggcatggaagtaacgccaagtggtacgtggctgacctacaccggtgctatcaagcttgatgacaaggacccgaactttaaagaccaggttattctgcttaacaaacatattgatgcctataaaactttcccgccgaccgaacccaaaaaggacaaaaagaaaaaagctgatgaaacccaggctctaccgcagcgtcagaaaaaacagcaaactgtgactctgctgccagctgcggacctggatgatttttccaagcagctgcaacagtctatgagctctgcggactctacgcaggcttaa

SEQ ID NO: 366 - DNA, 2016 bp, Artificial Sequence
  Description of Artificial Sequence: Synthetic polynucleotide
atgcaccatcatcaccatcatggtggttctggttcgccgatacttggttattggaagattaaaggactggttcagcccacacgcctcctgctagaatacttagaggaaaaatatgaagagcacctgtacgaacgtgatgagggggacaaatggcgaaacaagaaatttgaattgggcttagaatttccaaatttgccgtattatatcgatggcgacgtaaaactgacccaatcaatggccattattcgctacatcgcagataaacataacatgctgggtggctgccctaaagaacgggctgagatctccatgctggaaggtgcggtgctcgacattcgctacggcgtcagtagaattgcgtatagcaaggatttcgaaactttaaaagtggatttcctgagcaaacttccggagatgctgaaaatgtttgaggataggctttgtcataagacgtatctcaatggtgatcatgttacccacccggactttatgctgtacgacgcccttgatgtcgttctgtatatggatcccatgtgcctggacgccttcccgaaattagtgtgttttaaaaaacgtatcgaagcgattccacagatcgataaatacttgaagtcttctaaatatattgcttggcctctgcaaggctggcaggcaacgttcggtgggggagatcatccgccaaaatcagatctggtgccgcgtgggagccctggcatacaccgcgacggtggttctggtgagaacctgtactttcaaagctcagataatgggcctcaaaaccagcgcaacgctccacgtataaccttcggtggcccgtctgactccacaggcagcaaccagaatggtgagcgtagtggagccaggtctaagcagcgccgtccccagggtctgccgaacaacacggcgagctggtttactgcgcttacccaacacggtaaagaagacttaaaattcccgcgtggccagggcgtcccgatcaacactaactcttccccggatgatcagattggttattaccgcagagcaactcgtcggattcgcggcggcgacggtaaaatgaaagatttgtctccgcgttggtacttttactatctcggcaccggtccggaagctggactgccctacggggcaaacaaggacgggatcatttgggtggctaccgaaggtgccctgaatactccaaaagatcatatcggcacccgtaaccctgctaataacgctgcgatcgttctgcaactgcctcagggtacaactctgccaaaaggcttctatgcagaagggtcgcgtggtggcagccaggcgagtagccgtagcagctcccgctctcgcaactcgtcccgtaactccactccgggctcttctcgcggcacgtccccggctcgtatggcaggtaacggtggtgacgctgctctggcgctgctactgctggacaggctgaaccagctggagtcgaagatgagtggtaaaggccaacagcagcagggccagaccgttaccaaaaagagcgcagctgaagcatctaaaaaaccgcgacagaaacgtaccgcgactaaagcgtacaatgtaacacaggccttcggtcgtcgaggtccggagcaaactcaaggaaactttggcgatcaggaattaatccgccaggggaccgactacaaacactggccgcaaattgcccagttcgccccatccgctagtgcattcttcggtatgagccgcatcgatatggaagtaacgccaagtggtacgtggctgacctacaccggtgctatcaagcttgatgacaaggacccgaactttaaagaccaggttattctgcttaacaaacatattgatgcctataaaactttcccgccgaccgaacccaaaaaggacaaaaagaaaaaagctgatgaaacccaggctctaccgcagcgtcagaaaaaacagcaaactgtgactctgctgccagctgcggacctggatgatttttccaagcagctgcaacagtctatgagctctgcggactctacgcaggcttaa

SEQ ID NO: 367 - DNA, 2016 bp, Artificial Sequence
  Description of Artificial Sequence: Synthetic polynucleotide
atgcaccatcatcaccatcatggtggttctggttcgccgatacttggttattggaagattaaaggactggttcagcccacacgcctcctgctagaatacttagaggaaaaatatgaagagcacctgtacgaacgtgatgagggggacaaatggcgaaacaagaaatttgaattgggcttagaatttccaaatttgccgtattatatcgatggcgacgtaaaactgacccaatcaatggccattattcgctacatcgcagataaacataacatgctgggtggctgccctaaagaacgggctgagatctccatgctggaaggtgcggtgctcgacattcgctacggcgtcagtagaattgcgtatagcaaggatttcgaaactttaaaagtggatttcctgagcaaacttccggagatgctgaaaatgtttgaggataggctttgtcataagacgtatctcaatggtgatcatgttacccacccggactttatgctgtacgacgcccttgatgtcgttctgtatatggatcccatgtgcctggacgccttcccgaaattagtgtgttttaaaaaacgtatcgaagcgattccacagatcgataaatacttgaagtcttctaaatatattgcttggcctctgcaaggctggcaggcaacgttcggtgggggagatcatccgccaaaatcagatctggtgccgcgtgggagccctggcatacaccgcgacggtggttctggtgagaacctgtactttcaaagctcagataatgggcctcaaaaccagcgcaacgctccacgtataaccttcggtggcccgtctgactccacaggcagcaaccagaatggtgagcgtagtggagccaggtctaagcagcgccgtccccagggtctgccgaacaacacggcgagctggtttactggccttacccaacacggtaaagaagacttaaaattcccgcgtggccagggcgtcccgatcaacactaactcttccccggatgatcagattggttattaccgcagagcaactcgtcggattcgcggcggcgacggtaaaatgaaagatttgtctccgcgttggtacttttactatctcggcaccggtccggaagctggactgccctacggggcaaacaaggacgggatcatttgggtggctaccgaaggtgccctgaatactccaaaagatcatatcggcacccgtaaccctgctaataacgctgcgatcgttctgcaactgcctcagggtacaactctgccaaaaggcttctatgcagaagggtcgcgtggtggcagccaggcgagtagccgtagcagctcccgctctcgcaactcgtcccgtaactccactccgggctcttctcgcggcacgtccccggctcgtatggcaggtaacggtggtgacgctgctctggcgctgctactgctggacaggctgaaccagctggagtcgaagatgagtggtaaaggccaacagcagcagggccagaccgttaccaaaaagagcgcagctgaagcatctaaaaaaccgcgacagaaacgtaccgcgactaaagcgtacaatgtaacacaggccttcggtcgtcgaggtccggagcaaactcaaggaaactttggcgatcaggaattaatccgccaggggaccgactacaaacactggccgcaaattgcccagttcgccccatccgctagtgcattcttcggtatgagccgcatcggcatggaagtaacgccaagtggtacgtggctgacctacaccggtgctatcaagcttgatgacaaggacccgaactttaaagaccaggttattctgcttaacaaacatattgatgcctataaaactttcccgccgaccgaacccaaaaaggacaaaaagaaaaaagctgatgaaacccaggctctaccgcagcgtcagaaaaaacagcaaactgtgactctgctgccagctgcggacctggatgatttttccaagcagctgcaacagtctatgagctctgcggactctacgcaggcttaa

SEQ ID NO: 368 - DNA, 2016 bp, Artificial Sequence
  Description of Artificial Sequence: Synthetic polynucleotide
atgcaccatcatcaccatcatggtggttctggttcgccgatacttggttattggaagattaaaggactggttcagcccacacgcctcctgctagaatacttagaggaaaaatatgaagagcacctgtacgaacgtgatgagggggacaaatggcgaaacaagaaatttgaattgggcttagaatttccaaatttgccgtattatatcgatggcgacgtaaaactgacccaatcaatggccattattcgctacatcgcagataaacataacatgctgggtggctgccctaaagaacgggctgagatctccatgctggaaggtgcggtgctcgacattcgctacggcgtcagtagaattgcgtatagcaaggatttcgaaactttaaaagtggatttcctgagcaaacttccggagatgctgaaaatgtttgaggataggctttgtcataagacgtatctcaatggtgatcatgttacccacccggactttatgctgtacgacgcccttgatgtcgttctgtatatggatcccatgtgcctggacgccttcccgaaattagtgtgttttaaaaaacgtatcgaagcgattccacagatcgataaatacttgaagtcttctaaatatattgcttggcctctgcaaggctggcaggcaacgttcggtgggggagatcatccgccaaaatcagatctggtgccgcgtgggagccctggcatacaccgcgacggtggttctggtgagaacctgtactttcaaagctcagataatgggcctcaaaaccagcgcaacgctccacgtataaccttcggtggcccgtctgactccacaggcagcaaccagaatggtgagcgtagtggagccaggtctaagcagcgccgtccccagggtctgccgaacaacacggcgagctggtttactggccttacccaatttggtaaagaagacttaaaattcccgccgggccagggcgtcccgatcaacactaactcttccccggatgatcagattggttattaccgcagagcaactcgtcggattcgcggcggcgacggtaaaatgaaagatttgccaccgcgttggtacttttactatctcggcaccggtccgcacgctgatctgccctacgggcaaaagcaacctggggtgttttgggtggctcgccctggtgccctgaatactccaaaagatcatatcggcacccgtaaccctgctaataacgctgcgatcccgctgcaactgcctccgggtacaaaactgccaaaaggcttctatgcagaagggtcgcgtggtggcagccaggcgagtagccgtagcagctcccgctctcgcaactcgtcccgtaactccactccgggctcttctcgcggcacgtccccggctcgtatggcaggtaacggtggtgacgctgctctggcgctgctactgctggacaggctgaaccagctggagtcgaagatgagtggtaaaggccaacagcagcagggccagaccgttaccaaaaagagcgcagctgaagcatctaaaaaaccgcgacagaaacgtaccgcgactaaagcgtacaatgtaacacaggccttcggtcgtcgaggtccggagcaaactcaaggaaactttggcgatcaggaattaatccgccaggggaccgactacaaacactggccgcaaattgcccagttcgccccatccgctagtgcattcttcggtatgagccgcatcggcatggaagtaacgccaagtggtacgtggctgacctacaccggtgctatcaagcttgatgacaaggacccgaactttaaagaccaggttattctgcttaacaaacatattgatgcctataaaactttcccgccgaccgaacccaaaaaggacaaaaagaaaaaagctgatgaaacccaggctctaccgcagcgtcagaaaaaacagcaaactgtgactctgctgccagctgcggacctggatgatttttccaagcagctgcaacagtctatgagctctgcggactctacgcaggcttaa

SEQ ID NO: 369 - DNA, 2016 bp, Artificial Sequence
  Description of Artificial Sequence: Synthetic polynucleotide
atgcaccatcatcaccatcatggtggttctggttcgccgatacttggttattggaagattaaaggactggttcagcccacacgcctcctgctagaatacttagaggaaaaatatgaagagcacctgtacgaacgtgatgagggggacaaatggcgaaacaagaaatttgaattgggcttagaatttccaaatttgccgtattatatcgatggcgacgtaaaactgacccaatcaatggccattattcgctacatcgcagataaacataacatgctgggtggctgccctaaagaacgggctgagatctccatgctggaaggtgcggtgctcgacattcgctacggcgtcagtagaattgcgtatagcaaggatttcgaaactttaaaagtggatttcctgagcaaacttccggagatgctgaaaatgtttgaggataggctttgtcataagacgtatctcaatggtgatcatgttacccacccggactttatgctgtacgacgcccttgatgtcgttctgtatatggatcccatgtgcctggacgccttcccgaaattagtgtgttttaaaaaacgtatcgaagcgattccacagatcgataaatacttgaagtcttctaaatatattgcttggcctctgcaaggctggcaggcaacgttcggtgggggagatcatccgccaaaatcagatctggtgccgcgtgggagccctggcatacaccgcgacggtggttctggtgagaacctgtactttcaaagctcagataatgggcctcaaaaccagcgcaacgctccacgtataaccttcggtggcccgtctgactccacaggcagcaaccagaatggtgagcgtagtggagccaggtctaagcagcgccgtccccagggtctgccgaacaacacggcgagctggtttactgcgcttacccaacacggtaaagaagacttaaaattcccgcgtggccagggcgtcccgatcaacactaactcttccccggatgatcagattggttattaccgcagagcaactcgtcggattcgcggcggcgacggtaaaatgaaagatttgtctccgcgttggtacttttactatctcggcaccggtccggaagctggactgccctacggggcaaacaaggacgggatcatttgggtggctaccgaaggtgccctgaatactccaaaagatcatatcggcacccgtaaccctgctaataacgctgcgatcgttctgcaactgcctcagggtacaactctgccacccggcttctatgcagaagggtcgcgtggtggcagccaggcgagtagccgtagcagctcccgctctcgcaactcgtcccgtaactccactccgggctcttctcgcggcacgtccccggctcgtatggcaggtaacggtggtgacgctgctctggcgctgctactgctggacaggctgaaccagctggagtcgaagatgagtggtaaaggccaacagcagcagggccagaccgttaccaaaaagagcgcagctgaagcatctaaaaaaccgcgacagaaacgtaccgcgactaaagcgtacaatgtaacacaggccttcggtcgtcgaggtccggagcaaactcaaggaaactttggcgatcaggaattaatccgccaggggaccgactacaaacactggccgcaaattgcccagttcgccccatccgctagtgcattcttcggtatgagccgcatcggcatggaagtaacgccaagtggtacgtggctgacctacaccggtgctatcaagcttgatgacaaggacccgaactttaaagaccaggttattctgcttaacaaacatattgatgcctataaaactttcccgccgaccgaacccaaaaaggacaaaaagaaaaaagctgatgaaacccaggctctaccgcagcgtcagaaaaaacagcaaactgtgactctgctgccagctgcggacctggatgatttttccaagcagctgcaacagtctatgagctctgcggactctacgcaggcttaa

SEQ ID NO: 370 - DNA, 2016 bp, Artificial Sequence
  Description of Artificial Sequence: Synthetic polynucleotide
atgcaccatcatcaccatcatggtggttctggttcgccgatacttggttattggaagattaaaggactggttcagcccacacgcctcctgctagaatacttagaggaaaaatatgaagagcacctgtacgaacgtgatgagggggacaaatggcgaaacaagaaatttgaattgggcttagaatttccaaatttgccgtattatatcgatggcgacgtaaaactgacccaatcaatggccattattcgctacatcgcagataaacataacatgctgggtggctgccctaaagaacgggctgagatctccatgctggaaggtgcggtgctcgacattcgctacggcgtcagtagaattgcgtatagcaaggatttcgaaactttaaaagtggatttcctgagcaaacttccggagatgctgaaaatgtttgaggataggctttgtcataagacgtatctcaatggtgatcatgttacccacccggactttatgctgtacgacgcccttgatgtcgttctgtatatggatcccatgtgcctggacgccttcccgaaattagtgtgttttaaaaaacgtatcgaagcgattccacagatcgataaatacttgaagtcttctaaatatattgcttggcctctgcaaggctggcaggcaacgttcggtgggggagatcatccgccaaaatcagatctggtgccgcgtgggagccctggcatacaccgcgacggtggttctggtgagaacctgtactttcaaagctcagataatgggcctcaaaaccagcgcaacgctccacgtataaccttcggtggcccgtctgactccacaggcagcaaccagaatggtgagcgtagtggagccaggtctaagcagcgccgtccccagggtctgccgaacaacacggcgagctggtttactgcgcttacccaacacggtaaagaagacttaaaattcccgcgtggccagggcgtcccgatcaacactaactcttccccggatgatcagattggttattaccgcagagcaactcgtcggattcgcggcggcgacggtaaaatgaaagatttgtctccgcgttggtacttttactatctcggcaccggtccggaagctggactgccctacggggcaaacaaggacgggatcatttgggtggctaccgaaggtgccctgaatactccaaaagatcatatcggcacccgtaaccctgctaataacgctgcgatcgttctgcaactgcctcagggtacaactctgccaaaaggcttctatgcagaagggtcgcgtggtggcagccaggcgagtagccgtagcagctcccgctctcgcaactcgtcccgtaactccactccgggctcttctcgcggcacgtccccggctcgtatggcaggtaacggtggtgacgctgctctggcgctgctactgctggacaggctgaaccagctggagtcgaagatgagtggtaaaggccaacagcagcagggccagaccgttaccaaaaagagcgcagctgaagcatctaaaaaaccgcgacagaaacgtaccgcgactaaagcgtacaatgtaacacaggccttcggtcgtcgaggtccgcggcaaactcaaggaaactttggcgatcaggaattaatccgccaggggaccgactacaaacactggccgcaaattgcccagttcgccccatccgctagtgcattcttcggtatgagccgcatcggcatggaagtaacgccaagtggtacgtggctgacctacaccggtgctatcaagcttgatgacaaggacccgaactttaaagaccaggttattctgcttaacaaacatattgatgcctataaaactttcccgccgaccgaacccaaaaaggacaaaaagaaaaaagctgatgaaacccaggctctaccgcagcgtcagaaaaaacagcaaactgtgactctgctgccagctgcggacctggatgatttttccaagcagctgcaacagtctatgagctctgcggactctacgcaggcttaa

SEQ ID NO: 371 - DNA, 2016 bp, Artificial Sequence
  Description of Artificial Sequence: Synthetic polynucleotide
atgcaccatcatcaccatcatggtggttctggttcgccgatacttggttattggaagattaaaggactggttcagcccacacgcctcctgctagaatacttagaggaaaaatatgaagagcacctgtacgaacgtgatgagggggacaaatggcgaaacaagaaatttgaattgggcttagaatttccaaatttgccgtattatatcgatggcgacgtaaaactgacccaatcaatggccattattcgctacatcgcagataaacataacatgctgggtggctgccctaaagaacgggctgagatctccatgctggaaggtgcggtgctcgacattcgctacggcgtcagtagaattgcgtatagcaaggatttcgaaactttaaaagtggatttcctgagcaaacttccggagatgctgaaaatgtttgaggataggctttgtcataagacgtatctcaatggtgatcatgttacccacccggactttatgctgtacgacgcccttgatgtcgttctgtatatggatcccatgtgcctggacgccttcccgaaattagtgtgttttaaaaaacgtatcgaagcgattccacagatcgataaatacttgaagtcttctaaatatattgcttggcctctgcaaggctggcaggcaacgttcggtgggggagatcatccgccaaaatcagatctggtgccgcgtgggagccctggcatacaccgcgacggtggttctggtgagaacctgtactttcaaagctcagataatgggcctcaaaaccagcgcaacgctccacgtataaccttcggtggcccgtctgactccacaggcagcaaccagaatggtgagcgtagtggagccaggtctaagcagcgccgtccccagggtctgccgaacaacacggcgagctggtttactgcgcttacccaacacggtaaagaagacttaaaattcccgcgtggccagggcgtcccgatcaacactaactcttccccggatgatcagattggttattaccgcagagcaactcgtcggattcgcggcggcgacggtaaaatgaaagatttgtctccgcgttggtacttttactatctcggcaccggtccggaagctaaactgccctacggggcaaacaaggacgggatcatttgggtggctaccgaaggtgccctgaatactccaaaagatcatatcggcacccgtaaccctgctaataacgctgcgatcgttctgcaactgcctcagggtacaactctgccaaaaggcttctatgcagaagggtcgcgtggtggcagccaggcgagtagccgtagcagctcccgctctcgcaactcgtcccgtaactccactccgggctcttctcgcggcacgtccccggctcgtatggcaggtaacggtggtgacgctgctctggcgctgctactgctggacaggctgaaccagctggagtcgaagatgagtggtaaaggccaacagcagcagggccagaccgttaccaaaaagagcgcagctgaagcatctaaaaaaccgcgacagaaacgtaccgcgactaaagcgtacaatgtaacacaggccttcggtcgtcgaggtccggagcaaactcaaggaaactttggcgatcaggaattaatccgccaggggaccgactacaaacactggccgcaaattgcccagttcgccccatccgctagtgcattcttcggtatgagccgcatcggcatggaagtaacgccaagtggtacgtggctgacctacaccggtgctatcaagcttgatgacaaggacccgaactttaaagaccaggttattctgcttaacaaacatattgatgcctataaaactttcccgccgaccgaacccaaaaaggacaaaaagaaaaaagctgatgaaacccaggctctaccgcagcgtcagaaaaaacagcaaactgtgactctgctgccagctgcggacctggatgatttttccaagcagctgcaacagtctatgagctctgcggactctacgcaggcttaa

SEQ ID NO: 372 - DNA, 2016 bp, Artificial Sequence
  Description of Artificial Sequence: Synthetic polynucleotide
atgcaccatcatcaccatcatggtggttctggttcgccgatacttggttattggaagattaaaggactggttcagcccacacgcctcctgctagaatacttagaggaaaaatatgaagagcacctgtacgaacgtgatgagggggacaaatggcgaaacaagaaatttgaattgggcttagaatttccaaatttgccgtattatatcgatggcgacgtaaaactgacccaatcaatggccattattcgctacatcgcagataaacataacatgctgggtggctgccctaaagaacgggctgagatctccatgctggaaggtgcggtgctcgacattcgctacggcgtcagtagaattgcgtatagcaaggatttcgaaactttaaaagtggatttcctgagcaaacttccggagatgctgaaaatgtttgaggataggctttgtcataagacgtatctcaatggtgatcatgttacccacccggactttatgctgtacgacgcccttgatgtcgttctgtatatggatcccatgtgcctggacgccttcccgaaattagtgtgttttaaaaaacgtatcgaagcgattccacagatcgataaatacttgaagtcttctaaatatattgcttggcctctgcaaggctggcaggcaacgttcggtgggggagatcatccgccaaaatcagatctggtgccgcgtgggagccctggcatacaccgcgacggtggttctggtgagaacctgtactttcaaagctcagataatgggcctcaaaaccagcgcaacgctccacgtataaccttcggtggcccgtctgactccacaggcagcaaccagaatggtgagcgtagtggagccaggtctaagcagcgccgtccccagggtctgccgaacaacacggcgagctggtttactgcgcttacccaacacggtaaagaagacttaaaattcccgcgtggccagggcgtcccgatcaacactaactcttccccggatgatcagattggttattaccgcagagcaactcgtcggattcgcggcggcgacggtaaaatgaaagatttgtctccgcgttggtacttttactatctcggcaccggtccggaagctggactgccctacggggcaaacaaggacgggatcatttgggtggctaccgaaggtgccctgaatactccaaaagatcatatcggcacccgtaaccctgctaataacgctgcgatcgttctgcaactgcctcagggtacaactctgccaaaaggcttctatgcagaagggtcgcgtggtggcagccaggcgagtagccgtagcagctcccgctctcgcaactcgtcccgtaactccactccgggcgagtctcgcggcacggaaccggctcgtatggcaggtaacggtggtgacgctgctctggcgctgctactgctggacaggctgaaccagctggagtcgaagatgagtggtaaaggccaacagcagcagggccagaccgttaccaaaaagagcgcagctgaagcatctaaaaaaccgcgacagaaacgtaccgcgactaaagcgtacaatgtaacacaggccttcggtcgtcgaggtccggagcaaactcaaggaaactttggcgatcaggaattaatccgccaggggaccgactacaaacactggccgcaaattgcccagttcgccccatccgctagtgcattcttcggtatgagccgcatcggcatggaagtaacgccaagtggtacgtggctgacctacaccggtgctatcaagcttgatgacaaggacccgaactttaaagaccaggttattctgcttaacaaacatattgatgcctataaaactttcccgccgaccgaacccaaaaaggacaaaaagaaaaaagctgatgaaacccaggctctaccgcagcgtcagaaaaaacagcaaactgtgactctgctgccagctgcggacctggatgatttttccaagcagctgcaacagtctatgagctctgcggactctacgcaggcttaa

SEQ ID NO: 373 - DNA, 2016 bp, Artificial Sequence
  Description of Artificial Sequence: Synthetic polynucleotide
atgcaccatcatcaccatcatggtggttctggttcgccgatacttggttattggaagattaaaggactggttcagcccacacgcctcctgctagaatacttagaggaaaaatatgaagagcacctgtacgaacgtgatgagggggacaaatggcgaaacaagaaatttgaattgggcttagaatttccaaatttgccgtattatatcgatggcgacgtaaaactgacccaatcaatggccattattcgctacatcgcagataaacataacatgctgggtggctgccctaaagaacgggctgagatctccatgctggaaggtgcggtgctcgacattcgctacggcgtcagtagaattgcgtatagcaaggatttcgaaactttaaaagtggatttcctgagcaaacttccggagatgctgaaaatgtttgaggataggctttgtcataagacgtatctcaatggtgatcatgttacccacccggactttatgctgtacgacgcccttgatgtcgttctgtatatggatcccatgtgcctggacgccttcccgaaattagtgtgttttaaaaaacgtatcgaagcgattccacagatcgataaatacttgaagtcttctaaatatattgcttggcctctgcaaggctggcaggcaacgttcggtgggggagatcatccgccaaaatcagatctggtgccgcgtgggagccctggcatacaccgcgacggtggttctggtgagaacctgtactttcaaagctcagataatgggcctcaaaaccagcgcaacgctccacgtataaccttcggtggcccgtctgactccacaggcagcaaccagaatggtgagcgtagtggagccaggtctaagcagcgccgtccccagggtctgccgaacaacacggcgagctggtttactgcgcttacccaacacggtaaagaagacttaaaattcccgcgtggccagggcgtcccgatcaacactaactcttccccggatgatcagattggttattaccgcagagcaactcgtcggattcgcggcggcgacggtaaaatgaaagatttgtctccgcgttggtacttttactatctcggcaccggtccggaagctggactgccctacgggaccaacaaggacgggatcatttgggtggctaccgaaggtgccctgaatactccaaaagatcatatcggcacccgtaaccctgctaataacgctgcgatcgttctgcaactgcctcagggtacaactctgccaaaaggcttctatgcagaagggtcgcgtggtggcagccaggcgagtagccgtagcagctcccgctctcgcaactcgtcccgtaactccactccgggctcttctcgcggcacgtccccggctcgtatggcaggtaacggtggtgacgctgctctggcgctgctactgctggacaggctgaaccagctggagtcgaagatgagtggtaaaggccaacagcagcagggccagaccgttaccaaaaagagcgcagctgaagcatctaaaaaaccgcgacagaaacgtaccgcgactaaagcgtacaatgtaacacaggccttcggtcgtcgaggtccggagcaaactcaaggaaactttggcgatcaggaattaatccgccaggggaccgactacaaacactggccgcaaattgcccagttcgccccatccgctagtgcattcttcggtatgagccgcatcggcatggaagtaacgccaagtggtacgtggctgacctacaccggtgctatcaagcttgatgacaaggacccgaactttaaagaccaggttattctgcttaacaaacatattgatgcctataaaactttcccgccgaccgaacccaaaaaggacaaaaagaaaaaagctgatgaaacccaggctctaccgcagcgtcagaaaaaacagcaaactgtgactctgctgccagctgcggacctggatgatttttccaagcagctgcaacagtctatgagctctgcggactctacgcaggcttaa

SEQ ID NO: 374 - DNA, 2016 bp, Artificial Sequence
  Description of Artificial Sequence: Synthetic polynucleotide
atgcaccatcatcaccatcatggtggttctggttcgccgatacttggttattggaagattaaaggactggttcagcccacacgcctcctgctagaatacttagaggaaaaatatgaagagcacctgtacgaacgtgatgagggggacaaatggcgaaacaagaaatttgaattgggcttagaatttccaaatttgccgtattatatcgatggcgacgtaaaactgacccaatcaatggccattattcgctacatcgcagataaacataacatgctgggtggctgccctaaagaacgggctgagatctccatgctggaaggtgcggtgctcgacattcgctacggcgtcagtagaattgcgtatagcaaggatttcgaaactttaaaagtggatttcctgagcaaacttccggagatgctgaaaatgtttgaggataggctttgtcataagacgtatctcaatggtgatcatgttacccacccggactttatgctgtacgacgcccttgatgtcgttctgtatatggatcccatgtgcctggacgccttcccgaaattagtgtgttttaaaaaacgtatcgaagcgattccacagatcgataaatacttgaagtcttctaaatatattgcttggcctctgcaaggctggcaggcaacgttcggtgggggagatcatccgccaaaatcagatctggtgccgcgtgggagccctggcatacaccgcgacggtggttctggtgagaacctgtactttcaaagctcagataatgggcctcaaaaccagcgcaacgctccacgtataaccttcggtggcccgtctgactccacaggcagcaaccagaatggtgagcgtagtggagccaggtctaagcagcgccgtccccagggtctgccgaacaacacggcgagctggtttactgcgcttacccaacacggtaaagaagacttaaaattcccgcgtggccagggcgtcccgatcaacactaactcttccccggatgatcagattggttattaccgcagagcaactcgtcggattcgcggcggcgacggtaaaatgaaagatttgtctccgcgttggtacttttactatctcggcaccggtccggaagctggactgccctacggggcaaacaaggacgggatcatttgggtggctaccgaaggtgccctgaatactccaaaagatcatatcggcacccgtaaccctgctaataacgctgcggtagttctgcaactgcctcagggtacaactctgccaaaaggcttctatgcagaagggtcgcgtggtggcagccaggcgagtagccgtagcagctcccgctctcgcaactcgtcccgtaactccactccgggctcttctcgcggcacgtccccggctcgtatggcaggtaacggtggtgacgctgctctggcgctgctactgctggacaggctgaaccagctggagtcgaagatgagtggtaaaggccaacagcagcagggccagaccgttaccaaaaagagcgcagctgaagcatctaaaaaaccgcgacagaaacgtaccgcgactaaagcgtacaatgtaacacaggccttcggtcgtcgaggtccggagcaaactcaaggaaactttggcgatcaggaattaatccgccaggggaccgactacaaacactggccgcaaattgcccagttcgccccatccgctagtgcattcttcggtatgagccgcatcggcatggaagtaacgccaagtggtacgtggctgacctacaccggtgctatcaagcttgatgacaaggacccgaactttaaagaccaggttattctgcttaacaaacatattgatgcctataaaactttcccgccgaccgaacccaaaaaggacaaaaagaaaaaagctgatgaaacccaggctctaccgcagcgtcagaaaaaacagcaaactgtgactctgctgccagctgcggacctggatgatttttccaagcagctgcaacagtctatgagctctgcggactctacgcaggcttaa

SEQ ID NO: 375 - DNA, 2016 bp, Artificial Sequence
  Description of Artificial Sequence: Synthetic polynucleotide
atgcaccatcatcaccatcatggtggttctggttcgccgatacttggttattggaagattaaaggactggttcagcccacacgcctcctgctagaatacttagaggaaaaatatgaagagcacctgtacgaacgtgatgagggggacaaatggcgaaacaagaaatttgaattgggcttagaatttccaaatttgccgtattatatcgatggcgacgtaaaactgacccaatcaatggccattattcgctacatcgcagataaacataacatgctgggtggctgccctaaagaacgggctgagatctccatgctggaaggtgcggtgctcgacattcgctacggcgtcagtagaattgcgtatagcaaggatttcgaaactttaaaagtggatttcctgagcaaacttccggagatgctgaaaatgtttgaggataggctttgtcataagacgtatctcaatggtgatcatgttacccacccggactttatgctgtacgacgcccttgatgtcgttctgtatatggatcccatgtgcctggacgccttcccgaaattagtgtgttttaaaaaacgtatcgaagcgattccacagatcgataaatacttgaagtcttctaaatatattgcttggcctctgcaaggctggcaggcaacgttcggtgggggagatcatccgccaaaatcagatctggtgccgcgtgggagccctggcatacaccgcgacggtggttctggtgagaacctgtactttcaaagctcagataatgggcctcaaaaccagcgcaacgctccacgtataaccttcggtggcccgtctgactccacaggcagcaaccagaatggtgagcgtagtggagccaggtctaagcagcgccgtccccagggtctgccgaacaacacggcgagctggtttactgcgcttacccaacacggtaaagaagacttaaaattcccgcgtggccagggcgtcccgatcaacactaactcttccccggatgatcagattggttattaccgcagagcaactcgtcggattcgcggcggcgacggtaaaatgaaagatttgtctccgcgttggtacttttactatctcggcaccggtccggaagctggactgccctacggggcaaacaaggacgggatcatttgggtggctaccgaaggtgccctgaatactccaaaagatcatatcggcacccgtaaccctgctaataacgctgcgatcgttctgcaactgcctcagggtacaactctgccaaaaggcttctatgcagaagggtcgcgtggtggcagccaggcgagtagccgtagcagctcccgctctcgcaactcgtcccgtaactccactccgggctcttctcgcggcacgtccccggctcgtatggcaggtaacggtggtgacgctgctctggcgctgctactgctggacaggctgaaccagctggagtcgaagatgagtggtaaaggccaacagcagcagggccagaccgttaccaaaaagagcgcagctgaagcatctaaaaaaccgcgacagaaacgtaccgcgactaaagcgtacaatgtaacacaggccttcggtcgtcgaggtccggagcaaactcaaggaaactttggcgatcaggaattaatccgccaggggaccgactacaaacactggccgcaaattgcccagttcgccccatccgctagtgcattcttcggtatgagccgcatcggcatggaagtaacgccaagtggtacgtggctgacctacaccggtgctatcaagcttgatcgcaaggacccgaactttaaagaccaggttattctgcttaacaaacatattgatgcctataaaactttcccgccgaccgaacccaaaaaggacaaaaagaaaaaagctgatgaaacccaggctctaccgcagcgtcagaaaaaacagcaaactgtgactctgctgccagctgcggacctggatgatttttccaagcagctgcaacagtctatgagctctgcggactctacgcaggcttaa

SEQ ID NO: 376 - DNA, 2016 bp, Artificial Sequence
  Description of Artificial Sequence: Synthetic polynucleotide
atgcaccatcatcaccatcatggtggttctggttcgccgatacttggttattggaagattaaaggactggttcagcccacacgcctcctgctagaatacttagaggaaaaatatgaagagcacctgtacgaacgtgatgagggggacaaatggcgaaacaagaaatttgaattgggcttagaatttccaaatttgccgtattatatcgatggcgacgtaaaactgacccaatcaatggccattattcgctacatcgcagataaacataacatgctgggtggctgccctaaagaacgggctgagatctccatgctggaaggtgcggtgctcgacattcgctacggcgtcagtagaattgcgtatagcaaggatttcgaaactttaaaagtggatttcctgagcaaacttccggagatgctgaaaatgtttgaggataggctttgtcataagacgtatctcaatggtgatcatgttacccacccggactttatgctgtacgacgcccttgatgtcgttctgtatatggatcccatgtgcctggacgccttcccgaaattagtgtgttttaaaaaacgtatcgaagcgattccacagatcgataaatacttgaagtcttctaaatatattgcttggcctctgcaaggctggcaggcaacgttcggtgggggagatcatccgccaaaatcagatctggtgccgcgtgggagccctggcatacaccgcgacggtggttctggtgagaacctgtactttcaaagctcagataatgggcctcaaaaccagcgcaacgctccacgtataaccttcggtggcccgtctgactccacaggcagcaaccagaatggtgagcgtagtggagccaggtctaagcagcgccgtccccagggtctgccgaacaacacggcgagctggtttactgcgcttacccaacacggtaaagaagacttaaaattcccgcgtggccagggcgtcccgatcaacactaactcttccccggatgatcagattggttattaccgcagagcaactcgtcggattcgcggcggcgacggtaaaatgaaagatttgtctccgcgttggtacttttactatctcggcaccggtccggaagctggactgccctacggggcaaacaaggacgggatcatttgggtggctaccgaaggtgccctgaatactccaaaagatcatatcggcacccgtaaccctgctaataacgctgcgatcgttctgcaactgcctcagggtacaactctgccaaaaggcttctatgcagaagggtcgcgtggtggcagccaggcgagtagccgtagcagctcccgctctcgcaactcgtcccgtaactccactccgggcgaggaacgcggcacggagccggctcgtatggcaggtaacggtggtgacgctgctctggcgctgctactgctggacaggctgaaccagctggagtcgaagatgagtggtaaaggccaacagcagcagggccagaccgttaccaaaaagagcgcagctgaagcatctaaaaaaccgcgacagaaacgtaccgcgactaaagcgtacaatgtaacacaggccttcggtcgtcgaggtccggagcaaactcaaggaaactttggcgatcaggaattaatccgccaggggaccgactacaaacactggccgcaaattgcccagttcgccccatccgctagtgcattcttcggtatgagccgcatcggcatggaagtaacgccaagtggtacgtggctgacctacaccggtgctatcaagcttgatgacaaggacccgaactttaaagaccaggttattctgcttaacaaacatattgatgcctataaaactttcccgccgaccgaacccaaaaaggacaaaaagaaaaaagctgatgaaacccaggctctaccgcagcgtcagaaaaaacagcaaactgtgactctgctgccagctgcggacctggatgatttttccaagcagctgcaacagtctatgagctctgcggactctacgcaggcttaa

SEQ ID NO: 377 - DNA, 2016 bp, Artificial Sequence
  Description of Artificial Sequence: Synthetic polynucleotide
atgcaccatcatcaccatcatggtggttctggttcgccgatacttggttattggaagattaaaggactggttcagcccacacgcctcctgctagaatacttagaggaaaaatatgaagagcacctgtacgaacgtgatgagggggacaaatggcgaaacaagaaatttgaattgggcttagaatttccaaatttgccgtattatatcgatggcgacgtaaaactgacccaatcaatggccattattcgctacatcgcagataaacataacatgctgggtggctgccctaaagaacgggctgagatctccatgctggaaggtgcggtgctcgacattcgctacggcgtcagtagaattgcgtatagcaaggatttcgaaactttaaaagtggatttcctgagcaaacttccggagatgctgaaaatgtttgaggataggctttgtcataagacgtatctcaatggtgatcatgttacccacccggactttatgctgtacgacgcccttgatgtcgttctgtatatggatcccatgtgcctggacgccttcccgaaattagtgtgttttaaaaaacgtatcgaagcgattccacagatcgataaatacttgaagtcttctaaatatattgcttggcctctgcaaggctggcaggcaacgttcggtgggggagatcatccgccaaaatcagatctggtgccgcgtgggagccctggcatacaccgcgacggtggttctggtgagaacctgtactttcaaagctcagataatgggcctcaaaaccagcgcaacgctccacgtataaccttcggtggcccgtctgactccacaggcagcaaccagaatggtgagcgtagtggagccaggtctaagcagcgccgtccccagggtctgccgaacaacacggcgagctggtttactgcgcttacccaacacggtaaagaagacttaaaattcccgcgtggccagggcgtcccgatcaacactaactcttccccggatgatcagattggtgggtaccgcagagcaactcgtcggattcgcggcggcgacggtaaaatgaaagatttgtctccgcgttggtacttttactatctcggcaccggtccggaagctggactgccctacggggcaaacaaggacgggatcatttgggtggctaccgaaggtgccctgaatactccaaaagatcatatcggcacccgtaaccctgctaataacgctgcgatcgttctgcaactgcctcagggtacaactctgccaaaaggcttctatgcagaagggtcgcgtggtggcagccaggcgagtagccgtagcagctcccgctctcgcaactcgtcccgtaactccactccgggctcttctcgcggcacgtccccggctcgtatggcaggtaacggtggtgacgctgctctggcgctgctactgctggacaggctgaaccagctggagtcgaagatgagtggtaaaggccaacagcagcagggccagaccgttaccaaaaagagcgcagctgaagcatctaaaaaaccgcgacagaaacgtaccgcgactaaagcgtacaatgtaacacaggccttcggtcgtcgaggtccggagcaaactcaaggaaactttggcgatcaggaattaatccgccaggggaccgactacaaacactggccgcaaattgcccagttcgccccatccgctagtgcattcttcggtatgagccgcatcggcatggaagtaacgccaagtggtacgtggctgacctacaccggtgctatcaagcttgatgacaaggacccgaactttaaagaccaggttattctgcttaacaaacatattgatgcctataaaactttcccgccgaccgaacccaaaaaggacaaaaagaaaaaagctgatgaaacccaggctctaccgcagcgtcagaaaaaacagcaaactgtgactctgctgccagctgcggacctggatgatttttccaagcagctgcaacagtctatgagctctgcggactctacgcaggcttaa

SEQ ID NO: 378 - DNA, 2016 bp, Artificial Sequence
  Description of Artificial Sequence: Synthetic polynucleotide
atgcaccatcatcaccatcatggtggttctggttcgccgatacttggttattggaagattaaaggactggttcagcccacacgcctcctgctagaatacttagaggaaaaatatgaagagcacctgtacgaacgtgatgagggggacaaatggcgaaacaagaaatttgaattgggcttagaatttccaaatttgccgtattatatcgatggcgacgtaaaactgacccaatcaatggccattattcgctacatcgcagataaacataacatgctgggtggctgccctaaagaacgggctgagatctccatgctggaaggtgcggtgctcgacattcgctacggcgtcagtagaattgcgtatagcaaggatttcgaaactttaaaagtggatttcctgagcaaacttccggagatgctgaaaatgtttgaggataggctttgtcataagacgtatctcaatggtgatcatgttacccacccggactttatgctgtacgacgcccttgatgtcgttctgtatatggatcccatgtgcctggacgccttcccgaaattagtgtgttttaaaaaacgtatcgaagcgattccacagatcgataaatacttgaagtcttctaaatatattgcttggcctctgcaaggctggcaggcaacgttcggtgggggagatcatccgccaaaatcagatctggtgccgcgtgggagccctggcatacaccgcgacggtggttctggtgagaacctgtactttcaaagctcagataatgggcctcaaaaccagcgcaacgctccacgtataaccttcggtggcccgtctgactccacaggcagcaaccagaatggtgagcgtagtggagccaggtctaagcagcgccgtccccagggtctgccgaacaacacggcgagctggtttactgcgcttacccaacacggtaaagaagacttaaaattcccgcgtggccagggcgtcccgatcaacactaactcttccccggatgatcagattggttattaccgcagagcaactcgtcggattcgcggcggcgacggtaaaatgaaagatttgtctccgttttggtacttttactatctcggcaccggtccggaagctggactgccctacggggcaaacaaggacgggatcatttgggtggctaccgaaggtgccctgaatactccaaaagatcatatcggcacccgtaaccctgctaataacgctgcgatcgttctgcaactgcctcagggtacaactctgccaaaaggcttctatgcagaagggtcgcgtggtggcagccaggcgagtagccgtagcagctcccgctctcgcaactcgtcccgtaactccactccgggctcttctcgcggcacgtccccggctcgtatggcaggtaacggtggtgacgctgctctggcgctgctactgctggacaggctgaaccagctggagtcgaagatgagtggtaaaggccaacagcagcagggccagaccgttaccaaaaagagcgcagctgaagcatctaaaaaaccgcgacagaaacgtaccgcgactaaagcgtacaatgtaacacaggccttcggtcgtcgaggtccggagcaaactcaaggaaactttggcgatcaggaattaatccgccaggggaccgactacaaacactggccgcaaattgcccagttcgccccatccgctagtgcattcttcggtatgagccgcatcggcatggaagtaacgccaagtggtacgtggctgacctacaccggtgctatcaagcttgatgacaaggacccgaactttaaagaccaggttattctgcttaacaaacatattgatgcctataaaactttcccgccgaccgaacccaaaaaggacaaaaagaaaaaagctgatgaaacccaggctctaccgcagcgtcagaaaaaacagcaaactgtgactctgctgccagctgcggacctggatgatttttccaagcagctgcaacagtctatgagctctgcggactctacgcaggcttaa

SEQ ID NO: 379 - DNA, 2016 bp, Artificial Sequence
  Description of Artificial Sequence: Synthetic polynucleotide
atgcaccatcatcaccatcatggtggttctggttcgccgatacttggttattggaagattaaaggactggttcagcccacacgcctcctgctagaatacttagaggaaaaatatgaagagcacctgtacgaacgtgatgagggggacaaatggcgaaacaagaaatttgaattgggcttagaatttccaaatttgccgtattatatcgatggcgacgtaaaactgacccaatcaatggccattattcgctacatcgcagataaacataacatgctgggtggctgccctaaagaacgggctgagatctccatgctggaaggtgcggtgctcgacattcgctacggcgtcagtagaattgcgtatagcaaggatttcgaaactttaaaagtggatttcctgagcaaacttccggagatgctgaaaatgtttgaggataggctttgtcataagacgtatctcaatggtgatcatgttacccacccggactttatgctgtacgacgcccttgatgtcgttctgtatatggatcccatgtgcctggacgccttcccgaaattagtgtgttttaaaaaacgtatcgaagcgattccacagatcgataaatacttgaagtcttctaaatatattgcttggcctctgcaaggctggcaggcaacgttcggtgggggagatcatccgccaaaatcagatctggtgccgcgtgggagccctggcatacaccgcgacggtggttctggtgagaacctgtactttcaaagctcagataatgggcctcaaaaccagcgcaacgctccacgtataaccttcggtggcccgtctgactccacaggcagcaaccagaatggtgagcgtagtggagccaggtctaagcagcgccgtccccagggtctgccgaacaacacggcgagctggtttactgcgcttacccaacacggtaaagaagacttaaaattcccgcgtggccagggcgtcccgatcaacactaactcttccccggatgatcagattggttattaccgcagagcaactcgtcggattcgcggcggcgacggtaaaatgaaagatttggcaccgcgttggtacttttactatctcggcaccggtccggaagctggactgccctacggggcaaacaaggacgggatcatttgggtggctaccgaaggtgccctgaatactccaaaagatcatatcggcacccgtaaccctgctaataacgctgcgatcgttctgcaactgcctcagggtacaactctgccaaaaggcttctatgcagaagggtcgcgtggtggcagccaggcgagtagccgtagcagctcccgctctcgcaactcgtcccgtaactccactccgggctcttctcgcggcacgtccccggctcgtatggcaggtaacggtggtgacgctgctctggcgctgctactgctggacaggctgaaccagctggagtcgaagatgagtggtaaaggccaacagcagcagggccagaccgttaccaaaaagagcgcagctgaagcatctaaaaaaccgcgacagaaacgtaccgcgactaaagcgtacaatgtaacacaggccttcggtcgtcgaggtccggagcaaactcaaggaaactttggcgatcaggaattaatccgccaggggaccgactacaaacactggccgcaaattgcccagttcgccccatccgctagtgcattcttcggtatgagccgcatcggcatggaagtaacgccaagtggtacgtggctgacctacaccggtgctatcaagcttgatgacaaggacccgaactttaaagaccaggttattctgcttaacaaacatattgatgcctataaaactttcccgccgaccgaacccaaaaaggacaaaaagaaaaaagctgatgaaacccaggctctaccgcagcgtcagaaaaaacagcaaactgtgactctgctgccagctgcggacctggatgatttttccaagcagctgcaacagtctatgagctctgcggactctacgcaggcttaa

SEQ ID NO: 380 - DNA, 2016 bp, Artificial Sequence
  Description of Artificial Sequence: Synthetic polynucleotide
atgcaccatcatcaccatcatggtggttctggttcgccgatacttggttattggaagattaaaggactggttcagcccacacgcctcctgctagaatacttagaggaaaaatatgaagagcacctgtacgaacgtgatgagggggacaaatggcgaaacaagaaatttgaattgggcttagaatttccaaatttgccgtattatatcgatggcgacgtaaaactgacccaatcaatggccattattcgctacatcgcagataaacataacatgctgggtggctgccctaaagaacgggctgagatctccatgctggaaggtgcggtgctcgacattcgctacggcgtcagtagaattgcgtatagcaaggatttcgaaactttaaaagtggatttcctgagcaaacttccggagatgctgaaaatgtttgaggataggctttgtcataagacgtatctcaatggtgatcatgttacccacccggactttatgctgtacgacgcccttgatgtcgttctgtatatggatcccatgtgcctggacgccttcccgaaattagtgtgttttaaaaaacgtatcgaagcgattccacagatcgataaatacttgaagtcttctaaatatattgcttggcctctgcaaggctggcaggcaacgttcggtgggggagatcatccgccaaaatcagatctggtgccgcgtgggagccctggcatacaccgcgacggtggttctggtgagaacctgtactttcaaagctcagataatgggcctcaaaaccagcgcaacgctccacgtataaccttcggtggcccgtctgactccacaggcagcaaccagaatggtgagcgtagtggagccaggtctaagcagcgccgtccccagggtctgccgaacaacacggcgagctggtttactgcgcttacccaacacggtaaagaagacttaaaattcccgcgtggccagggcgtcccgatcaacactaactcttccccggatgatcagattggttattaccgcagagaaactcgtcggattcgcggcggcgacggtaaaatgaaagatttgtctccgcgttggtacttttactatctcggcaccggtccggaagctggactgccctacggggcaaacaaggacgggatcatttgggtggctaccgaaggtgccctgaatactccaaaagatcatatcggcacccgtaaccctgctaataacgctgcgatcgttctgcaactgcctcagggtacaactctgccaaaaggcttctatgcagaagggtcgcgtggtggcagccaggcgagtagccgtagcagctcccgctctcgcaactcgtcccgtaactccactccgggctcttctcgcggcacgtccccggctcgtatggcaggtaacggtggtgacgctgctctggcgctgctactgctggacaggctgaaccagctggagtcgaagatgagtggtaaaggccaacagcagcagggccagaccgttaccaaaaagagcgcagctgaagcatctaaaaaaccgcgacagaaacgtaccgcgactaaagcgtacaatgtaacacaggccttcggtcgtcgaggtccggagcaaactcaaggaaactttggcgatcaggaattaatccgccaggggaccgactacaaacactggccgcaaattgcccagttcgccccatccgctagtgcattcttcggtatgagccgcatcggcatggaagtaacgccaagtggtacgtggctgacctacaccggtgctatcaagcttgatgacaaggacccgaactttaaagaccaggttattctgcttaacaaacatattgatgcctataaaactttcccgccgaccgaacccaaaaaggacaaaaagaaaaaagctgatgaaacccaggctctaccgcagcgtcagaaaaaacagcaaactgtgactctgctgccagctgcggacctggatgatttttccaagcagctgcaacagtctatgagctctgcggactctacgcaggcttaa

SEQ ID NO: 381 - DNA, 2016 bp, Artificial Sequence
  Description of Artificial Sequence: Synthetic polynucleotide
atgcaccatcatcaccatcatggtggttctggttcgccgatacttggttattggaagattaaaggactggttcagcccacacgcctcctgctagaatacttagaggaaaaatatgaagagcacctgtacgaacgtgatgagggggacaaatggcgaaacaagaaatttgaattgggcttagaatttccaaatttgccgtattatatcgatggcgacgtaaaactgacccaatcaatggccattattcgctacatcgcagataaacataacatgctgggtggctgccctaaagaacgggctgagatctccatgctggaaggtgcggtgctcgacattcgctacggcgtcagtagaattgcgtatagcaaggatttcgaaactttaaaagtggatttcctgagcaaacttccggagatgctgaaaatgtttgaggataggctttgtcataagacgtatctcaatggtgatcatgttacccacccggactttatgctgtacgacgcccttgatgtcgttctgtatatggatcccatgtgcctggacgccttcccgaaattagtgtgttttaaaaaacgtatcgaagcgattccacagatcgataaatacttgaagtcttctaaatatattgcttggcctctgcaaggctggcaggcaacgttcggtgggggagatcatccgccaaaatcagatctggtgccgcgtgggagccctggcatacaccgcgacggtggttctggtgagaacctgtactttcaaagctcagataatgggcctcaaaaccagcgcaacgctccacgtataaccttcggtggcccgtctgactccacaggcagcaaccagaatggtgagcgtagtggagccaggtctaagcagcgccgtccccagggtctgccgaacaacacggcgagctggtttactgcgcttacccaacacggtaaagaagacttaaaattcccgcgtggccagggcgtcccgatcaacactaactcttccccggatgatcagattggttattaccgcagagcaactcgtcggattcgcggcggcgacggtaaaatgaaagatttgtctccgcgttggtacttttactatctcggcaccggtccggaagctggactgccctacggggcaaacaaggacgggatcatttgggtggctaccgaaggtgccctgaatactccaaaagatcatatcggcacccgtaaccctgctaataacgctgcgatcacgctgcaactgcctcagggtacaactctgccaaaaggcttctatgcagaagggtcgcgtggtggcagccaggcgagtagccgtagcagctcccgctctcgcaactcgtcccgtaactccactccgggctcttctcgcggcacgtccccggctcgtatggcaggtaacggtggtgacgctgctctggcgctgctactgctggacaggctgaaccagctggagtcgaagatgagtggtaaaggccaacagcagcagggccagaccgttaccaaaaagagcgcagctgaagcatctaaaaaaccgcgacagaaacgtaccgcgactaaagcgtacaatgtaacacaggccttcggtcgtcgaggtccggagcaaactcaaggaaactttggcgatcaggaattaatccgccaggggaccgactacaaacactggccgcaaattgcccagttcgccccatccgctagtgcattcttcggtatgagccgcatcggcatggaagtaacgccaagtggtacgtggctgacctacaccggtgctatcaagcttgatgacaaggacccgaactttaaagaccaggttattctgcttaacaaacatattgatgcctataaaactttcccgccgaccgaacccaaaaaggacaaaaagaaaaaagctgatgaaacccaggctctaccgcagcgtcagaaaaaacagcaaactgtgactctgctgccagctgcggacctggatgatttttccaagcagctgcaacagtctatgagctctgcggactctacgcaggcttaa

SEQ ID NO: 382 - DNA, 2016 bp, Artificial Sequence
  Description of Artificial Sequence: Synthetic polynucleotide
atgcaccatcatcaccatcatggtggttctggttcgccgatacttggttattggaagattaaaggactggttcagcccacacgcctcctgctagaatacttagaggaaaaatatgaagagcacctgtacgaacgtgatgagggggacaaatggcgaaacaagaaatttgaattgggcttagaatttccaaatttgccgtattatatcgatggcgacgtaaaactgacccaatcaatggccattattcgctacatcgcagataaacataacatgctgggtggctgccctaaagaacgggctgagatctccatgctggaaggtgcggtgctcgacattcgctacggcgtcagtagaattgcgtatagcaaggatttcgaaactttaaaagtggatttcctgagcaaacttccggagatgctgaaaatgtttgaggataggctttgtcataagacgtatctcaatggtgatcatgttacccacccggactttatgctgtacgacgcccttgatgtcgttctgtatatggatcccatgtgcctggacgccttcccgaaattagtgtgttttaaaaaacgtatcgaagcgattccacagatcgataaatacttgaagtcttctaaatatattgcttggcctctgcaaggctggcaggcaacgttcggtgggggagatcatccgccaaaatcagatctggtgccgcgtgggagccctggcatacaccgcgacggtggttctggtgagaacctgtactttcaaagctcagataatgggcctcaaaaccagcgcaacgctccacgtataaccttcggtggcccgtctgactccacaggcagcaaccagaatggtgagcgtagtggagccaggtctaagcagcgccgtccccagggtctgccgaacaacacggcgagctggtttactgcgcttacccaacacggtaaagaagacttaaaattcccgcgtggccagggcgtcccgatcaacactaactcttccccggatgatcagattggttattaccgcagagcaactcgtcggattcgcggcggcgacggtaaaatgaaagatttgtctccgcgttggtacttttactatctcggcaccggtccggaagctggactgccctacggggcaaacaaggacgggatcatttgggtggctaccgaaggtgccctgaatactccaaaagatcatatcggcacccgtaaccctgctaataacgctgcgatcgttctgcaactgcctcagggtacaactctgccaaaaggcttctatgcagaagggtcgcgtggtggcagccaggcgagtagccgtagcagctcccgctctcgcaactcgtcccgtaactccactccgggctcttctcgcggcacgtccccggctcgtatggcaggtaacggtggtgacgctgctctggcgctgctactgctggacaggctgaaccagctggagtcgaagatgagtggtaaaggccaacagcagcagggccagaccgttaccaaaaagagcgcagctgaagcatctaaaaaaccgcgacagaaacgtaccgcgactaaagcgtacaatgtaacacaggccttcggtcgtcgaggtccggagcaaactcaaggaaactttggcgatcaggaattaatccgccaggggaccgactacaaacactggccgcaaattgcccagttcgccccatccgctagtgcattcttcggtatgagccgcatcggcacggaagtaacgccaagtggtacgtggctgacctacaccggtgctatcaagcttgatgacaaggacccgaactttaaagaccaggttattctgcttaacaaacatattgatgcctataaaactttcccgccgaccgaacccaaaaaggacaaaaagaaaaaagctgatgaaacccaggctctaccgcagcgtcagaaaaaacagcaaactgtgactctgctgccagctgcggacctggatgatttttccaagcagctgcaacagtctatgagctctgcggactctacgcaggcttaa

SEQ ID NO: 383 - DNA, 2016 bp, Artificial Sequence
  Description of Artificial Sequence: Synthetic polynucleotide
atgcaccatcatcaccatcatggtggttctggttcgccgatacttggttattggaagattaaaggactggttcagcccacacgcctcctgctagaatacttagaggaaaaatatgaagagcacctgtacgaacgtgatgagggggacaaatggcgaaacaagaaatttgaattgggcttagaatttccaaatttgccgtattatatcgatggcgacgtaaaactgacccaatcaatggccattattcgctacatcgcagataaacataacatgctgggtggctgccctaaagaacgggctgagatctccatgctggaaggtgcggtgctcgacattcgctacggcgtcagtagaattgcgtatagcaaggatttcgaaactttaaaagtggatttcctgagcaaacttccggagatgctgaaaatgtttgaggataggctttgtcataagacgtatctcaatggtgatcatgttacccacccggactttatgctgtacgacgcccttgatgtcgttctgtatatggatcccatgtgcctggacgccttcccgaaattagtgtgttttaaaaaacgtatcgaagcgattccacagatcgataaatacttgaagtcttctaaatatattgcttggcctctgcaaggctggcaggcaacgttcggtgggggagatcatccgccaaaatcagatctggtgccgcgtgggagccctggcatacaccgcgacggtggttctggtgagaacctgtactttcaaagctcagataatgggcctcaaaaccagcgcaacgctccacgtataaccttcggtggcccgtctgactccacaggcagcaaccagaatggtgagcgtagtggagccaggtctaagcagcgccgtccccagggtctgccgaacaacacggcgagctggtttactgcgcttacccaacacggtaaagaagacttaaaattcccgcgtggccagggcgtcccgatcaacactaactcttccccggatgatcagattggttattaccgcagagcaactcgtcggattcgcggcggcgacggtaaaatgaaagatttgtctccgcgttggtacttttactatctcggcaccggtccggaagctggactgccctacggggcaaacaaggacgggatcatttgggtggctaccgaaggtgccctgaatactccaaaagatcatatcggcacccgtaaccctgctaataacgctgcgatcgttctgcaactgcctagtggtacaactctgccaaaaggcttctatgcagaagggtcgcgtggtggcagccaggcgagtagccgtagcagctcccgctctcgcaactcgtcccgtaactccactccgggctcttctcgcggcacgtccccggctcgtatggcaggtaacggtggtgacgctgctctggcgctgctactgctggacaggctgaaccagctggagtcgaagatgagtggtaaaggccaacagcagcagggccagaccgttaccaaaaagagcgcagctgaagcatctaaaaaaccgcgacagaaacgtaccgcgactaaagcgtacaatgtaacacaggccttcggtcgtcgaggtccggagcaaactcaaggaaactttggcgatcaggaattaatccgccaggggaccgactacaaacactggccgcaaattgcccagttcgccccatccgctagtgcattcttcggtatgagccgcatcggcatggaagtaacgccaagtggtacgtggctgacctacaccggtgctatcaagcttgatgacaaggacccgaactttaaagaccaggttattctgcttaacaaacatattgatgcctataaaactttcccgccgaccgaacccaaaaaggacaaaaagaaaaaagctgatgaaacccaggctctaccgcagcgtcagaaaaaacagcaaactgtgactctgctgccagctgcggacctggatgatttttccaagcagctgcaacagtctatgagctctgcggactctacgcaggcttaa

SEQ ID NO: 384 - DNA, 2016 bp, Artificial Sequence
  Description of Artificial Sequence: Synthetic polynucleotide
atgcaccatcatcaccatcatggtggttctggttcgccgatacttggttattggaagattaaaggactggttcagcccacacgcctcctgctagaatacttagaggaaaaatatgaagagcacctgtacgaacgtgatgagggggacaaatggcgaaacaagaaatttgaattgggcttagaatttccaaatttgccgtattatatcgatggcgacgtaaaactgacccaatcaatggccattattcgctacatcgcagataaacataacatgctgggtggctgccctaaagaacgggctgagatctccatgctggaaggtgcggtgctcgacattcgctacggcgtcagtagaattgcgtatagcaaggatttcgaaactttaaaagtggatttcctgagcaaacttccggagatgctgaaaatgtttgaggataggctttgtcataagacgtatctcaatggtgatcatgttacccacccggactttatgctgtacgacgcccttgatgtcgttctgtatatggatcccatgtgcctggacgccttcccgaaattagtgtgttttaaaaaacgtatcgaagcgattccacagatcgataaatacttgaagtcttctaaatatattgcttggcctctgcaaggctggcaggcaacgttcggtgggggagatcatccgccaaaatcagatctggtgccgcgtgggagccctggcatacaccgcgacggtggttctggtgagaacctgtactttcaaagctcagataatgggcctcaaaaccagcgcaacgctccacgtataaccttcggtggcccgtctgactccacaggcagcaaccagaatggtgagcgtagtggagccaggtctaagcagcgccgtccccagggtctgccgaacaacacggcgagctggtttactgcgcttacccaacacggtaaagaagacttaaaattcccgcgtggccagggcgtcccgatcaacactaactcttccccggatgatcagattggttattaccgcagagcaactcgtcggattcgcggcggcgacggtaaaatgaaagatttgtctccgcgttggtacttttactatctcggcaccggtccggaagctggactgccctacggggcaaacaaggacgggatcatttgggtggctaccgaaggtgccctgaatactccaaaagatcatatcggcacccgtaaccctgctaataacgatgcgatcgttctgcaactgcctcagggtacaactctgccaaaaggcttctatgcagaagggtcgcgtggtggcagccaggcgagtagccgtagcagctcccgctctcgcaactcgtcccgtaactccactccgggctcttctcgcggcacgtccccggctcgtatggcaggtaacggtggtgacgctgctctggcgctgctactgctggacaggctgaaccagctggagtcgaagatgagtggtaaaggccaacagcagcagggccagaccgttaccaaaaagagcgcagctgaagcatctaaaaaaccgcgacagaaacgtaccgcgactaaagcgtacaatgtaacacaggccttcggtcgtcgaggtccggagcaaactcaaggaaactttggcgatcaggaattaatccgccaggggaccgactacaaacactggccgcaaattgcccagttcgccccatccgctagtgcattcttcggtatgagccgcatcggcatggaagtaacgccaagtggtacgtggctgacctacaccggtgctatcaagcttgatgacaaggacccgaactttaaagaccaggttattctgcttaacaaacatattgatgcctataaaactttcccgccgaccgaacccaaaaaggacaaaaagaaaaaagctgatgaaacccaggctctaccgcagcgtcagaaaaaacagcaaactgtgactctgctgccagctgcggacctggatgatttttccaagcagctgcaacagtctatgagctctgcggactctacgcaggcttaa

SEQ ID NO: 385 - DNA, 2016 bp, Artificial Sequence
  Description of Artificial Sequence: Synthetic polynucleotide
atgcaccatcatcaccatcatggtggttctggttcgccgatacttggttattggaagattaaaggactggttcagcccacacgcctcctgctagaatacttagaggaaaaatatgaagagcacctgtacgaacgtgatgagggggacaaatggcgaaacaagaaatttgaattgggcttagaatttccaaatttgccgtattatatcgatggcgacgtaaaactgacccaatcaatggccattattcgctacatcgcagataaacataacatgctgggtggctgccctaaagaacgggctgagatctccatgctggaaggtgcggtgctcgacattcgctacggcgtcagtagaattgcgtatagcaaggatttcgaaactttaaaagtggatttcctgagcaaacttccggagatgctgaaaatgtttgaggataggctttgtcataagacgtatctcaatggtgatcatgttacccacccggactttatgctgtacgacgcccttgatgtcgttctgtatatggatcccatgtgcctggacgccttcccgaaattagtgtgttttaaaaaacgtatcgaagcgattccacagatcgataaatacttgaagtcttctaaatatattgcttggcctctgcaaggctggcaggcaacgttcggtgggggagatcatccgccaaaatcagatctggtgccgcgtgggagccctggcatacaccgcgacggtggttctggtgagaacctgtactttcaaagctcagataatgggcctcaaaaccagcgcaacgctccacgtataaccttcggtggcccgtctgactccacaggcagcaaccagaatggtgagcgtagtggagccaggtctaagcagcgccgtccccagggtctgccgaacaacacggcgagctggtttactgcgcttacccaacacggtaaagaagacttaaaattcccgcgtggccagggcgtcccgatcaacactaactcttccccggatgatcagattggtatgtaccgcagagcaactcgtcggattcgcggcggcgacggtaaaatgaaagatttgtctccgcgttggtacttttactatctcggcaccggtccggaagctggactgccctacggggcaaacaaggacgggatcatttgggtggctaccgaaggtgccctgaatactccaaaagatcatatcggcacccgtaaccctgctaataacgctgcgatcgttctgcaactgcctcagggtacaactctgccaaaaggcttctatgcagaagggtcgcgtggtggcagccaggcgagtagccgtagcagctcccgctctcgcaactcgtcccgtaactccactccgggctcttctcgcggcacgtccccggctcgtatggcaggtaacggtggtgacgctgctctggcgctgctactgctggacaggctgaaccagctggagtcgaagatgagtggtaaaggccaacagcagcagggccagaccgttaccaaaaagagcgcagctgaagcatctaaaaaaccgcgacagaaacgtaccgcgactaaagcgtacaatgtaacacaggccttcggtcgtcgaggtccggagcaaactcaaggaaactttggcgatcaggaattaatccgccaggggaccgactacaaacactggccgcaaattgcccagttcgccccatccgctagtgcattcttcggtatgagccgcatcggcatggaagtaacgccaagtggtacgtggctgacctacaccggtgctatcaagcttgatgacaaggacccgaactttaaagaccaggttattctgcttaacaaacatattgatgcctataaaactttcccgccgaccgaacccaaaaaggacaaaaagaaaaaagctgatgaaacccaggctctaccgcagcgtcagaaaaaacagcaaactgtgactctgctgccagctgcggacctggatgatttttccaagcagctgcaacagtctatgagctctgcggactctacgcaggcttaa

SEQ ID NO: 386 - DNA, 2016 bp, Artificial Sequence
  Description of Artificial Sequence: Synthetic polynucleotide
atgcaccatcatcaccatcatggtggttctggttcgccgatacttggttattggaagattaaaggactggttcagcccacacgcctcctgctagaatacttagaggaaaaatatgaagagcacctgtacgaacgtgatgagggggacaaatggcgaaacaagaaatttgaattgggcttagaatttccaaatttgccgtattatatcgatggcgacgtaaaactgacccaatcaatggccattattcgctacatcgcagataaacataacatgctgggtggctgccctaaagaacgggctgagatctccatgctggaaggtgcggtgctcgacattcgctacggcgtcagtagaattgcgtatagcaaggatttcgaaactttaaaagtggatttcctgagcaaacttccggagatgctgaaaatgtttgaggataggctttgtcataagacgtatctcaatggtgatcatgttacccacccggactttatgctgtacgacgcccttgatgtcgttctgtatatggatcccatgtgcctggacgccttcccgaaattagtgtgttttaaaaaacgtatcgaagcgattccacagatcgataaatacttgaagtcttctaaatatattgcttggcctctgcaaggctggcaggcaacgttcggtgggggagatcatccgccaaaatcagatctggtgccgcgtgggagccctggcatacaccgcgacggtggttctggtgagaacctgtactttcaaagctcagataatgggcctcaaaaccagcgcaacgctccacgtataaccttcggtggcccgtctgactccacaggcagcaaccagaatggtgagcgtagtggagccaggtctaagcagcgccgtccccagggtctgccgaacaacacggcgagctggtttactgcgcttacccaacacggtaaagaagacttaaaattcccgcgtggccagggcgtcccgatcaacactaactcttccccggatgatcagattggttattaccgcagagcaactcgtcggattcgcggcggcgacggtaaaatgaaagatttgtctccgcgttggtacttttactatctcggcaccggtccggaagctggactgccctacggggcaaacaaggacgggatcatttgggtggctaccgaaggtgccctgaatactccaaaagatcatatcggcacccgtaaccctgctaataacgctgcgatcgttctgcaactgcctcagggtacaactctgccaaaaggcttctatgcagaagggtcgcgtggtggcagccaggcgagtagccgtagcagctcccgctctcgcaactcgtcccgtaactccactccgggctcttctcgcggcacgtccccggctcgtatggcaggtaacggtggtgacgctgctctggcgctgctactgctggacaggctgaaccagctggagtcgaagatgagtggtaaaggccaacagcagcagggccagaccgttaccaaaaagagcgcagctgaaatgtctaaaaaaccgcgacagaaacgtaccgcgactaaaggatacaatgtaacacagtgtttcggtccccgaggtccggagcaaactcaaggaaactttggcgatgccgaattaatcaaaaaagggtcagactacaaacactggccgcaaattgcccagttcgccccatccgctagtgcattcttcggtatgagccgcatctcgtcaaaggaacagccaagtggtacgtggctgacctacaccggtgctatcaagcttgataaagatgacccgaactttaaagaccaggttattctgcttaacaaacatattgatgcctataaaactttcccgccgaccgaacccaaaaaggacaaaaagaaaaaagctgatgaaacccaggctctaccgcagcgtcagaaaaaacagcaaactgtgactctgctgccagctgcggacctggatgatttttccaagcagctgcaacagtctatgagctctgcggactctacgcaggcttaa

SEQ ID NO: 387 - DNA, 2016 bp, Artificial Sequence
  Description of Artificial Sequence: Synthetic polynucleotide
atgcaccatcatcaccatcatggtggttctggttcgccgatacttggttattggaagattaaaggactggttcagcccacacgcctcctgctagaatacttagaggaaaaatatgaagagcacctgtacgaacgtgatgagggggacaaatggcgaaacaagaaatttgaattgggcttagaatttccaaatttgccgtattatatcgatggcgacgtaaaactgacccaatcaatggccattattcgctacatcgcagataaacataacatgctgggtggctgccctaaagaacgggctgagatctccatgctggaaggtgcggtgctcgacattcgctacggcgtcagtagaattgcgtatagcaaggatttcgaaactttaaaagtggatttcctgagcaaacttccggagatgctgaaaatgtttgaggataggctttgtcataagacgtatctcaatggtgatcatgttacccacccggactttatgctgtacgacgcccttgatgtcgttctgtatatggatcccatgtgcctggacgccttcccgaaattagtgtgttttaaaaaacgtatcgaagcgattccacagatcgataaatacttgaagtcttctaaatatattgcttggcctctgcaaggctggcaggcaacgttcggtgggggagatcatccgccaaaatcagatctggtgccgcgtgggagccctggcatacaccgcgacggtggttctggtgagaacctgtactttcaaagctcagataatgggcctcaaaaccagcgcaacgctccacgtataaccttcggtggcccgtctgactccacaggcagcaaccagaatggtgagcgtagtggagccaggtctaagcagcgccgtccccagggtctgccgaacaacacggcgagctggtttactgcgcttacccaacacggtaaagaagacttaaaattcccgcgtggccagggcgtcccgatcaacactaactcttccccggatgatcagattggttattaccgcagagcaactcgtcggattcgcggcggcgacggtaaaatgaaagatttgtctccgcgttggtacttttactatctcggcaccggtccggaagctggactgccctacggggcaaacaaggacgggatcatttgggtggctaccgaaggtgccctgaatactccaaaagatcatatcggcacccgtaaccctgctaataacgctgcgatcgttctgcaactgcctcagggtacaactctgccaaaaggcttctatgcagaagggtcgcgtggtggcagccaggcgagtagccgtagcagctcccgctctcgcaactcgtcccgtaactccactccgggctcttctcgcggcacgtccccggctcgtatggcaggtaacggtggtgacgctgctctggcgctgctactgctggacaggctgaaccagctggagtcgaagatgagtggtaaaggccaacagcagcagggccagaccgttaccaaaaagagcgcagctgaagcatctaaaaaaccgcgacagaaacgtaccgcgactaaagcgtacaatgtaacacaggccttcggtcgtcgaggtccggagcaaactcaaggaaactttggcgatcaggaattaatccgccaggggaccgactacaaacactggccgcaaattgcccagttcgccccatccgctagtgcattcttcggtatgagccgcatcggcatgcgggtaacgccaagtggtacgtggctgacctacaccggtgctatcaagcttgatgacaaggacccgaactttaaagaccaggttattctgcttaacaaacatattgatgcctataaaactttcccgccgaccgaacccaaaaaggacaaaaagaaaaaagctgatgaaacccaggctctaccgcagcgtcagaaaaaacagcaaactgtgactctgctgccagctgcggacctggatgatttttccaagcagctgcaacagtctatgagctctgcggactctacgcaggcttaa

SEQ ID NO: 388 - DNA, 2016 bp, Artificial Sequence
  Description of Artificial Sequence: Synthetic polynucleotide
atgcaccatcatcaccatcatggtggttctggttcgccgatacttggttattggaagattaaaggactggttcagcccacacgcctcctgctagaatacttagaggaaaaatatgaagagcacctgtacgaacgtgatgagggggacaaatggcgaaacaagaaatttgaattgggcttagaatttccaaatttgccgtattatatcgatggcgacgtaaaactgacccaatcaatggccattattcgctacatcgcagataaacataacatgctgggtggctgccctaaagaacgggctgagatctccatgctggaaggtgcggtgctcgacattcgctacggcgtcagtagaattgcgtatagcaaggatttcgaaactttaaaagtggatttcctgagcaaacttccggagatgctgaaaatgtttgaggataggctttgtcataagacgtatctcaatggtgatcatgttacccacccggactttatgctgtacgacgcccttgatgtcgttctgtatatggatcccatgtgcctggacgccttcccgaaattagtgtgttttaaaaaacgtatcgaagcgattccacagatcgataaatacttgaagtcttctaaatatattgcttggcctctgcaaggctggcaggcaacgttcggtgggggagatcatccgccaaaatcagatctggtgccgcgtgggagccctggcatacaccgcgacggtggttctggtgagaacctgtactttcaaagctcagataatgggcctcaaaaccagcgcaacgctccacgtataaccttcggtggcccgtctgactccacaggcagcaaccagaatggtgagcgtagtggagccaggtctaagcagcgccgtccccagggtctgccgaacaacacggcgagctggtttactgcgcttacccaacacggtaaagaagacttaaaattcccgcgtggccagggcgtcccgatcaacactaactcttccccggatgatcagattggttattaccgcagagcaactcgtcggattcgcggcggcgacggtaaaatgaaagatttgtctccgcgttggtacttttactatctcggcaccggtccggaagctggactgccctacggggcaaacaaggacgggatcatttgggtggctaccgaaggtgccctgaatactccaaaagatcatatcggcacccgtaaccctgctaataacgctgcgatccgactgcaactgcctcagggtacaactctgccaaaaggcttctatgcagaagggtcgcgtggtggcagccaggcgagtagccgtagcagctcccgctctcgcaactcgtcccgtaactccactccgggctcttctcgcggcacgtccccggctcgtatggcaggtaacggtggtgacgctgctctggcgctgctactgctggacaggctgaaccagctggagtcgaagatgagtggtaaaggccaacagcagcagggccagaccgttaccaaaaagagcgcagctgaagcatctaaaaaaccgcgacagaaacgtaccgcgactaaagcgtacaatgtaacacaggccttcggtcgtcgaggtccggagcaaactcaaggaaactttggcgatcaggaattaatccgccaggggaccgactacaaacactggccgcaaattgcccagttcgccccatccgctagtgcattcttcggtatgagccgcatcggcatggaagtaacgccaagtggtacgtggctgacctacaccggtgctatcaagcttgatgacaaggacccgaactttaaagaccaggttattctgcttaacaaacatattgatgcctataaaactttcccgccgaccgaacccaaaaaggacaaaaagaaaaaagctgatgaaacccaggctctaccgcagcgtcagaaaaaacagcaaactgtgactctgctgccagctgcggacctggatgatttttccaagcagctgcaacagtctatgagctctgcggactctacgcaggcttaa

SEQ ID NO: 389 - DNA, 2016 bp, Artificial Sequence
  Description of Artificial Sequence: Synthetic polynucleotide
atgcaccatcatcaccatcatggtggttctggttcgccgatacttggttattggaagattaaaggactggttcagcccacacgcctcctgctagaatacttagaggaaaaatatgaagagcacctgtacgaacgtgatgagggggacaaatggcgaaacaagaaatttgaattgggcttagaatttccaaatttgccgtattatatcgatggcgacgtaaaactgacccaatcaatggccattattcgctacatcgcagataaacataacatgctgggtggctgccctaaagaacgggctgagatctccatgctggaaggtgcggtgctcgacattcgctacggcgtcagtagaattgcgtatagcaaggatttcgaaactttaaaagtggatttcctgagcaaacttccggagatgctgaaaatgtttgaggataggctttgtcataagacgtatctcaatggtgatcatgttacccacccggactttatgctgtacgacgcccttgatgtcgttctgtatatggatcccatgtgcctggacgccttcccgaaattagtgtgttttaaaaaacgtatcgaagcgattccacagatcgataaatacttgaagtcttctaaatatattgcttggcctctgcaaggctggcaggcaacgttcggtgggggagatcatccgccaaaatcagatctggtgccgcgtgggagccctggcatacaccgcgacggtggttctggtgagaacctgtactttcaaagctcagataatgggcctcaaaaccagcgcaacgctccacgtataaccttcggtggcccgtctgactccacaggcagcaaccagaatggtgagcgtagtggagccaggtctaagcagcgccgtccccagggtctgccgaacaacacggcgagctggtttactgcgcttacccaacacggtaaagaagacttaaaattcccgcgtggccagggcgtcccgatcaacactaactcttccccggatgatcagattggttattaccgcagagcaactcgtcggattcgcggcggcgacggtaaaatgaaagatttgtctccgcgttggtacttttactatctcggcaccggtccggaagctggactgccctacggggcaaacaaggacgggatcatttgggtggctaccgaaggtgccctgaatactccaaaagatcatatcggcacccgtaaccctgctaataacgctgcgatcgttctgcaactgcctcagggtacaactctgccaaaaggcttctatgcagaagggtcgcgtggtggcagccaggcgagtagccgtagcagctcccgctctcgcaactcgtcccgtaactccactccgggctcttctcgcggcacgtccccggctcgtatggcaggtaacggtggtgacgctgctctggcgctgctactgctggacaggctgaaccagctggagtcgaagatgagtggtaaaggccaacagcagcagggccagaccgttaccaaaaagagcgcagctgaagcatctaaaaaaccgcgacagaaacgtaccgcgactaaagcgtacaatgtaacacaggccttcggtcgtcgaggtccggagcaaactcaaggaaactttggcgatcaggaattaatccgccaggggaccgactacaaacactggccgcaaattgcccagttcgccccatccgctagtgcattcttcggtatgagccgcatcggcatggaagtaacgccaagtggtacgtggctgacctacaccggtgctatcaagcttgatgacgatgacccgaactttaaagaccaggttattctgcttaacaaacatattgatgcctataaaactttcccgccgaccgaacccaaaaaggacaaaaagaaaaaagctgatgaaacccaggctctaccgcagcgtcagaaaaaacagcaaactgtgactctgctgccagctgcggacctggatgatttttccaagcagctgcaacagtctatgagctctgcggactctacgcaggcttaa

SEQ ID NO: 390 - DNA, 2016 bp, Artificial Sequence
  Description of Artificial Sequence: Synthetic polynucleotide
atgcaccatcatcaccatcatggtggttctggttcgccgatacttggttattggaagattaaaggactggttcagcccacacgcctcctgctagaatacttagaggaaaaatatgaagagcacctgtacgaacgtgatgagggggacaaatggcgaaacaagaaatttgaattgggcttagaatttccaaatttgccgtattatatcgatggcgacgtaaaactgacccaatcaatggccattattcgctacatcgcagataaacataacatgctgggtggctgccctaaagaacgggctgagatctccatgctggaaggtgcggtgctcgacattcgctacggcgtcagtagaattgcgtatagcaaggatttcgaaactttaaaagtggatttcctgagcaaacttccggagatgctgaaaatgtttgaggataggctttgtcataagacgtatctcaatggtgatcatgttacccacccggactttatgctgtacgacgcccttgatgtcgttctgtatatggatcccatgtgcctggacgccttcccgaaattagtgtgttttaaaaaacgtatcgaagcgattccacagatcgataaatacttgaagtcttctaaatatattgcttggcctctgcaaggctggcaggcaacgttcggtgggggagatcatccgccaaaatcagatctggtgccgcgtgggagccctggcatacaccgcgacggtggttctggtgagaacctgtactttcaaagctcagataatgggcctcaaaaccagcgcaacgctccacgtataaccttcggtggcccgtctgactccacaggcagcaaccagaatggtgagcgtagtggagccaggtctaagcagcgccgtccccagggtctgccgaacaacacggcgagctggtttactgcgcttacccaacacggtaaagaagacttaaaattcccgcgtggccagggcgtcccgatcaacactaactcttccccggatgatcagattggttattaccgcagagcaactcgtcggattcgcggcggcgacggtaaaatgaaagatttgtctccgcgttggtacttttactatctcggcaccggtccggaagctggactgccctacggggcaaacaaggacgggatcatttgggtggctaccgaaggtgccctgaatactccaaaagatcatatcggcacccgtaaccctgctaataacgctgcgatcgttctgcaactgcctcagggtacaactctgccaaaaggcttctatgcagaagggtcgcgtggtggcagccaggcgagtagccgtagcagctcccgctctcgcaactcgtcccgtaactccactccgggctcttctcgcggcacgtccccggctcgtatggcaggtaacggtggtgacgctgctctggcgctgctactgctggacaggctgaaccagctggagtcgaagatgagtggtaaaggccaacagcagcagggccagaccgttaccaaaaagagcgcagctgaagcatctaaaaaaccgcgacagaaacgtaccgcgactaaaggatacaatgtaacacaggccttcggtcgtcgaggtccggagcaaactcaaggaaactttggcgatcaggatttaaataaattggggaccgactacaaacactggccgcaaattgcccagttcgccccatccgctagtgcattcttcggtatgagccgcatctcaacgcgggaaacgccaagtggtacgtggctgacctacaccggtgctatcaagcttgataaaaaggacccgaactttaaagaccaggttattctgcttaacaaacatattgatgcctataaaactttcccgccgaccgaacccaaaaaggacaaaaagaaaaaagctgatgaaacccaggctctaccgcagcgtcagaaaaaacagcaaactgtgactctgctgccagctgcggacctggatgatttttccaagcagctgcaacagtctatgagctctgcggactctacgcaggcttaa

SEQ ID NO: 391 - DNA, 2016 bp, Artificial Sequence
  Description of Artificial Sequence: Synthetic polynucleotide
atgcaccatcatcaccatcatggtggttctggttcgccgatacttggttattggaagattaaaggactggttcagcccacacgcctcctgctagaatacttagaggaaaaatatgaagagcacctgtacgaacgtgatgagggggacaaatggcgaaacaagaaatttgaattgggcttagaatttccaaatttgccgtattatatcgatggcgacgtaaaactgacccaatcaatggccattattcgctacatcgcagataaacataacatgctgggtggctgccctaaagaacgggctgagatctccatgctggaaggtgcggtgctcgacattcgctacggcgtcagtagaattgcgtatagcaaggatttcgaaactttaaaagtggatttcctgagcaaacttccggagatgctgaaaatgtttgaggataggctttgtcataagacgtatctcaatggtgatcatgttacccacccggactttatgctgtacgacgcccttgatgtcgttctgtatatggatcccatgtgcctggacgccttcccgaaattagtgtgttttaaaaaacgtatcgaagcgattccacagatcgataaatacttgaagtcttctaaatatattgcttggcctctgcaaggctggcaggcaacgttcggtgggggagatcatccgccaaaatcagatctggtgccgcgtgggagccctggcatacaccgcgacggtggttctggtgagaacctgtactttcaaagctcagataatgggcctcaaaaccagcgcaacgctccacgtataaccttcggtggcccgtctgactccacaggcagcaaccagaatggtgagcgtagtggagccaggtctaagcagcgccgtccccagggtctgccgaacaacacggcgagctggtttactgcgcttacccaacacggtaaagaagacttaaaattcccgcgtggccagggcgtcccgatcaacactaactcttccccggatgatcagattggttattaccgcagagcaactcgtcggattcgcggcggcgacggtaaaatgaaagatttgtctccgcgttggtacttttactatctcggcaccggtccggaagctggactgccctacggggcaaacaaggacgggatcatttgggtggctaccgaaggtgcccgaaatactccaaaagatcatatcggcacccgtaaccctgctaataacgctgcgatcgttctgcaactgcctcagggtacaactctgccaaaaggcttctatgcagaagggtcgcgtggtggcagccaggcgagtagccgtagcagctcccgctctcgcaactcgtcccgtaactccactccgggctcttctcgcggcacgtccccggctcgtatggcaggtaacggtggtgacgctgctctggcgctgctactgctggacaggctgaaccagctggagtcgaagatgagtggtaaaggccaacagcagcagggccagaccgttaccaaaaagagcgcagctgaagcatctaaaaaaccgcgacagaaacgtaccgcgactaaagcgtacaatgtaacacaggccttcggtcgtcgaggtccggagcaaactcaaggaaactttggcgatcaggaattaatccgccaggggaccgactacaaacactggccgcaaattgcccagttcgccccatccgctagtgcattcttcggtatgagccgcatcggcatggaagtaacgccaagtggtacgtggctgacctacaccggtgctatcaagcttgatgacaaggacccgaactttaaagaccaggttattctgcttaacaaacatattgatgcctataaaactttcccgccgaccgaacccaaaaaggacaaaaagaaaaaagctgatgaaacccaggctctaccgcagcgtcagaaaaaacagcaaactgtgactctgctgccagctgcggacctggatgatttttccaagcagctgcaacagtctatgagctctgcggactctacgcaggcttaa

SEQ ID NO: 392 - DNA, 2016 bp, Artificial Sequence
  Description of Artificial Sequence: Synthetic polynucleotide
atgcaccatcatcaccatcatggtggttctggttcgccgatacttggttattggaagattaaaggactggttcagcccacacgcctcctgctagaatacttagaggaaaaatatgaagagcacctgtacgaacgtgatgagggggacaaatggcgaaacaagaaatttgaattgggcttagaatttccaaatttgccgtattatatcgatggcgacgtaaaactgacccaatcaatggccattattcgctacatcgcagataaacataacatgctgggtggctgccctaaagaacgggctgagatctccatgctggaaggtgcggtgctcgacattcgctacggcgtcagtagaattgcgtatagcaaggatttcgaaactttaaaagtggatttcctgagcaaacttccggagatgctgaaaatgtttgaggataggctttgtcataagacgtatctcaatggtgatcatgttacccacccggactttatgctgtacgacgcccttgatgtcgttctgtatatggatcccatgtgcctggacgccttcccgaaattagtgtgttttaaaaaacgtatcgaagcgattccacagatcgataaatacttgaagtcttctaaatatattgcttggcctctgcaaggctggcaggcaacgttcggtgggggagatcatccgccaaaatcagatctggtgccgcgtgggagccctggcatacaccgcgacggtggttctggtgagaacctgtactttcaaagctcagataatgggcctcaaaaccagcgcaacgctccacgtataaccttcggtggcccgtctgactccacaggcagcaaccagaatggtgagcgtagtggagccaggtctaagcagcgccgtccccagggtctgccgaacaacacggcgagctggtttactgcgcttacccaacacggtaaagaagacttaaaattcccgcgtggccagggcgtcccgatcaacactaactcttccccggatgatcagattggttattaccgcagagcaactcgtcggattcgcggcggcgacggtaaaatgaaagatttgtctccgcgttggtacttttactatctcggcaccggtccggaagctggactgccctacggggcaaacaaggacgggatcatttgggtggctaccgaaggtgccctgaatactccaaaagatcatatcggcacccgtaaccctgctaataacgctgcgatcgttctgcaactgcctcagggtacaactctgccaaaaggcttctatgcagaagggtcgcgtggtggcagccaggcgagtagccgtagcagctcccgctctcgcaactcgtcccgtaactccactccgggctcttctcgcggcacgtccccggctcgtatggcaggtaacggtggtgacgctgctctggcgctgctactgctggacaggctgaaccagctggagtcgaagatgagtggtaaaggccaacagcagcagggccagaccgttaccaaaaagagcgcagctgaagcatctaaaaaaccgcgacagaaacgtaccgcgactaaagcgtacaatgtaacacagtgtttcggtcgtcgaggtccggagcaaactcaaggaaactttggcgatcaggaattaatccgccaggggaccgactacaaacactggccgcaaattgcccagttcgccccatccgctagtgcattcttcggtatgagccgcatcggcatggaagtaacgccaagtggtacgtggctgacctacaccggtgctatcaagcttgatgacaaggacccgaactttaaagaccaggttattctgcttaacaaacatattgatgcctataaaactttcccgccgaccgaacccaaaaaggacaaaaagaaaaaagctgatgaaacccaggctctaccgcagcgtcagaaaaaacagcaaactgtgactctgctgccagctgcggacctggatgatttttccaagcagctgcaacagtctatgagctctgcggactctacgcaggcttaa

SEQ ID NO: 393 - DNA, 2016 bp, Artificial Sequence
  Description of Artificial Sequence: Synthetic polynucleotide
atgcaccatcatcaccatcatggtggttctggttcgccgatacttggttattggaagattaaaggactggttcagcccacacgcctcctgctagaatacttagaggaaaaatatgaagagcacctgtacgaacgtgatgagggggacaaatggcgaaacaagaaatttgaattgggcttagaatttccaaatttgccgtattatatcgatggcgacgtaaaactgacccaatcaatggccattattcgctacatcgcagataaacataacatgctgggtggctgccctaaagaacgggctgagatctccatgctggaaggtgcggtgctcgacattcgctacggcgtcagtagaattgcgtatagcaaggatttcgaaactttaaaagtggatttcctgagcaaacttccggagatgctgaaaatgtttgaggataggctttgtcataagacgtatctcaatggtgatcatgttacccacccggactttatgctgtacgacgcccttgatgtcgttctgtatatggatcccatgtgcctggacgccttcccgaaattagtgtgttttaaaaaacgtatcgaagcgattccacagatcgataaatacttgaagtcttctaaatatattgcttggcctctgcaaggctggcaggcaacgttcggtgggggagatcatccgccaaaatcagatctggtgccgcgtgggagccctggcatacaccgcgacggtggttctggtgagaacctgtactttcaaagctcagataatgggcctcaaaaccagcgcaacgctccacgtataaccttcggtggcccgtctgactccacaggcagcaaccagaatggtgagcgtagtggagccaggtctaagcagcgccgtccccagggtctgccgaacaacacggcgagctggtttactgcgcttacccaacacggtaaagaagacttaaaattcccgcgtggccagggcgtcccgatcaacactaactcttccccggatgatcagattggttattaccgcagagcaactcgtcggattcgcggcggcgacggtaaaatgaaagatttgtctccgcgttggtacttttactatctcggcaccggtccggaagctggactgccctacggggcaaacaaggacgggatcatttgggtggctaccgaaggtgccctgaatactccaaaagatcatatcggcacccgtaaccctgctaataacgctgcgatcgttctgcaactgcctcagggtacaactctgccaaaaggcttctatgcagaagggtcgcgtggtggcagccaggcgagtagccgtagcagctcccgctctcgcaactcgtcccgtaactccactccgggctcttctcgcggcacgtccccggctcgtatggcaggtaacggtggtgacgctgctctggcgctgctactgctggacaggctgaaccagctggagtcgaagatgagtggtaaaggccaacagcagcagggccagaccgttaccaaaaagagcgcagctgaagcatctaaaaaaccgcgacagaaacgtaccgcgactaaagcgtacaatgtaacacaggccttcggtcgtcgaggtccggagcaaactcaaggaaactttggcgatcaggaattaatccgccaggggaccgactacaaacactggccgcaaattgcccagttcgccccatccgctagtgcattcttcggtatgagccgcatcggcgcggaagtaacgccaagtggtacgtggctgacctacaccggtgctatcaagcttgatgacaaggacccgaactttaaagaccaggttattctgcttaacaaacatattgatgcctataaaactttcccgccgaccgaacccaaaaaggacaaaaagaaaaaagctgatgaaacccaggctctaccgcagcgtcagaaaaaacagcaaactgtgactctgctgccagctgcggacctggatgatttttccaagcagctgcaacagtctatgagctctgcggactctacgcaggcttaa

SEQ ID NO: 394 - DNA, 2016 bp, Artificial Sequence
  Description of Artificial Sequence: Synthetic polynucleotide
atgcaccatcatcaccatcatggtggttctggttcgccgatacttggttattggaagattaaaggactggttcagcccacacgcctcctgctagaatacttagaggaaaaatatgaagagcacctgtacgaacgtgatgagggggacaaatggcgaaacaagaaatttgaattgggcttagaatttccaaatttgccgtattatatcgatggcgacgtaaaactgacccaatcaatggccattattcgctacatcgcagataaacataacatgctgggtggctgccctaaagaacgggctgagatctccatgctggaaggtgcggtgctcgacattcgctacggcgtcagtagaattgcgtatagcaaggatttcgaaactttaaaagtggatttcctgagcaaacttccggagatgctgaaaatgtttgaggataggctttgtcataagacgtatctcaatggtgatcatgttacccacccggactttatgctgtacgacgcccttgatgtcgttctgtatatggatcccatgtgcctggacgccttcccgaaattagtgtgttttaaaaaacgtatcgaagcgattccacagatcgataaatacttgaagtcttctaaatatattgcttggcctctgcaaggctggcaggcaacgttcggtgggggagatcatccgccaaaatcagatctggtgccgcgtgggagccctggcatacaccgcgacggtggttctggtgagaacctgtactttcaaagctcagataatgggcctcaaaaccagcgcaacgctccacgtataaccttcggtggcccgtctgactccacaggcagcaaccagaatggtgagcgtagtggagccaggtctaagcagcgccgtccccagggtctgccgaacaacacggcgagctggtttactgcgcttacccaacacggtaaagaagacttaaaattcccgcgtggccagggcgtcccgatcaacactaactcttccccggatgatcagattggttattaccgcagagcaactcgtcggattcgcggcggcgacggtaaaatgaaagatttgtctccgcgttggtacttttactatctcggcaccggtccggaagctggactgccctacggggcaaacaaggacgggatcatttgggtgcataccgaaggtgccctgaatactccaaaagatcatatcggcacccgtaaccctgctaataacgctgcgatcgttctgcaactgcctcagggtacaactctgccaaaaggcttctatgcagaagggtcgcgtggtggcagccaggcgagtagccgtagcagctcccgctctcgcaactcgtcccgtaactccactccgggctcttctcgcggcacgtccccggctcgtatggcaggtaacggtggtgacgctgctctggcgctgctactgctggacaggctgaaccagctggagtcgaagatgagtggtaaaggccaacagcagcagggccagaccgttaccaaaaagagcgcagctgaagcatctaaaaaaccgcgacagaaacgtaccgcgactaaagcgtacaatgtaacacaggccttcggtcgtcgaggtccggagcaaactcaaggaaactttggcgatcaggaattaatccgccaggggaccgactacaaacactggccgcaaattgcccagttcgccccatccgctagtgcattcttcggtatgagccgcatcggcatggaagtaacgccaagtggtacgtggctgacctacaccggtgctatcaagcttgatgacaaggacccgaactttaaagaccaggttattctgcttaacaaacatattgatgcctataaaactttcccgccgaccgaacccaaaaaggacaaaaagaaaaaagctgatgaaacccaggctctaccgcagcgtcagaaaaaacagcaaactgtgactctgctgccagctgcggacctggatgatttttccaagcagctgcaacagtctatgagctctgcggactctacgcaggcttaa

SEQ ID NO: 395 - DNA, 2016 bp, Artificial Sequence
  Description of Artificial Sequence: Synthetic polynucleotide
atgcaccatcatcaccatcatggtggttctggttcgccgatacttggttattggaagattaaaggactggttcagcccacacgcctcctgctagaatacttagaggaaaaatatgaagagcacctgtacgaacgtgatgagggggacaaatggcgaaacaagaaatttgaattgggcttagaatttccaaatttgccgtattatatcgatggcgacgtaaaactgacccaatcaatggccattattcgctacatcgcagataaacataacatgctgggtggctgccctaaagaacgggctgagatctccatgctggaaggtgcggtgctcgacattcgctacggcgtcagtagaattgcgtatagcaaggatttcgaaactttaaaagtggatttcctgagcaaacttccggagatgctgaaaatgtttgaggataggctttgtcataagacgtatctcaatggtgatcatgttacccacccggactttatgctgtacgacgcccttgatgtcgttctgtatatggatcccatgtgcctggacgccttcccgaaattagtgtgttttaaaaaacgtatcgaagcgattccacagatcgataaatacttgaagtcttctaaatatattgcttggcctctgcaaggctggcaggcaacgttcggtgggggagatcatccgccaaaatcagatctggtgccgcgtgggagccctggcatacaccgcgacggtggttctggtgagaacctgtactttcaaagctcagataatgggcctcaaaaccagcgcaacgctccacgtataaccttcggtggcccgtctgactccacaggcagcaaccagaatggtgagcgtagtggagccaggtctaagcagcgccgtccccagggtctgccgaacaacacggcgagctggtttactgcgcttacccaacacggtaaagaagacttaaaattcccgcgtggccagggcgtcccgatcaacactaactcttccccggatgatcagattggttggtaccgcagagcaactcgtcggattcgcggcggcgacggtaaaatgaaagatttgtctccgcgttggtacttttactatctcggcaccggtccggaagctggactgccctacggggcaaacaaggacgggatcatttgggtggctaccgaaggtgccctgaatactccaaaagatcatatcggcacccgtaaccctgctaataacgctgcgatcgttctgcaactgcctcagggtacaactctgccaaaaggcttctatgcagaagggtcgcgtggtggcagccaggcgagtagccgtagcagctcccgctctcgcaactcgtcccgtaactccactccgggctcttctcgcggcacgtccccggctcgtatggcaggtaacggtggtgacgctgctctggcgctgctactgctggacaggctgaaccagctggagtcgaagatgagtggtaaaggccaacagcagcagggccagaccgttaccaaaaagagcgcagctgaagcatctaaaaaaccgcgacagaaacgtaccgcgactaaagcgtacaatgtaacacaggccttcggtcgtcgaggtccggagcaaactcaaggaaactttggcgatcaggaattaatccgccaggggaccgactacaaacactggccgcaaattgcccagttcgccccatccgctagtgcattcttcggtatgagccgcatcggcatggaagtaacgccaagtggtacgtggctgacctacaccggtgctatcaagcttgatgacaaggacccgaactttaaagaccaggttattctgcttaacaaacatattgatgcctataaaactttcccgccgaccgaacccaaaaaggacaaaaagaaaaaagctgatgaaacccaggctctaccgcagcgtcagaaaaaacagcaaactgtgactctgctgccagctgcggacctggatgatttttccaagcagctgcaacagtctatgagctctgcggactctacgcaggcttaa

SEQ ID NO: 396 - DNA, 2016 bp, Artificial Sequence
  Description of Artificial Sequence: Synthetic polynucleotide
atgcaccatcatcaccatcatggtggttctggttcgccgatacttggttattggaagattaaaggactggttcagcccacacgcctcctgctagaatacttagaggaaaaatatgaagagcacctgtacgaacgtgatgagggggacaaatggcgaaacaagaaatttgaattgggcttagaatttccaaatttgccgtattatatcgatggcgacgtaaaactgacccaatcaatggccattattcgctacatcgcagataaacataacatgctgggtggctgccctaaagaacgggctgagatctccatgctggaaggtgcggtgctcgacattcgctacggcgtcagtagaattgcgtatagcaaggatttcgaaactttaaaagtggatttcctgagcaaacttccggagatgctgaaaatgtttgaggataggctttgtcataagacgtatctcaatggtgatcatgttacccacccggactttatgctgtacgacgcccttgatgtcgttctgtatatggatcccatgtgcctggacgccttcccgaaattagtgtgttttaaaaaacgtatcgaagcgattccacagatcgataaatacttgaagtcttctaaatatattgcttggcctctgcaaggctggcaggcaacgttcggtgggggagatcatccgccaaaatcagatctggtgccgcgtgggagccctggcatacaccgcgacggtggttctggtgagaacctgtactttcaaagctcagataatgggcctcaaaaccagcgcaacgctccacgtataaccttcggtggcccgtctgactccacaggcagcaaccagaatggtgagcgtagtggagccaggtctaagcagcgccgtccccagggtctgccgaacaacacggcgagctggtttactgcgcttacccaacacggtaaagaagacttaaaattcccgcgtggccagggcgtcccgatcaactcgaactcttccccggatgatcagattggttattaccgcagagcaactcgtcggattcgcggcggcgacggtaaaatgaaagatttgtctccgcgttggtacttttactatctcggcaccggtccggaagctggactgccctacggggcaaacaaggacgggatcatttgggtggctaccgaaggtgccctgaatactccaaaagatcatatcggcacccgtaaccctgctaataacgctgcgatcgttctgcaactgcctcagggtacaactctgccaaaaggcttctatgcagaagggtcgcgtggtggcagccaggcgagtagccgtagcagctcccgctctcgcaactcgtcccgtaactccactccgggctcttctcgcggcacgtccccggctcgtatggcaggtaacggtggtgacgctgctctggcgctgctactgctggacaggctgaaccagctggagtcgaagatgagtggtaaaggccaacagcagcagggccagaccgttaccaaaaagagcgcagctgaagcatctaaaaaaccgcgacagaaacgtaccgcgactaaagcgtacaatgtaacacaggccttcggtcgtcgaggtccggagcaaactcaaggaaactttggcgatcaggaattaatccgccaggggaccgactacaaacactggccgcaaattgcccagttcgccccatccgctagtgcattcttcggtatgagccgcatcggcatggaagtaacgccaagtggtacgtggctgacctacaccggtgctatcaagcttgatgacaaggacccgaactttaaagaccaggttattctgcttaacaaacatattgatgcctataaaactttcccgccgaccgaacccaaaaaggacaaaaagaaaaaagctgatgaaacccaggctctaccgcagcgtcagaaaaaacagcaaactgtgactctgctgccagctgcggacctggatgatttttccaagcagctgcaacagtctatgagctctgcggactctacgcaggcttaa

SEQ ID NO: 397 - DNA, 2016 bp, Artificial Sequence
  Description of Artificial Sequence: Synthetic polynucleotide
atgcaccatcatcaccatcatggtggttctggttcgccgatacttggttattggaagattaaaggactggttcagcccacacgcctcctgctagaatacttagaggaaaaatatgaagagcacctgtacgaacgtgatgagggggacaaatggcgaaacaagaaatttgaattgggcttagaatttccaaatttgccgtattatatcgatggcgacgtaaaactgacccaatcaatggccattattcgctacatcgcagataaacataacatgctgggtggctgccctaaagaacgggctgagatctccatgctggaaggtgcggtgctcgacattcgctacggcgtcagtagaattgcgtatagcaaggatttcgaaactttaaaagtggatttcctgagcaaacttccggagatgctgaaaatgtttgaggataggctttgtcataagacgtatctcaatggtgatcatgttacccacccggactttatgctgtacgacgcccttgatgtcgttctgtatatggatcccatgtgcctggacgccttcccgaaattagtgtgttttaaaaaacgtatcgaagcgattccacagatcgataaatacttgaagtcttctaaatatattgcttggcctctgcaaggctggcaggcaacgttcggtgggggagatcatccgccaaaatcagatctggtgccgcgtgggagccctggcatacaccgcgacggtggttctggtgagaacctgtactttcaaagctcagataatgggcctcaaaaccagcgcaacgctccacgtataaccttcggtggcccgtctgactccacaggcagcaaccagaatggtgagcgtagtggagccaggtctaagcagcgccgtccccagggtctgccgaacaacacggcgagctggtttactgcgcttacccaacacggtaaagaagacttaaaattcccgcgtggccagggcgtcccgatcaacactaactcttccccggatgatcagattggttattaccgcagagcaactcgtcggattcgcggcggcgacggtaaaatgaaagatttgtctccgcgttggtacttttactatctcggcaccggtccggaagctggactgccctacggggcaaacaaggacgggatcatttgggtggctaccgaaggtgccctgaatactccaaaagatcatatcggcacccgtaaccctgctaataacgctgcgcatgttctgcaactgcctcagggtacaactctgccaaaaggcttctatgcagaagggtcgcgtggtggcagccaggcgagtagccgtagcagctcccgctctcgcaactcgtcccgtaactccactccgggctcttctcgcggcacgtccccggctcgtatggcaggtaacggtggtgacgctgctctggcgctgctactgctggacaggctgaaccagctggagtcgaagatgagtggtaaaggccaacagcagcagggccagaccgttaccaaaaagagcgcagctgaagcatctaaaaaaccgcgacagaaacgtaccgcgactaaagcgtacaatgtaacacaggccttcggtcgtcgaggtccggagcaaactcaaggaaactttggcgatcaggaattaatccgccaggggaccgactacaaacactggccgcaaattgcccagttcgccccatccgctagtgcattcttcggtatgagccgcatcggcatggaagtaacgccaagtggtacgtggctgacctacaccggtgctatcaagcttgatgacaaggacccgaactttaaagaccaggttattctgcttaacaaacatattgatgcctataaaactttcccgccgaccgaacccaaaaaggacaaaaagaaaaaagctgatgaaacccaggctctaccgcagcgtcagaaaaaacagcaaactgtgactctgctgccagctgcggacctggatgatttttccaagcagctgcaacagtctatgagctctgcggactctacgcaggcttaa

SEQ ID NO: 398 - DNA, 2016 bp, Artificial Sequence
  Description of Artificial Sequence: Synthetic polynucleotide
atgcaccatcatcaccatcatggtggttctggttcgccgatacttggttattggaagattaaaggactggttcagcccacacgcctcctgctagaatacttagaggaaaaatatgaagagcacctgtacgaacgtgatgagggggacaaatggcgaaacaagaaatttgaattgggcttagaatttccaaatttgccgtattatatcgatggcgacgtaaaactgacccaatcaatggccattattcgctacatcgcagataaacataacatgctgggtggctgccctaaagaacgggctgagatctccatgctggaaggtgcggtgctcgacattcgctacggcgtcagtagaattgcgtatagcaaggatttcgaaactttaaaagtggatttcctgagcaaacttccggagatgctgaaaatgtttgaggataggctttgtcataagacgtatctcaatggtgatcatgttacccacccggactttatgctgtacgacgcccttgatgtcgttctgtatatggatcccatgtgcctggacgccttcccgaaattagtgtgttttaaaaaacgtatcgaagcgattccacagatcgataaatacttgaagtcttctaaatatattgcttggcctctgcaaggctggcaggcaacgttcggtgggggagatcatccgccaaaatcagatctggtgccgcgtgggagccctggcatacaccgcgacggtggttctggtgagaacctgtactttcaaagctcagataatgggcctcaaaaccagcgcaacgctccacgtataaccttcggtggcccgtctgactccacaggcagcaaccagaatggtgagcgtagtggagccaggtctaagcagcgccgtccccagggtctgccgaacaacacggcgagctggtttactccgcttacccaacacggtaaagaagacttaaaattcccgccaggccagggcgtcccgatcaacactaactcttccccggatgatcagattggttattaccgcagagcaactcgtcggattcgcggcggcgacggtaaaatgaaagatttgcctccgcgttggtacttttactatctcggcaccggtccggaagctgatctgccctacggggcagtgaaggacgggatcgtatgggtggctgaagaaggtgccctgaatactccaaaagatcatatcggcacccgtaaccctgctaataacgctgcgatccccctgcaactgcctccaggtacaactctgccaaaaggcttctatgcagaagggtcgcgtggtggcagccaggcgagtagccgtagcagctcccgctctcgcaactcgtcccgtaactccactccgggctcttctcgcggcacgtccccggctcgtatggcaggtaacggtggtgacgctgctctggcgctgctactgctggacaggctgaaccagctggagtcgaagatgagtggtaaaggccaacagcagcagggccagaccgttaccaaaaagagcgcagctgaagcatctaaaaaaccgcgacagaaacgtaccgcgactaaagcgtacaatgtaacacaggccttcggtcgtcgaggtccggagcaaactcaaggaaactttggcgatcaggaattaatccgccaggggaccgactacaaacactggccgcaaattgcccagttcgccccatccgctagtgcattcttcggtatgagccgcatcggcatggaagtaacgccaagtggtacgtggctgacctacaccggtgctatcaagcttgatgacaaggacccgaactttaaagaccaggttattctgcttaacaaacatattgatgcctataaaactttcccgccgaccgaacccaaaaaggacaaaaagaaaaaagctgatgaaacccaggctctaccgcagcgtcagaaaaaacagcaaactgtgactctgctgccagctgcggacctggatgatttttccaagcagctgcaacagtctatgagctctgcggactctacgcaggcttaa

SEQ ID NO: 399 - DNA, 2016 bp, Artificial Sequence
  Description of Artificial Sequence: Synthetic polynucleotide
atgcaccatcatcaccatcatggtggttctggttcgccgatacttggttattggaagattaaaggactggttcagcccacacgcctcctgctagaatacttagaggaaaaatatgaagagcacctgtacgaacgtgatgagggggacaaatggcgaaacaagaaatttgaattgggcttagaatttccaaatttgccgtattatatcgatggcgacgtaaaactgacccaatcaatggccattattcgctacatcgcagataaacataacatgctgggtggctgccctaaagaacgggctgagatctccatgctggaaggtgcggtgctcgacattcgctacggcgtcagtagaattgcgtatagcaaggatttcgaaactttaaaagtggatttcctgagcaaacttccggagatgctgaaaatgtttgaggataggctttgtcataagacgtatctcaatggtgatcatgttacccacccggactttatgctgtacgacgcccttgatgtcgttctgtatatggatcccatgtgcctggacgccttcccgaaattagtgtgttttaaaaaacgtatcgaagcgattccacagatcgataaatacttgaagtcttctaaatatattgcttggcctctgcaaggctggcaggcaacgttcggtgggggagatcatccgccaaaatcagatctggtgccgcgtgggagccctggcatacaccgcgacggtggttctggtgagaacctgtactttcaaagctcagataatgggcctcaaaaccagcgcaacgctccacgtataaccttcggtggcccgtctgactccacaggcagcaaccagaatggtgagcgtagtggagccaggtctaagcagcgccgtccccagggtctgccgaacaacacggcgagctggtttactgcgcttacccaacacggtaaagaagacttaaaattcccgcgtggccagggcgtcccgatcaacaaaaactcttccccggatgatcagattggttattaccgcagagcaactcgtcggattcgcggcggcgacggtaaaatgaaagatttgtctccgcgttggtacttttactatctcggcaccggtccggaagctggactgccctacggggcaaacaaggacgggatcatttgggtggctaccgaaggtgccctgaatactccaaaagatcatatcggcacccgtaaccctgctaataacgctgcgatcgttctgcaactgcctcagggtacaactctgccaaaaggcttctatgcagaagggtcgcgtggtggcagccaggcgagtagccgtagcagctcccgctctcgcaactcgtcccgtaactccactccgggctcttctcgcggcacgtccccggctcgtatggcaggtaacggtggtgacgctgctctggcgctgctactgctggacaggctgaaccagctggagtcgaagatgagtggtaaaggccaacagcagcagggccagaccgttaccaaaaagagcgcagctgaagcatctaaaaaaccgcgacagaaacgtaccgcgactaaagcgtacaatgtaacacaggccttcggtcgtcgaggtccggagcaaactcaaggaaactttggcgatcaggaattaatccgccaggggaccgactacaaacactggccgcaaattgcccagttcgccccatccgctagtgcattcttcggtatgagccgcatcggcatggaagtaacgccaagtggtacgtggctgacctacaccggtgctatcaagcttgatgacaaggacccgaactttaaagaccaggttattctgcttaacaaacatattgatgcctataaaactttcccgccgaccgaacccaaaaaggacaaaaagaaaaaagctgatgaaacccaggctctaccgcagcgtcagaaaaaacagcaaactgtgactctgctgccagctgcggacctggatgatttttccaagcagctgcaacagtctatgagctctgcggactctacgcaggcttaa

SEQ ID NO: 400 - DNA, 2016 bp, Artificial Sequence
  Description of Artificial Sequence: Synthetic polynucleotide
atgcaccatcatcaccatcatggtggttctggttcgccgatacttggttattggaagattaaaggactggttcagcccacacgcctcctgctagaatacttagaggaaaaatatgaagagcacctgtacgaacgtgatgagggggacaaatggcgaaacaagaaatttgaattgggcttagaatttccaaatttgccgtattatatcgatggcgacgtaaaactgacccaatcaatggccattattcgctacatcgcagataaacataacatgctgggtggctgccctaaagaacgggctgagatctccatgctggaaggtgcggtgctcgacattcgctacggcgtcagtagaattgcgtatagcaaggatttcgaaactttaaaagtggatttcctgagcaaacttccggagatgctgaaaatgtttgaggataggctttgtcataagacgtatctcaatggtgatcatgttacccacccggactttatgctgtacgacgcccttgatgtcgttctgtatatggatcccatgtgcctggacgccttcccgaaattagtgtgttttaaaaaacgtatcgaagcgattccacagatcgataaatacttgaagtcttctaaatatattgcttggcctctgcaaggctggcaggcaacgttcggtgggggagatcatccgccaaaatcagatctggtgccgcgtgggagccctggcatacaccgcgacggtggttctggtgagaacctgtactttcaaagctcagataatgggcctcaaaaccagcgcaacgctccacgtataaccttcggtggcccgtctgactccacaggcagcaaccagaatggtgagcgtagtggagccaggtctaagcagcgccgtccccagggtctgccgaacaacacggcgagctggtttactgcgcttacccaacacggtaaagaagacttaaaattcccgcgtggccagggcgtcccgatcaacactaactcttccccggatgatcagattggttattaccgcagagcaactcgtcggattcgcggcggcgacggtaaaatgaaagatttgtctccgcgttggtacttttactatctcggcaccggtccggaagctggactgccctacgggtcgaacaaggacgggatcatttgggtggctaccgaaggtgccctgaatactccaaaagatcatatcggcacccgtaaccctgctaataacgctgcgatcgttctgcaactgcctcagggtacaactctgccaaaaggcttctatgcagaagggtcgcgtggtggcagccaggcgagtagccgtagcagctcccgctctcgcaactcgtcccgtaactccactccgggctcttctcgcggcacgtccccggctcgtatggcaggtaacggtggtgacgctgctctggcgctgctactgctggacaggctgaaccagctggagtcgaagatgagtggtaaaggccaacagcagcagggccagaccgttaccaaaaagagcgcagctgaagcatctaaaaaaccgcgacagaaacgtaccgcgactaaagcgtacaatgtaacacaggccttcggtcgtcgaggtccggagcaaactcaaggaaactttggcgatcaggaattaatccgccaggggaccgactacaaacactggccgcaaattgcccagttcgccccatccgctagtgcattcttcggtatgagccgcatcggcatggaagtaacgccaagtggtacgtggctgacctacaccggtgctatcaagcttgatgacaaggacccgaactttaaagaccaggttattctgcttaacaaacatattgatgcctataaaactttcccgccgaccgaacccaaaaaggacaaaaagaaaaaagctgatgaaacccaggctctaccgcagcgtcagaaaaaacagcaaactgtgactctgctgccagctgcggacctggatgatttttccaagcagctgcaacagtctatgagctctgcggactctacgcaggcttaa

SEQ ID NO: 401 - DNA, 2016 bp, Artificial Sequence
  Description of Artificial Sequence: Synthetic polynucleotide
atgcaccatcatcaccatcatggtggttctggttcgccgatacttggttattggaagattaaaggactggttcagcccacacgcctcctgctagaatacttagaggaaaaatatgaagagcacctgtacgaacgtgatgagggggacaaatggcgaaacaagaaatttgaattgggcttagaatttccaaatttgccgtattatatcgatggcgacgtaaaactgacccaatcaatggccattattcgctacatcgcagataaacataacatgctgggtggctgccctaaagaacgggctgagatctccatgctggaaggtgcggtgctcgacattcgctacggcgtcagtagaattgcgtatagcaaggatttcgaaactttaaaagtggatttcctgagcaaacttccggagatgctgaaaatgtttgaggataggctttgtcataagacgtatctcaatggtgatcatgttacccacccggactttatgctgtacgacgcccttgatgtcgttctgtatatggatcccatgtgcctggacgccttcccgaaattagtgtgttttaaaaaacgtatcgaagcgattccacagatcgataaatacttgaagtcttctaaatatattgcttggcctctgcaaggctggcaggcaacgttcggtgggggagatcatccgccaaaatcagatctggtgccgcgtgggagccctggcatacaccgcgacggtggttctggtgagaacctgtactttcaaagctcagataatgggcctcaaaaccagcgcaacgctccacgtataaccttcggtggcccgtctgactccacaggcagcaaccagaatggtgagcgtagtggagccaggtctaagcagcgccgtccccagggtctgccgaacaacacggcgagctggtttactgcgcttacccaacacggtaaagaagacttaaaattcccgcgtggccagggcgtcccgatcaacactaactcttccccggatgatcagattggttattaccgcagagcaactcgtcggattcgcggcggcgacggtaaaatgaaagatttgtctccgcgttggtacttttactatctcggcaccggtccggaagctggactgccctacggggcaaacaaggacgggatcatttgggtggctaccgaaggtgccaataatactccaaaagatcatatcggcacccgtaaccctgctaataacgctgcgatcgttctgcaactgcctcagggtacaactctgccaaaaggcttctatgcagaagggtcgcgtggtggcagccaggcgagtagccgtagcagctcccgctctcgcaactcgtcccgtaactccactccgggctcttctcgcggcacgtccccggctcgtatggcaggtaacggtggtgacgctgctctggcgctgctactgctggacaggctgaaccagctggagtcgaagatgagtggtaaaggccaacagcagcagggccagaccgttaccaaaaagagcgcagctgaagcatctaaaaaaccgcgacagaaacgtaccgcgactaaagcgtacaatgtaacacaggccttcggtcgtcgaggtccggagcaaactcaaggaaactttggcgatcaggaattaatccgccaggggaccgactacaaacactggccgcaaattgcccagttcgccccatccgctagtgcattcttcggtatgagccgcatcggcatggaagtaacgccaagtggtacgtggctgacctacaccggtgctatcaagcttgatgacaaggacccgaactttaaagaccaggttattctgcttaacaaacatattgatgcctataaaactttcccgccgaccgaacccaaaaaggacaaaaagaaaaaagctgatgaaacccaggctctaccgcagcgtcagaaaaaacagcaaactgtgactctgctgccagctgcggacctggatgatttttccaagcagctgcaacagtctatgagctctgcggactctacgcaggcttaa

SEQ ID NO: 402 - DNA, 2016 bp, Artificial Sequence
  Description of Artificial Sequence: Synthetic polynucleotide
atgcaccatcatcaccatcatggtggttctggttcgccgatacttggttattggaagattaaaggactggttcagcccacacgcctcctgctagaatacttagaggaaaaatatgaagagcacctgtacgaacgtgatgagggggacaaatggcgaaacaagaaatttgaattgggcttagaatttccaaatttgccgtattatatcgatggcgacgtaaaactgacccaatcaatggccattattcgctacatcgcagataaacataacatgctgggtggctgccctaaagaacgggctgagatctccatgctggaaggtgcggtgctcgacattcgctacggcgtcagtagaattgcgtatagcaaggatttcgaaactttaaaagtggatttcctgagcaaacttccggagatgctgaaaatgtttgaggataggctttgtcataagacgtatctcaatggtgatcatgttacccacccggactttatgctgtacgacgcccttgatgtcgttctgtatatggatcccatgtgcctggacgccttcccgaaattagtgtgttttaaaaaacgtatcgaagcgattccacagatcgataaatacttgaagtcttctaaatatattgcttggcctctgcaaggctggcaggcaacgttcggtgggggagatcatccgccaaaatcagatctggtgccgcgtgggagccctggcatacaccgcgacggtggttctggtgagaacctgtactttcaaagctcagataatgggcctcaaaaccagcgcaacgctccacgtataaccttcggtggcccgtctgactccacaggcagcaaccagaatggtgagcgtagtggagccaggtctaagcagcgccgtccccagggtctgccgaacaacacggcgagctggtttactgcgcttacccaacacggtaaagaagacttaaaattcccgcgtggccagggcgtcccgatcaacactaactcttccccggatgatcagattggttattaccgcagagcaactcgtcggattcgcggcggcgacggtaaaatgaaagatttgtctccgcgttggtacttttactatctcggcaccggtccggaagctacgctgccctacggggcaaacaaggacgggatcatttgggtggctaccgaaggtgccctgaatactccaaaagatcatatcggcacccgtaaccctgctaataacgctgcgatcgttctgcaactgcctcagggtacaactctgccaaaaggcttctatgcagaagggtcgcgtggtggcagccaggcgagtagccgtagcagctcccgctctcgcaactcgtcccgtaactccactccgggctcttctcgcggcacgtccccggctcgtatggcaggtaacggtggtgacgctgctctggcgctgctactgctggacaggctgaaccagctggagtcgaagatgagtggtaaaggccaacagcagcagggccagaccgttaccaaaaagagcgcagctgaagcatctaaaaaaccgcgacagaaacgtaccgcgactaaagcgtacaatgtaacacaggccttcggtcgtcgaggtccggagcaaactcaaggaaactttggcgatcaggaattaatccgccaggggaccgactacaaacactggccgcaaattgcccagttcgccccatccgctagtgcattcttcggtatgagccgcatcggcatggaagtaacgccaagtggtacgtggctgacctacaccggtgctatcaagcttgatgacaaggacccgaactttaaagaccaggttattctgcttaacaaacatattgatgcctataaaactttcccgccgaccgaacccaaaaaggacaaaaagaaaaaagctgatgaaacccaggctctaccgcagcgtcagaaaaaacagcaaactgtgactctgctgccagctgcggacctggatgatttttccaagcagctgcaacagtctatgagctctgcggactctacgcaggcttaa

SEQ ID NO: 403 - DNA, 2016 bp, Artificial Sequence
  Description of Artificial Sequence: Synthetic polynucleotide
atgcaccatcatcaccatcatggtggttctggttcgccgatacttggttattggaagattaaaggactggttcagcccacacgcctcctgctagaatacttagaggaaaaatatgaagagcacctgtacgaacgtgatgagggggacaaatggcgaaacaagaaatttgaattgggcttagaatttccaaatttgccgtattatatcgatggcgacgtaaaactgacccaatcaatggccattattcgctacatcgcagataaacataacatgctgggtggctgccctaaagaacgggctgagatctccatgctggaaggtgcggtgctcgacattcgctacggcgtcagtagaattgcgtatagcaaggatttcgaaactttaaaagtggatttcctgagcaaacttccggagatgctgaaaatgtttgaggataggctttgtcataagacgtatctcaatggtgatcatgttacccacccggactttatgctgtacgacgcccttgatgtcgttctgtatatggatcccatgtgcctggacgccttcccgaaattagtgtgttttaaaaaacgtatcgaagcgattccacagatcgataaatacttgaagtcttctaaatatattgcttggcctctgcaaggctggcaggcaacgttcggtgggggagatcatccgccaaaatcagatctggtgccgcgtgggagccctggcatacaccgcgacggtggttctggtgagaacctgtactttcaaagctcagataatgggcctcaaaaccagcgcaacgctccacgtataaccttcggtggcccgtctgactccacaggcagcaaccagaatggtgagcgtagtggagccaggtctaagcagcgccgtccccagggtctgccgaacaacacggcgagctggtttactgcgcttacccaacacggtaaagaagacttaaaattcccgcgtggccagggcgtcccgatcaacactaactcttccccggatgatcagattggttattaccgcagagcaactcgtcggattcgcggcggcgacggtaaaatgaaagatttgtctccgcgttggtacttttactatctcggcaccggtccggaagctggactgccctacggggcaaacaaggacgggatcatttgggtggctaccgaaggtgccctgaatactccaaaagatcatatcggcacccgtaaccctgctaataacgctgcgatcgttctgcaactgcctcagggtacaactctgccaaaaggcttctatgcagaagggtcgcgtggtggcagccaggcgagtagccgtagcagctcccgctctcgcaactcgtcccgtaactccactccgggctcttctcgcggcacgtccccggctcgtatggcaggtaacggtggtgacgctgctctggcgctgctactgctggacaggctgaaccagctggagtcgaagatgagtggtaaaggccaacagcagcagggccagaccgttaccaaaaagagcgcagctgaagcatctaaagtaccgcgacagaaacgtaccgcgactaaagcgtacaatgtaacacaggccttcggtcgtcgaggtccggagcaaactcaaggaaactttggcgatcaggaattaatccgccaggggaccgactacaaacactggccgcaaattgcccagttcgccccatccgctagtgcattcttcggtatgagccgcatcggcatggaagtaacgccaagtggtacgtggctgacctacaccggtgctatcaagcttgatgacaaggacccgaactttaaagaccaggttattctgcttaacaaacatattgatgcctataaaactttcccgccgaccgaacccaaaaaggacaaaaagaaaaaagctgatgaaacccaggctctaccgcagcgtcagaaaaaacagcaaactgtgactctgctgccagctgcggacctggatgatttttccaagcagctgcaacagtctatgagctctgcggactctacgcaggcttaa

SEQ ID NO: 404 - DNA, 2016 bp, Artificial Sequence
  Description of Artificial Sequence: Synthetic polynucleotide
atgcaccatcatcaccatcatggtggttctggttcgccgatacttggttattggaagattaaaggactggttcagcccacacgcctcctgctagaatacttagaggaaaaatatgaagagcacctgtacgaacgtgatgagggggacaaatggcgaaacaagaaatttgaattgggcttagaatttccaaatttgccgtattatatcgatggcgacgtaaaactgacccaatcaatggccattattcgctacatcgcagataaacataacatgctgggtggctgccctaaagaacgggctgagatctccatgctggaaggtgcggtgctcgacattcgctacggcgtcagtagaattgcgtatagcaaggatttcgaaactttaaaagtggatttcctgagcaaacttccggagatgctgaaaatgtttgaggataggctttgtcataagacgtatctcaatggtgatcatgttacccacccggactttatgctgtacgacgcccttgatgtcgttctgtatatggatcccatgtgcctggacgccttcccgaaattagtgtgttttaaaaaacgtatcgaagcgattccacagatcgataaatacttgaagtcttctaaatatattgcttggcctctgcaaggctggcaggcaacgttcggtgggggagatcatccgccaaaatcagatctggtgccgcgtgggagccctggcatacaccgcgacggtggttctggtgagaacctgtactttcaaagctcagataatgggcctcaaaaccagcgcaacgctccacgtataaccttcggtggcccgtctgactccacaggcagcaaccagaatggtgagcgtagtggagccaggtctaagcagcgccgtccccagggtctgccgaacaacacggcgagctggtttactgcgcttacccaacacggtaaagaagacttaaaattcccgcgtggccagggcgtcccgatcaacactaactcttccccggatgatcagattggttattaccgcagagcaactcgtcggattcgcggcggcgacggtaaaatgaaagatttgtctccgcgttggtacttttactatctcggcaccggtccggaagctggactgccctacggggcaaacaaggtggggatcatttgggtggctaccgaaggtgccctgaatactccaaaagatcatatcggcacccgtaaccctgctaataacgctgcgatcgttctgcaactgcctcagggtacaactctgccaaaaggcttctatgcagaagggtcgcgtggtggcagccaggcgagtagccgtagcagctcccgctctcgcaactcgtcccgtaactccactccgggctcttctcgcggcacgtccccggctcgtatggcaggtaacggtggtgacgctgctctggcgctgctactgctggacaggctgaaccagctggagtcgaagatgagtggtaaaggccaacagcagcagggccagaccgttaccaaaaagagcgcagctgaagcatctaaaaaaccgcgacagaaacgtaccgcgactaaagcgtacaatgtaacacaggccttcggtcgtcgaggtccggagcaaactcaaggaaactttggcgatcaggaattaatccgccaggggaccgactacaaacactggccgcaaattgcccagttcgccccatccgctagtgcattcttcggtatgagccgcatcggcatggaagtaacgccaagtggtacgtggctgacctacaccggtgctatcaagcttgatgacaaggacccgaactttaaagaccaggttattctgcttaacaaacatattgatgcctataaaactttcccgccgaccgaacccaaaaaggacaaaaagaaaaaagctgatgaaacccaggctctaccgcagcgtcagaaaaaacagcaaactgtgactctgctgccagctgcggacctggatgatttttccaagcagctgcaacagtctatgagctctgcggactctacgcaggcttaa

SEQ ID NO: 405 - DNA, 2016 bp, Artificial Sequence
  Description of Artificial Sequence: Synthetic polynucleotide
atgcaccatcatcaccatcatggtggttctggttcgccgatacttggttattggaagattaaaggactggttcagcccacacgcctcctgctagaatacttagaggaaaaatatgaagagcacctgtacgaacgtgatgagggggacaaatggcgaaacaagaaatttgaattgggcttagaatttccaaatttgccgtattatatcgatggcgacgtaaaactgacccaatcaatggccattattcgctacatcgcagataaacataacatgctgggtggctgccctaaagaacgggctgagatctccatgctggaaggtgcggtgctcgacattcgctacggcgtcagtagaattgcgtatagcaaggatttcgaaactttaaaagtggatttcctgagcaaacttccggagatgctgaaaatgtttgaggataggctttgtcataagacgtatctcaatggtgatcatgttacccacccggactttatgctgtacgacgcccttgatgtcgttctgtatatggatcccatgtgcctggacgccttcccgaaattagtgtgttttaaaaaacgtatcgaagcgattccacagatcgataaatacttgaagtcttctaaatatattgcttggcctctgcaaggctggcaggcaacgttcggtgggggagatcatccgccaaaatcagatctggtgccgcgtgggagccctggcatacaccgcgacggtggttctggtgagaacctgtactttcaaagctcagataatgggcctcaaaaccagcgcaacgctccacgtataaccttcggtggcccgtctgactccacaggcagcaaccagaatggtgagcgtagtggagccaggtctaagcagcgccgtccccagggtctgccgaacaacacggcgagctggtttactgcgcttacccaacacggtaaagaagacttaaaattcccgcgtggccagggcgtcccgatcaacactaactcttccccggatgatcagattggttattaccgcagagcaactcgtcggattcgcggcggcgacggtaaaatgaaagatttgtctccgcgttggtacttttactatctcggcaccggtccggaagctggactgccctacggggcaaacaaggacgggatccattgggtggctaccgaaggtgccctgaatactccaaaagatcatatcggcacccgtaaccctgctaataacgctgcgatcgttctgcaactgcctcagggtacaactctgccaaaaggcttctatgcagaagggtcgcgtggtggcagccaggcgagtagccgtagcagctcccgctctcgcaactcgtcccgtaactccactccgggctcttctcgcggcacgtccccggctcgtatggcaggtaacggtggtgacgctgctctggcgctgctactgctggacaggctgaaccagctggagtcgaagatgagtggtaaaggccaacagcagcagggccagaccgttaccaaaaagagcgcagctgaagcatctaaaaaaccgcgacagaaacgtaccgcgactaaagcgtacaatgtaacacaggccttcggtcgtcgaggtccggagcaaactcaaggaaactttggcgatcaggaattaatccgccaggggaccgactacaaacactggccgcaaattgcccagttcgccccatccgctagtgcattcttcggtatgagccgcatcggcatggaagtaacgccaagtggtacgtggctgacctacaccggtgctatcaagcttgatgacaaggacccgaactttaaagaccaggttattctgcttaacaaacatattgatgcctataaaactttcccgccgaccgaacccaaaaaggacaaaaagaaaaaagctgatgaaacccaggctctaccgcagcgtcagaaaaaacagcaaactgtgactctgctgccagctgcggacctggatgatttttccaagcagctgcaacagtctatgagctctgcggactctacgcaggcttaa

SEQ ID NO: 406 - DNA, 2016 bp, Artificial Sequence
  Description of Artificial Sequence: Synthetic polynucleotide
atgcaccatcatcaccatcatggtggttctggttcgccgatacttggttattggaagattaaaggactggttcagcccacacgcctcctgctagaatacttagaggaaaaatatgaagagcacctgtacgaacgtgatgagggggacaaatggcgaaacaagaaatttgaattgggcttagaatttccaaatttgccgtattatatcgatggcgacgtaaaactgacccaatcaatggccattattcgctacatcgcagataaacataacatgctgggtggctgccctaaagaacgggctgagatctccatgctggaaggtgcggtgctcgacattcgctacggcgtcagtagaattgcgtatagcaaggatttcgaaactttaaaagtggatttcctgagcaaacttccggagatgctgaaaatgtttgaggataggctttgtcataagacgtatctcaatggtgatcatgttacccacccggactttatgctgtacgacgcccttgatgtcgttctgtatatggatcccatgtgcctggacgccttcccgaaattagtgtgttttaaaaaacgtatcgaagcgattccacagatcgataaatacttgaagtcttctaaatatattgcttggcctctgcaaggctggcaggcaacgttcggtgggggagatcatccgccaaaatcagatctggtgccgcgtgggagccctggcatacaccgcgacggtggttctggtgagaacctgtactttcaaagctcagataatgggcctcaaaaccagcgcaacgctccacgtataaccttcggtggcccgtctgactccacaggcagcaaccagaatggtgagcgtagtggagccaggtctaagcagcgccgtccccagggtctgccgaacaacacggcgagctggtttactgcgcttacccaacacggtaaagaagacttaaaattcccgcgtggccagggcgtcccgatcaacactaactcttccccggatgatcagattggttattaccgcagagcaactcgtcggattcgcggcggcgacggtaaaatgaaagatttgtctccgcgttggtacttttactatctcggcaccggtccggaagctggactgccctacggggcaaacaaggacgggatcatttgggtggctaccgaaggtgccctgaatactccaaaagatcatatcggcacccgtaaccctgctaataacgctgcgatcgttctgcaactgcctcagggtacaactctgccaaaaggcttctatgcagaagggtcgcgtggtggcagccaggcgagtagccgtagcagctcccgctctcgcaactcgtcccgtaactccactccgggctcttctcgcggcacgtccccggctcgtatggcaggtaacggtggtgacgctgctctggcgctgctactgctggacaggctgaaccagctggagtcgaagatgagtggtaaaggccaacagcagcagggccagaccgttaccaaaaagaaagcagctgaagcatctaaaaaaccgcgacagaaacgtaccgcgactaaagcgtacaatgtaacacaggccttcggtcgtcgaggtccggagcaaactcaaggaaactttggcgatcaggaattaatccgccaggggaccgactacaaacactggccgcaaattgcccagttcgccccatccgctagtgcattcttcggtatgagccgcatcggcatggaagtaacgccaagtggtacgtggctgacctacaccggtgctatcaagcttgatgacaaggacccgaactttaaagaccaggttattctgcttaacaaacatattgatgcctataaaactttcccgccgaccgaacccaaaaaggacaaaaagaaaaaagctgatgaaacccaggctctaccgcagcgtcagaaaaaacagcaaactgtgactctgctgccagctgcggacctggatgatttttccaagcagctgcaacagtctatgagctctgcggactctacgcaggcttaa

SEQ ID NO: 407 - DNA, 2016 bp, Artificial Sequence
  Description of Artificial Sequence: Synthetic polynucleotide
atgcaccatcatcaccatcatggtggttctggttcgccgatacttggttattggaagattaaaggactggttcagcccacacgcctcctgctagaatacttagaggaaaaatatgaagagcacctgtacgaacgtgatgagggggacaaatggcgaaacaagaaatttgaattgggcttagaatttccaaatttgccgtattatatcgatggcgacgtaaaactgacccaatcaatggccattattcgctacatcgcagataaacataacatgctgggtggctgccctaaagaacgggctgagatctccatgctggaaggtgcggtgctcgacattcgctacggcgtcagtagaattgcgtatagcaaggatttcgaaactttaaaagtggatttcctgagcaaacttccggagatgctgaaaatgtttgaggataggctttgtcataagacgtatctcaatggtgatcatgttacccacccggactttatgctgtacgacgcccttgatgtcgttctgtatatggatcccatgtgcctggacgccttcccgaaattagtgtgttttaaaaaacgtatcgaagcgattccacagatcgataaatacttgaagtcttctaaatatattgcttggcctctgcaaggctggcaggcaacgttcggtgggggagatcatccgccaaaatcagatctggtgccgcgtgggagccctggcatacaccgcgacggtggttctggtgagaacctgtactttcaaagctcagataatgggcctcaaaaccagcgcaacgctccacgtataaccttcggtggcccgtctgactccacaggcagcaaccagaatggtgagcgtagtggagccaggtctaagcagcgccgtccccagggtctgccgaacaacacggcgagctggtttactgcgcttacccaacacggtaaagaagacttaaaattcccgcgtggccagggcgtcccgatcaacactaactcttccccggatgatcagattggttattaccgcagagcaactcgtcggattcgcggcggcgacggtaaaatgaaagatttgtctccgcgttggtacttttactatctcggcaccggtccggaagctggactgccctacggggcaaacaaggacgggatcatttgggtggctaccgaaggtgccctgaatactccaaaagatcatatcggcacccgtaaccctgctaataacgctgcgatcgttctgcaactgcctcagggtacaactctgccaaaaggcttctatgcagaagggtcgcgtggtggcagccaggcgagtagccgtagcagctcccgctctcgcaactcgtcccgtaactccactccgggctcttctcgcggcacgtccccggctcgtatggcaggtaacggtggtgacgctgctctggcgctgctactgctggacaggctgaaccagctggagtcgaagatgagtggtaaaggccaacagcagcagggccagaccgttaccaaaaagagcgcagctgaagcatctaaaaaaccgcgacagaaacgtaccgcgactaaagcgtacaatgtaacacaggccttcggtcgtcgaggtccggagcaaactcaaggaaactttggcgatcaggaattaatccgccaggggaccgactacaaacactggccgcaaattgcccagttcgccccatccgctagtgcattcttcggtatgagccgcatcggcatggaagtaacgccaagtggtacgtggctgacctacaccggtgctatcaagcttgatgacaaggacccgaactttaaagaccaggttattctgcttaaccaacatattgatgcctataaaactttcccgccgaccgaacccaaaaaggacaaaaagaaaaaagctgatgaaacccaggctctaccgcagcgtcagaaaaaacagcaaactgtgactctgctgccagctgcggacctggatgatttttccaagcagctgcaacagtctatgagctctgcggactctacgcaggcttaa

SEQ ID NO: 408 - DNA, 2016 bp, Artificial Sequence
  Description of Artificial Sequence: Synthetic polynucleotide
atgcaccatcatcaccatcatggtggttctggttcgccgatacttggttattggaagattaaaggactggttcagcccacacgcctcctgctagaatacttagaggaaaaatatgaagagcacctgtacgaacgtgatgagggggacaaatggcgaaacaagaaatttgaattgggcttagaatttccaaatttgccgtattatatcgatggcgacgtaaaactgacccaatcaatggccattattcgctacatcgcagataaacataacatgctgggtggctgccctaaagaacgggctgagatctccatgctggaaggtgcggtgctcgacattcgctacggcgtcagtagaattgcgtatagcaaggatttcgaaactttaaaagtggatttcctgagcaaacttccggagatgctgaaaatgtttgaggataggctttgtcataagacgtatctcaatggtgatcatgttacccacccggactttatgctgtacgacgcccttgatgtcgttctgtatatggatcccatgtgcctggacgccttcccgaaattagtgtgttttaaaaaacgtatcgaagcgattccacagatcgataaatacttgaagtcttctaaatatattgcttggcctctgcaaggctggcaggcaacgttcggtgggggagatcatccgccaaaatcagatctggtgccgcgtgggagccctggcatacaccgcgacggtggttctggtgagaacctgtactttcaaagctcagataatgggcctcaaaaccagcgcaacgctccacgtataaccttcggtggcccgtctgactccacaggcagcaaccagaatggtgagcgtagtggagccaggtctaagcagcgccgtccccagggtctgccgaacaacacggcgagctggtttactgcgcttacccaacacggtaaagaagacttaaaattcccgcgtggccagggcacgccgatcaacactaactcttccccggatgatcagattggttattaccgcagagcaactcgtcggattcgcggcggcgacggtaaaatgaaagatttgtctccgcgttggtacttttactatctcggcaccggtccggaagctggactgccctacggggcaaacaaggacgggatcatttgggtggctaccgaaggtgccctgaatactccaaaagatcatatcggcacccgtaaccctgctaataacgctgcgatcgttctgcaactgcctcagggtacaactctgccaaaaggcttctatgcagaagggtcgcgtggtggcagccaggcgagtagccgtagcagctcccgctctcgcaactcgtcccgtaactccactccgggctcttctcgcggcacgtccccggctcgtatggcaggtaacggtggtgacgctgctctggcgctgctactgctggacaggctgaaccagctggagtcgaagatgagtggtaaaggccaacagcagcagggccagaccgttaccaaaaagagcgcagctgaagcatctaaaaaaccgcgacagaaacgtaccgcgactaaagcgtacaatgtaacacaggccttcggtcgtcgaggtccggagcaaactcaaggaaactttggcgatcaggaattaatccgccaggggaccgactacaaacactggccgcaaattgcccagttcgccccatccgctagtgcattcttcggtatgagccgcatcggcatggaagtaacgccaagtggtacgtggctgacctacaccggtgctatcaagcttgatgacaaggacccgaactttaaagaccaggttattctgcttaacaaacatattgatgcctataaaactttcccgccgaccgaacccaaaaaggacaaaaagaaaaaagctgatgaaacccaggctctaccgcagcgtcagaaaaaacagcaaactgtgactctgctgccagctgcggacctggatgatttttccaagcagctgcaacagtctatgagctctgcggactctacgcaggcttaa

SEQ ID NO: 409 - DNA, 2016 bp, Artificial Sequence
  Description of Artificial Sequence: Synthetic polynucleotide
atgcaccatcatcaccatcatggtggttctggttcgccgatacttggttattggaagattaaaggactggttcagcccacacgcctcctgctagaatacttagaggaaaaatatgaagagcacctgtacgaacgtgatgagggggacaaatggcgaaacaagaaatttgaattgggcttagaatttccaaatttgccgtattatatcgatggcgacgtaaaactgacccaatcaatggccattattcgctacatcgcagataaacataacatgctgggtggctgccctaaagaacgggctgagatctccatgctggaaggtgcggtgctcgacattcgctacggcgtcagtagaattgcgtatagcaaggatttcgaaactttaaaagtggatttcctgagcaaacttccggagatgctgaaaatgtttgaggataggctttgtcataagacgtatctcaatggtgatcatgttacccacccggactttatgctgtacgacgcccttgatgtcgttctgtatatggatcccatgtgcctggacgccttcccgaaattagtgtgttttaaaaaacgtatcgaagcgattccacagatcgataaatacttgaagtcttctaaatatattgcttggcctctgcaaggctggcaggcaacgttcggtgggggagatcatccgccaaaatcagatctggtgccgcgtgggagccctggcatacaccgcgacggtggttctggtgagaacctgtactttcaaagctcagataatgggcctcaaaaccagcgcaacgctccacgtataaccttcggtggcccgtctgactccacaggcagcaaccagaatggtgagcgtagtggagccaggtctaagcagcgccgtccccagggtctgccgaacaacacggcgagctggtttactgcgcttacccaacacggtaaagaagacttaaaattcccgcgtggccagggcgtcccgatcaacactaactcttccccggatgatcagattggttattaccgcagagcaactcgtcggattcgcggcggcgacggtaaaatgaaagatttgtctccgcgttggtacttttactatctcggcaccggtccggaagctggactgccctacggggcaaacaaggacgggatcatttgggtggctaccgaaggtgcccaaaatactccaaaagatcatatcggcacccgtaaccctgctaataacgctgcgatcgttctgcaactgcctcagggtacaactctgccaaaaggcttctatgcagaagggtcgcgtggtggcagccaggcgagtagccgtagcagctcccgctctcgcaactcgtcccgtaactccactccgggctcttctcgcggcacgtccccggctcgtatggcaggtaacggtggtgacgctgctctggcgctgctactgctggacaggctgaaccagctggagtcgaagatgagtggtaaaggccaacagcagcagggccagaccgttaccaaaaagagcgcagctgaagcatctaaaaaaccgcgacagaaacgtaccgcgactaaagcgtacaatgtaacacaggccttcggtcgtcgaggtccggagcaaactcaaggaaactttggcgatcaggaattaatccgccaggggaccgactacaaacactggccgcaaattgcccagttcgccccatccgctagtgcattcttcggtatgagccgcatcggcatggaagtaacgccaagtggtacgtggctgacctacaccggtgctatcaagcttgatgacaaggacccgaactttaaagaccaggttattctgcttaacaaacatattgatgcctataaaactttcccgccgaccgaacccaaaaaggacaaaaagaaaaaagctgatgaaacccaggctctaccgcagcgtcagaaaaaacagcaaactgtgactctgctgccagctgcggacctggatgatttttccaagcagctgcaacagtctatgagctctgcggactctacgcaggcttaa

SEQ ID NO: 410 - DNA, 2016 bp, Artificial Sequence
  Description of Artificial Sequence: Synthetic polynucleotide
atgcaccatcatcaccatcatggtggttctggttcgccgatacttggttattggaagattaaaggactggttcagcccacacgcctcctgctagaatacttagaggaaaaatatgaagagcacctgtacgaacgtgatgagggggacaaatggcgaaacaagaaatttgaattgggcttagaatttccaaatttgccgtattatatcgatggcgacgtaaaactgacccaatcaatggccattattcgctacatcgcagataaacataacatgctgggtggctgccctaaagaacgggctgagatctccatgctggaaggtgcggtgctcgacattcgctacggcgtcagtagaattgcgtatagcaaggatttcgaaactttaaaagtggatttcctgagcaaacttccggagatgctgaaaatgtttgaggataggctttgtcataagacgtatctcaatggtgatcatgttacccacccggactttatgctgtacgacgcccttgatgtcgttctgtatatggatcccatgtgcctggacgccttcccgaaattagtgtgttttaaaaaacgtatcgaagcgattccacagatcgataaatacttgaagtcttctaaatatattgcttggcctctgcaaggctggcaggcaacgttcggtgggggagatcatccgccaaaatcagatctggtgccgcgtgggagccctggcatacaccgcgacggtggttctggtgagaacctgtactttcaaagctcagataatgggcctcaaaaccagcgcaacgctccacgtataaccttcggtggcccgtctgactccacaggcagcaaccagaatggtgagcgtagtggagccaggtctaagcagcgccgtccccagggtctgccgaacaacacggcgagctggtttactgcgcttacccaacacggtaaagaagacttaaaattcccgcgtggccagggcgtcccgatcaacactaactcttccccggatgatcagattggttattaccgcagagcaactcgtcggattcgcggcggcgacggtaaaatgaaagatttgtctccgcgttggtacttttactatctcggcaccggtccggaagctggactgccctacggggcaaacaaggacgggatcatttgggtggctaccgaaggtgccctgaatactccaaaagatcatatcggcacccgtaaccctgctaataacgctgcgatcgttctgcaactgcctcagggtacaactctgccaaaaggcttctatgcagaagggtcgcgtggtggcagccaggcgagtagccgtagcagctcccgctctcgcaactcgtcccgtaactccactccgggctcttctcgcggcacgtccccggctcgtatggcaggtaacggtggtgacgctgctctggcgctgctactgctggacaggctgaaccagctggagtcgaagatgagtggtaaaggccaacagcagcagggccagaccgttaccaaaaagagcgcagctgaagcatctaaaaaaccgcgacagaaacgtaccgcgactaaagcgtacaatgtaacacaggccttcggtcgtcgaggtccggagcaaactcaaggaaactttggcgatcagcaattaatccgccaggggaccgactacaaacactggccgcaaattgcccagttcgccccatccgctagtgcattcttcggtatgagccgcatcggcatggaagtaacgccaagtggtacgtggctgacctacaccggtgctatcaagcttgatgacaaggacccgaactttaaagaccaggttattctgcttaacaaacatattgatgcctataaaactttcccgccgaccgaacccaaaaaggacaaaaagaaaaaagctgatgaaacccaggctctaccgcagcgtcagaaaaaacagcaaactgtgactctgctgccagctgcggacctggatgatttttccaagcagctgcaacagtctatgagctctgcggactctacgcaggcttaa

SEQ ID NO: 411 - DNA, 2016 bp, Artificial Sequence
  Description of Artificial Sequence: Synthetic polynucleotide
atgcaccatcatcaccatcatggtggttctggttcgccgatacttggttattggaagattaaaggactggttcagcccacacgcctcctgctagaatacttagaggaaaaatatgaagagcacctgtacgaacgtgatgagggggacaaatggcgaaacaagaaatttgaattgggcttagaatttccaaatttgccgtattatatcgatggcgacgtaaaactgacccaatcaatggccattattcgctacatcgcagataaacataacatgctgggtggctgccctaaagaacgggctgagatctccatgctggaaggtgcggtgctcgacattcgctacggcgtcagtagaattgcgtatagcaaggatttcgaaactttaaaagtggatttcctgagcaaacttccggagatgctgaaaatgtttgaggataggctttgtcataagacgtatctcaatggtgatcatgttacccacccggactttatgctgtacgacgcccttgatgtcgttctgtatatggatcccatgtgcctggacgccttcccgaaattagtgtgttttaaaaaacgtatcgaagcgattccacagatcgataaatacttgaagtcttctaaatatattgcttggcctctgcaaggctggcaggcaacgttcggtgggggagatcatccgccaaaatcagatctggtgccgcgtgggagccctggcatacaccgcgacggtggttctggtgagaacctgtactttcaaagctcagataatgggcctcaaaaccagcgcaacgctccacgtataaccttcggtggcccgtctgactccacaggcagcaaccagaatggtgagcgtagtggagccaggtctaagcagcgccgtccccagggtctgccgaacaacacggcgagctggtttactgcgcttacccaacacggtaaagaagacttaaaattcccgcgtggccagggcgtcccgatcaacactaactcttccccggatgatcagattggttattaccgcagagcaactcgtcggattcgcggcggcgacggtaaaatgaaagatttgtctccgcgttggtacttttactatctcggcaccggtccggaagctggactgccctacggggcaaacaaggacgggatcatttgggtggctaccgaaggtgccctgaatactccaaaagatcatatcggcacccgtaaccctgctaataacgctgcgatcgttctgcaactgcctcagggtacaactctgccaaaaggcttctatgcagaagggtcgcgtggtggcagccaggcgagtagccgtagcagctcccgctctcgcaactcgtcccgtaactccactccgggctcttctcgcggcacgtccccggctcgtatggcaggtaacggtggtgacgctgctctggcgctgctactgctggacaggctgaaccagctggagtcgaagatgagtggtaaaggccaacagcagcagggccagaccgttaccaaaaagagcgcagctgaagcatctaaacgaccgcgacagaaacgtaccgcgactaaagcgtacaatgtaacacaggccttcggtcgtcgaggtccggagcaaactcaaggaaactttggcgatcaggaattaatccgccaggggaccgactacaaacactggccgcaaattgcccagttcgccccatccgctagtgcattcttcggtatgagccgcatcggcatggaagtaacgccaagtggtacgtggctgacctacaccggtgctatcaagcttgatgacaaggacccgaactttaaagaccaggttattctgcttaacaaacatattgatgcctataaaactttcccgccgaccgaacccaaaaaggacaaaaagaaaaaagctgatgaaacccaggctctaccgcagcgtcagaaaaaacagcaaactgtgactctgctgccagctgcggacctggatgatttttccaagcagctgcaacagtctatgagctctgcggactctacgcaggcttaa

SEQ ID NO: 412 - DNA, 2016 bp, Artificial Sequence
  Description of Artificial Sequence: Synthetic polynucleotide
atgcaccatcatcaccatcatggtggttctggttcgccgatacttggttattggaagattaaaggactggttcagcccacacgcctcctgctagaatacttagaggaaaaatatgaagagcacctgtacgaacgtgatgagggggacaaatggcgaaacaagaaatttgaattgggcttagaatttccaaatttgccgtattatatcgatggcgacgtaaaactgacccaatcaatggccattattcgctacatcgcagataaacataacatgctgggtggctgccctaaagaacgggctgagatctccatgctggaaggtgcggtgctcgacattcgctacggcgtcagtagaattgcgtatagcaaggatttcgaaactttaaaagtggatttcctgagcaaacttccggagatgctgaaaatgtttgaggataggctttgtcataagacgtatctcaatggtgatcatgttacccacccggactttatgctgtacgacgcccttgatgtcgttctgtatatggatcccatgtgcctggacgccttcccgaaattagtgtgttttaaaaaacgtatcgaagcgattccacagatcgataaatacttgaagtcttctaaatatattgcttggcctctgcaaggctggcaggcaacgttcggtgggggagatcatccgccaaaatcagatctggtgccgcgtgggagccctggcatacaccgcgacggtggttctggtgagaacctgtactttcaaagctcagataatgggcctcaaaaccagcgcaacgctccacgtataaccttcggtggcccgtctgactccacaggcagcaaccagaatggtgagcgtagtggagccaggtctaagcagcgccgtccccagggtctgccgaacaacacggcgagctggtttactgcgcttacccaacacggtaaagaagacttaaaattcccgcgtggccagggcgtcccgatcaacactaactcttccccggatgatcagattggtagctaccgcagagcaactcgtcggattcgcggcggcgacggtaaaatgaaagatttgtctccgcgttggtacttttactatctcggcaccggtccggaagctggactgccctacggggcaaacaaggacgggatcatttgggtggctaccgaaggtgccctgaatactccaaaagatcatatcggcacccgtaaccctgctaataacgctgcgatcgttctgcaactgcctcagggtacaactctgccaaaaggcttctatgcagaagggtcgcgtggtggcagccaggcgagtagccgtagcagctcccgctctcgcaactcgtcccgtaactccactccgggctcttctcgcggcacgtccccggctcgtatggcaggtaacggtggtgacgctgctctggcgctgctactgctggacaggctgaaccagctggagtcgaagatgagtggtaaaggccaacagcagcagggccagaccgttaccaaaaagagcgcagctgaagcatctaaaaaaccgcgacagaaacgtaccgcgactaaagcgtacaatgtaacacaggccttcggtcgtcgaggtccggagcaaactcaaggaaactttggcgatcaggaattaatccgccaggggaccgactacaaacactggccgcaaattgcccagttcgccccatccgctagtgcattcttcggtatgagccgcatcggcatggaagtaacgccaagtggtacgtggctgacctacaccggtgctatcaagcttgatgacaaggacccgaactttaaagaccaggttattctgcttaacaaacatattgatgcctataaaactttcccgccgaccgaacccaaaaaggacaaaaagaaaaaagctgatgaaacccaggctctaccgcagcgtcagaaaaaacagcaaactgtgactctgctgccagctgcggacctggatgatttttccaagcagctgcaacagtctatgagctctgcggactctacgcaggcttaa

SEQ ID NO: 413 - DNA, 2016 bp, Artificial Sequence
  Description of Artificial Sequence: Synthetic polynucleotide
atgcaccatcatcaccatcatggtggttctggttcgccgatacttggttattggaagattaaaggactggttcagcccacacgcctcctgctagaatacttagaggaaaaatatgaagagcacctgtacgaacgtgatgagggggacaaatggcgaaacaagaaatttgaattgggcttagaatttccaaatttgccgtattatatcgatggcgacgtaaaactgacccaatcaatggccattattcgctacatcgcagataaacataacatgctgggtggctgccctaaagaacgggctgagatctccatgctggaaggtgcggtgctcgacattcgctacggcgtcagtagaattgcgtatagcaaggatttcgaaactttaaaagtggatttcctgagcaaacttccggagatgctgaaaatgtttgaggataggctttgtcataagacgtatctcaatggtgatcatgttacccacccggactttatgctgtacgacgcccttgatgtcgttctgtatatggatcccatgtgcctggacgccttcccgaaattagtgtgttttaaaaaacgtatcgaagcgattccacagatcgataaatacttgaagtcttctaaatatattgcttggcctctgcaaggctggcaggcaacgttcggtgggggagatcatccgccaaaatcagatctggtgccgcgtgggagccctggcatacaccgcgacggtggttctggtgagaacctgtactttcaaagctcagataatgggcctcaaaaccagcgcaacgctccacgtataaccttcggtggcccgtctgactccacaggcagcaaccagaatggtgagcgtagtggagccaggtctaagcagcgccgtccccagggtctgccgaacaacacggcgagctggtttactgcgcttacccaacacggtaaagaagacttaaaattcccgcgtggccagggcgtcccgatcaacactaactcttccccggatgatcagattggttattaccgcagagcaactcgtcggattcgcggcggcgacggtaaaatgaaagatttgtctccggaatggtacttttactatctcggcaccggtccggaagctggactgccctacggggcaaacaaggacgggatcatttgggtggctaccgaaggtgccctgaatactccaaaagatcatatcggcacccgtaaccctgctaataacgctgcgatcgttctgcaactgcctcagggtacaactctgccaaaaggcttctatgcagaagggtcgcgtggtggcagccaggcgagtagccgtagcagctcccgctctcgcaactcgtcccgtaactccactccgggctcttctcgcggcacgtccccggctcgtatggcaggtaacggtggtgacgctgctctggcgctgctactgctggacaggctgaaccagctggagtcgaagatgagtggtaaaggccaacagcagcagggccagaccgttaccaaaaagagcgcagctgaagcatctaaaaaaccgcgacagaaacgtaccgcgactaaagcgtacaatgtaacacaggccttcggtcgtcgaggtccggagcaaactcaaggaaactttggcgatcaggaattaatccgccaggggaccgactacaaacactggccgcaaattgcccagttcgccccatccgctagtgcattcttcggtatgagccgcatcggcatggaagtaacgccaagtggtacgtggctgacctacaccggtgctatcaagcttgatgacaaggacccgaactttaaagaccaggttattctgcttaacaaacatattgatgcctataaaactttcccgccgaccgaacccaaaaaggacaaaaagaaaaaagctgatgaaacccaggctctaccgcagcgtcagaaaaaacagcaaactgtgactctgctgccagctgcggacctggatgatttttccaagcagctgcaacagtctatgagctctgcggactctacgcaggcttaa

SEQ ID NO: 414 - DNA, 2016 bp, Artificial Sequence
  Description of Artificial Sequence: Synthetic polynucleotide
atgcaccatcatcaccatcatggtggttctggttcgccgatacttggttattggaagattaaaggactggttcagcccacacgcctcctgctagaatacttagaggaaaaatatgaagagcacctgtacgaacgtgatgagggggacaaatggcgaaacaagaaatttgaattgggcttagaatttccaaatttgccgtattatatcgatggcgacgtaaaactgacccaatcaatggccattattcgctacatcgcagataaacataacatgctgggtggctgccctaaagaacgggctgagatctccatgctggaaggtgcggtgctcgacattcgctacggcgtcagtagaattgcgtatagcaaggatttcgaaactttaaaagtggatttcctgagcaaacttccggagatgctgaaaatgtttgaggataggctttgtcataagacgtatctcaatggtgatcatgttacccacccggactttatgctgtacgacgcccttgatgtcgttctgtatatggatcccatgtgcctggacgccttcccgaaattagtgtgttttaaaaaacgtatcgaagcgattccacagatcgataaatacttgaagtcttctaaatatattgcttggcctctgcaaggctggcaggcaacgttcggtgggggagatcatccgccaaaatcagatctggtgccgcgtgggagccctggcatacaccgcgacggtggttctggtgagaacctgtactttcaaagctcagataatgggcctcaaaaccagcgcaacgctccacgtataaccttcggtggcccgtctgactccacaggcagcaaccagaatggtgagcgtagtggagccaggtctaagcagcgccgtccccagggtctgccgaacaacacggcgagctggtttactgcgcttacccaacacggtaaagaagacttaaaattcccgcgtggccagggcgtcccgatcaacactaactcttccccggatgatcagattggttattaccgcagagcaactcgtcggattcgcggcggcgacggtaaaatgaaagatttgtctccgcgttggtacttttactatctcggcaccggtccggaagctggactgccctacggggcaaacaaggacgggatcatttgggtggctaccgaaggtgccctgaataaaccaaaagatcatatcggcacccgtaaccctgctaataacgctgcgatcgttctgcaactgcctcagggtacaactctgccaaaaggcttctatgcagaagggtcgcgtggtggcagccaggcgagtagccgtagcagctcccgctctcgcaactcgtcccgtaactccactccgggctcttctcgcggcacgtccccggctcgtatggcaggtaacggtggtgacgctgctctggcgctgctactgctggacaggctgaaccagctggagtcgaagatgagtggtaaaggccaacagcagcagggccagaccgttaccaaaaagagcgcagctgaagcatctaaaaaaccgcgacagaaacgtaccgcgactaaagcgtacaatgtaacacaggccttcggtcgtcgaggtccggagcaaactcaaggaaactttggcgatcaggaattaatccgccaggggaccgactacaaacactggccgcaaattgcccagttcgccccatccgctagtgcattcttcggtatgagccgcatcggcatggaagtaacgccaagtggtacgtggctgacctacaccggtgctatcaagcttgatgacaaggacccgaactttaaagaccaggttattctgcttaacaaacatattgatgcctataaaactttcccgccgaccgaacccaaaaaggacaaaaagaaaaaagctgatgaaacccaggctctaccgcagcgtcagaaaaaacagcaaactgtgactctgctgccagctgcggacctggatgatttttccaagcagctgcaacagtctatgagctctgcggactctacgcaggcttaa

SEQ ID NO: 415 - DNA, 2016 bp, Artificial Sequence
  Description of Artificial Sequence: Synthetic polynucleotide
atgcaccatcatcaccatcatggtggttctggttcgccgatacttggttattggaagattaaaggactggttcagcccacacgcctcctgctagaatacttagaggaaaaatatgaagagcacctgtacgaacgtgatgagggggacaaatggcgaaacaagaaatttgaattgggcttagaatttccaaatttgccgtattatatcgatggcgacgtaaaactgacccaatcaatggccattattcgctacatcgcagataaacataacatgctgggtggctgccctaaagaacgggctgagatctccatgctggaaggtgcggtgctcgacattcgctacggcgtcagtagaattgcgtatagcaaggatttcgaaactttaaaagtggatttcctgagcaaacttccggagatgctgaaaatgtttgaggataggctttgtcataagacgtatctcaatggtgatcatgttacccacccggactttatgctgtacgacgcccttgatgtcgttctgtatatggatcccatgtgcctggacgccttcccgaaattagtgtgttttaaaaaacgtatcgaagcgattccacagatcgataaatacttgaagtcttctaaatatattgcttggcctctgcaaggctggcaggcaacgttcggtgggggagatcatccgccaaaatcagatctggtgccgcgtgggagccctggcatacaccgcgacggtggttctggtgagaacctgtactttcaaagctcagataatgggcctcaaaaccagcgcaacgctccacgtataaccttcggtggcccgtctgactccacaggcagcaaccagaatggtgagcgtagtggagccaggtctaagcagcgccgtccccagggtctgccgaacaacacggcgagctggtttactgcgcttacccaacacggtaaagaagacttaaaattcccgcgtggccagggcgtcccgatcaacactaactcttccccggatgatcagattggttattaccgcagagcaactcgtcggattcgcggcggcgacggtaaaatgaaagatttgtctccgcgttggtacttttactatctcggcaccggtccggaagctggactgccctacggggcaaacaaggacgggatcatttgggtggctcaagaaggtgccctgaatactccaaaagatcatatcggcacccgtaaccctgctaataacgctgcgatcgttctgcaactgcctcagggtacaactctgccaaaaggcttctatgcagaagggtcgcgtggtggcagccaggcgagtagccgtagcagctcccgctctcgcaactcgtcccgtaactccactccgggctcttctcgcggcacgtccccggctcgtatggcaggtaacggtggtgacgctgctctggcgctgctactgctggacaggctgaaccagctggagtcgaagatgagtggtaaaggccaacagcagcagggccagaccgttaccaaaaagagcgcagctgaagcatctaaaaaaccgcgacagaaacgtaccgcgactaaagcgtacaatgtaacacaggccttcggtcgtcgaggtccggagcaaactcaaggaaactttggcgatcaggaattaatccgccaggggaccgactacaaacactggccgcaaattgcccagttcgccccatccgctagtgcattcttcggtatgagccgcatcggcatggaagtaacgccaagtggtacgtggctgacctacaccggtgctatcaagcttgatgacaaggacccgaactttaaagaccaggttattctgcttaacaaacatattgatgcctataaaactttcccgccgaccgaacccaaaaaggacaaaaagaaaaaagctgatgaaacccaggctctaccgcagcgtcagaaaaaacagcaaactgtgactctgctgccagctgcggacctggatgatttttccaagcagctgcaacagtctatgagctctgcggactctacgcaggcttaa

SEQ ID NO: 416 - DNA, 2016 bp, Artificial Sequence
  Description of Artificial Sequence: Synthetic polynucleotide
atgcaccatcatcaccatcatggtggttctggttcgccgatacttggttattggaagattaaaggactggttcagcccacacgcctcctgctagaatacttagaggaaaaatatgaagagcacctgtacgaacgtgatgagggggacaaatggcgaaacaagaaatttgaattgggcttagaatttccaaatttgccgtattatatcgatggcgacgtaaaactgacccaatcaatggccattattcgctacatcgcagataaacataacatgctgggtggctgccctaaagaacgggctgagatctccatgctggaaggtgcggtgctcgacattcgctacggcgtcagtagaattgcgtatagcaaggatttcgaaactttaaaagtggatttcctgagcaaacttccggagatgctgaaaatgtttgaggataggctttgtcataagacgtatctcaatggtgatcatgttacccacccggactttatgctgtacgacgcccttgatgtcgttctgtatatggatcccatgtgcctggacgccttcccgaaattagtgtgttttaaaaaacgtatcgaagcgattccacagatcgataaatacttgaagtcttctaaatatattgcttggcctctgcaaggctggcaggcaacgttcggtgggggagatcatccgccaaaatcagatctggtgccgcgtgggagccctggcatacaccgcgacggtggttctggtgagaacctgtactttcaaagctcagataatgggcctcaaaaccagcgcaacgctccacgtataaccttcggtggcccgtctgactccacaggcagcaaccagaatggtgagcgtagtggagccaggtctaagcagcgccgtccccagggtctgccgaacaacacggcgagctggtttactgcgcttacccaacacggtaaagaagacttaaaattcccgcgtggccagggcgtcccgatcaacactaactcttccccggatgatcagattggttattaccgcagagcaactcgtcggattcgcggcggcgacggtaaaatgaaagatttgtctccgcgttggtacttttactatctcggcaccggtccggaagctggactgccctacggggcaaacaaggacgggatcatttgggtggctaccgaaggtgccctgaatactccaaaagatcatatcggcacccgtaaccctgctaataacgctgcgatcccgctgcaactgcctcagggtacaactctgccaaaaggcttctatgcagaagggtcgcgtggtggcagccaggcgagtagccgtagcagctcccgctctcgcaactcgtcccgtaactccactccgggctcttctcgcggcacgtccccggctcgtatggcaggtaacggtggtgacgctgctctggcgctgctactgctggacaggctgaaccagctggagtcgaagatgagtggtaaaggccaacagcagcagggccagaccgttaccaaaaagagcgcagctgaagcatctaaaaaaccgcgacagaaacgtaccgcgactaaagcgtacaatgtaacacaggccttcggtcgtcgaggtccggagcaaactcaaggaaactttggcgatcaggaattaatccgccaggggaccgactacaaacactggccgcaaattgcccagttcgccccatccgctagtgcattcttcggtatgagccgcatcggcatggaagtaacgccaagtggtacgtggctgacctacaccggtgctatcaagcttgatgacaaggacccgaactttaaagaccaggttattctgcttaacaaacatattgatgcctataaaactttcccgccgaccgaacccaaaaaggacaaaaagaaaaaagctgatgaaacccaggctctaccgcagcgtcagaaaaaacagcaaactgtgactctgctgccagctgcggacctggatgatttttccaagcagctgcaacagtctatgagctctgcggactctacgcaggcttaa

SEQ ID NO: 417 - DNA, 2016 bp, Artificial Sequence
  Description of Artificial Sequence: Synthetic polynucleotide
atgcaccatcatcaccatcatggtggttctggttcgccgatacttggttattggaagattaaaggactggttcagcccacacgcctcctgctagaatacttagaggaaaaatatgaagagcacctgtacgaacgtgatgagggggacaaatggcgaaacaagaaatttgaattgggcttagaatttccaaatttgccgtattatatcgatggcgacgtaaaactgacccaatcaatggccattattcgctacatcgcagataaacataacatgctgggtggctgccctaaagaacgggctgagatctccatgctggaaggtgcggtgctcgacattcgctacggcgtcagtagaattgcgtatagcaaggatttcgaaactttaaaagtggatttcctgagcaaacttccggagatgctgaaaatgtttgaggataggctttgtcataagacgtatctcaatggtgatcatgttacccacccggactttatgctgtacgacgcccttgatgtcgttctgtatatggatcccatgtgcctggacgccttcccgaaattagtgtgttttaaaaaacgtatcgaagcgattccacagatcgataaatacttgaagtcttctaaatatattgcttggcctctgcaaggctggcaggcaacgttcggtgggggagatcatccgccaaaatcagatctggtgccgcgtgggagccctggcatacaccgcgacggtggttctggtgagaacctgtactttcaaagctcagataatgggcctcaaaaccagcgcaacgctccacgtataaccttcggtggcccgtctgactccacaggcagcaaccagaatggtgagcgtagtggagccaggtctaagcagcgccgtccccagggtctgccgaacaacacggcgagctggtttactgcgcttacccaacacggtaaagaagacttaaaattcccgcgtggccagggcgtcccgatcaacactaactcttccccggatgatcagattggttattaccgcagagcaactcgtcggatgcgcggcggcgacggtaaaatgaaagatttgtctccgcgttggtacttttactatctcggcaccggtccggaagctggactgccctacggggcaaacaaggacgggatcatttgggtggctaccgaaggtgccctgaatactccaaaagatcatatcggcacccgtaaccctgctaataacgctgcgatcgttctgcaactgcctcagggtacaactctgccaaaaggcttctatgcagaagggtcgcgtggtggcagccaggcgagtagccgtagcagctcccgctctcgcaactcgtcccgtaactccactccgggctcttctcgcggcacgtccccggctcgtatggcaggtaacggtggtgacgctgctctggcgctgctactgctggacaggctgaaccagctggagtcgaagatgagtggtaaaggccaacagcagcagggccagaccgttaccaaaaagagcgcagctgaagcatctaaaaaaccgcgacagaaacgtaccgcgactaaagcgtacaatgtaacacaggccttcggtcgtcgaggtccggagcaaactcaaggaaactttggcgatcaggaattaatccgccaggggaccgactacaaacactggccgcaaattgcccagttcgccccatccgctagtgcattcttcggtatgagccgcatcggcatggaagtaacgccaagtggtacgtggctgacctacaccggtgctatcaagcttgatgacaaggacccgaactttaaagaccaggttattctgcttaacaaacatattgatgcctataaaactttcccgccgaccgaacccaaaaaggacaaaaagaaaaaagctgatgaaacccaggctctaccgcagcgtcagaaaaaacagcaaactgtgactctgctgccagctgcggacctggatgatttttccaagcagctgcaacagtctatgagctctgcggactctacgcaggcttaa

SEQ ID NO: 418 - DNA, 2016 bp, Artificial Sequence
  Description of Artificial Sequence: Synthetic polynucleotide
atgcaccatcatcaccatcatggtggttctggttcgccgatacttggttattggaagattaaaggactggttcagcccacacgcctcctgctagaatacttagaggaaaaatatgaagagcacctgtacgaacgtgatgagggggacaaatggcgaaacaagaaatttgaattgggcttagaatttccaaatttgccgtattatatcgatggcgacgtaaaactgacccaatcaatggccattattcgctacatcgcagataaacataacatgctgggtggctgccctaaagaacgggctgagatctccatgctggaaggtgcggtgctcgacattcgctacggcgtcagtagaattgcgtatagcaaggatttcgaaactttaaaagtggatttcctgagcaaacttccggagatgctgaaaatgtttgaggataggctttgtcataagacgtatctcaatggtgatcatgttacccacccggactttatgctgtacgacgcccttgatgtcgttctgtatatggatcccatgtgcctggacgccttcccgaaattagtgtgttttaaaaaacgtatcgaagcgattccacagatcgataaatacttgaagtcttctaaatatattgcttggcctctgcaaggctggcaggcaacgttcggtgggggagatcatccgccaaaatcagatctggtgccgcgtgggagccctggcatacaccgcgacggtggttctggtgagaacctgtactttcaaagctcagataatgggcctcaaaaccagcgcaacgctccacgtataaccttcggtggcccgtctgactccacaggcagcaaccagaatggtgagcgtagtggagccaggtctaagcagcgccgtccccagggtctgccgaacaacacggcgagctggtttactgcgcttacccaacacggtaaagaagacttaaaattcccgcgtggccagggcgtcccgatcaacactaactcttccccggatgatcagattggttattaccgcagagcaactcgtcggattcgcggcggcgacggtaaaatgaaagatttgtctccgcgttggtacttttactatctcggcaccggtccggaagctggactgccctacggggcaaacaagacggggatcatttgggtggctaccgaaggtgccctgaatactccaaaagatcatatcggcacccgtaaccctgctaataacgctgcgatcgttctgcaactgcctcagggtacaactctgccaaaaggcttctatgcagaagggtcgcgtggtggcagccaggcgagtagccgtagcagctcccgctctcgcaactcgtcccgtaactccactccgggctcttctcgcggcacgtccccggctcgtatggcaggtaacggtggtgacgctgctctggcgctgctactgctggacaggctgaaccagctggagtcgaagatgagtggtaaaggccaacagcagcagggccagaccgttaccaaaaagagcgcagctgaagcatctaaaaaaccgcgacagaaacgtaccgcgactaaagcgtacaatgtaacacaggccttcggtcgtcgaggtccggagcaaactcaaggaaactttggcgatcaggaattaatccgccaggggaccgactacaaacactggccgcaaattgcccagttcgccccatccgctagtgcattcttcggtatgagccgcatcggcatggaagtaacgccaagtggtacgtggctgacctacaccggtgctatcaagcttgatgacaaggacccgaactttaaagaccaggttattctgcttaacaaacatattgatgcctataaaactttcccgccgaccgaacccaaaaaggacaaaaagaaaaaagctgatgaaacccaggctctaccgcagcgtcagaaaaaacagcaaactgtgactctgctgccagctgcggacctggatgatttttccaagcagctgcaacagtctatgagctctgcggactctacgcaggcttaa

SEQ ID NO: 419 - DNA, 2016 bp, Artificial Sequence
  Description of Artificial Sequence: Synthetic polynucleotide
atgcaccatcatcaccatcatggtggttctggttcgccgatacttggttattggaagattaaaggactggttcagcccacacgcctcctgctagaatacttagaggaaaaatatgaagagcacctgtacgaacgtgatgagggggacaaatggcgaaacaagaaatttgaattgggcttagaatttccaaatttgccgtattatatcgatggcgacgtaaaactgacccaatcaatggccattattcgctacatcgcagataaacataacatgctgggtggctgccctaaagaacgggctgagatctccatgctggaaggtgcggtgctcgacattcgctacggcgtcagtagaattgcgtatagcaaggatttcgaaactttaaaagtggatttcctgagcaaacttccggagatgctgaaaatgtttgaggataggctttgtcataagacgtatctcaatggtgatcatgttacccacccggactttatgctgtacgacgcccttgatgtcgttctgtatatggatcccatgtgcctggacgccttcccgaaattagtgtgttttaaaaaacgtatcgaagcgattccacagatcgataaatacttgaagtcttctaaatatattgcttggcctctgcaaggctggcaggcaacgttcggtgggggagatcatccgccaaaatcagatctggtgccgcgtgggagccctggcatacaccgcgacggtggttctggtgagaacctgtactttcaaagctcagataatgggcctcaaaaccagcgcaacgctccacgtataaccttcggtggcccgtctgactccacaggcagcaaccagaatggtgagcgtagtggagccaggtctaagcagcgccgtccccagggtctgccgaacaacacggcgagctggtttactgcgcttacccaacacggtaaagaagacttaaaattcccgcgtggccagggcgtcccgatcaacactaactcttccccggatgatcagattggttattaccgcagagcaactcgtcggattcgcggcggcgacggtaaaatgaaagatttgtctccgcgttggtacttttactatctcggcaccggtccggaagctggactgccctacggggcaaacaaggacgggatcatttgggtggctaccgaaggtgccctgaatactccaaaagatcatatcggcacccgtaaccctgctaataacgctgcgatcgttctgcaactgcctcagggtacaactctgccaaaaggcttctatgcagaagggtcgcgtggtggcagccaggcgagtagccgtagcagctcccgctctcgcaactcgtcccgtaactccactccgggctcttctcgcggcacgtccccggctcgtatggcaggtaacggtggtgacgctgctctggcgctgctactgctggacaggctgaaccagctggagtcgaagatgagtggtaaaggccaacagcagcagggccagaccgttaccaaaaagagcgcagctgaagcatctaaaaaaccgcgacagaaacgtaccgcgactaaagcgtacaatgtaacacaggccttcggtgcccgaggtccggagcaaactcaaggaaactttggcgatcaggaattaatccgccaggggaccgactacaaacactggccgcaaattgcccagttcgccccatccgctagtgcattcttcggtatgagccgcatcggcatggaagtaacgccaagtggtacgtggctgacctacaccggtgctatcaagcttgatgacaaggacccgaactttaaagaccaggttattctgcttaacaaacatattgatgcctataaaactttcccgccgaccgaacccaaaaaggacaaaaagaaaaaagctgatgaaacccaggctctaccgcagcgtcagaaaaaacagcaaactgtgactctgctgccagctgcggacctggatgatttttccaagcagctgcaacagtctatgagctctgcggactctacgcaggcttaa

SEQ ID NO: 420 - DNA, 2016 bp, Artificial Sequence
  Description of Artificial Sequence: Synthetic polynucleotide
atgcaccatcatcaccatcatggtggttctggttcgccgatacttggttattggaagattaaaggactggttcagcccacacgcctcctgctagaatacttagaggaaaaatatgaagagcacctgtacgaacgtgatgagggggacaaatggcgaaacaagaaatttgaattgggcttagaatttccaaatttgccgtattatatcgatggcgacgtaaaactgacccaatcaatggccattattcgctacatcgcagataaacataacatgctgggtggctgccctaaagaacgggctgagatctccatgctggaaggtgcggtgctcgacattcgctacggcgtcagtagaattgcgtatagcaaggatttcgaaactttaaaagtggatttcctgagcaaacttccggagatgctgaaaatgtttgaggataggctttgtcataagacgtatctcaatggtgatcatgttacccacccggactttatgctgtacgacgcccttgatgtcgttctgtatatggatcccatgtgcctggacgccttcccgaaattagtgtgttttaaaaaacgtatcgaagcgattccacagatcgataaatacttgaagtcttctaaatatattgcttggcctctgcaaggctggcaggcaacgttcggtgggggagatcatccgccaaaatcagatctggtgccgcgtgggagccctggcatacaccgcgacggtggttctggtgagaacctgtactttcaaagctcagataatgggcctcaaaaccagcgcaacgctccacgtataaccttcggtggcccgtctgactccacaggcagcaaccagaatggtgagcgtagtggagccaggtctaagcagcgccgtccccagggtctgccgaacaacacggcgagctggtttactgcgcttacccaacacggtaaagaagacttaaaattcccgcgtggccagggcgtcccgatcaacactaactcttccccggatgatcagattggttattaccgcagaagcactcgtcggattcgcggcggcgacggtaaaatgaaagatttgtctccgcgttggtacttttactatctcggcaccggtccggaagctggactgccctacggggcaaacaaggacgggatcatttgggtggctaccgaaggtgccctgaatactccaaaagatcatatcggcacccgtaaccctgctaataacgctgcgatcgttctgcaactgcctcagggtacaactctgccaaaaggcttctatgcagaagggtcgcgtggtggcagccaggcgagtagccgtagcagctcccgctctcgcaactcgtcccgtaactccactccgggctcttctcgcggcacgtccccggctcgtatggcaggtaacggtggtgacgctgctctggcgctgctactgctggacaggctgaaccagctggagtcgaagatgagtggtaaaggccaacagcagcagggccagaccgttaccaaaaagagcgcagctgaagcatctaaaaaaccgcgacagaaacgtaccgcgactaaagcgtacaatgtaacacaggccttcggtcgtcgaggtccggagcaaactcaaggaaactttggcgatcaggaattaatccgccaggggaccgactacaaacactggccgcaaattgcccagttcgccccatccgctagtgcattcttcggtatgagccgcatcggcatggaagtaacgccaagtggtacgtggctgacctacaccggtgctatcaagcttgatgacaaggacccgaactttaaagaccaggttattctgcttaacaaacatattgatgcctataaaactttcccgccgaccgaacccaaaaaggacaaaaagaaaaaagctgatgaaacccaggctctaccgcagcgtcagaaaaaacagcaaactgtgactctgctgccagctgcggacctggatgatttttccaagcagctgcaacagtctatgagctctgcggactctacgcaggcttaa

SEQ ID NO: 421 - DNA, 2016 bp, Artificial Sequence
  Description of Artificial Sequence: Synthetic polynucleotide
atgcaccatcatcaccatcatggtggttctggttcgccgatacttggttattggaagattaaaggactggttcagcccacacgcctcctgctagaatacttagaggaaaaatatgaagagcacctgtacgaacgtgatgagggggacaaatggcgaaacaagaaatttgaattgggcttagaatttccaaatttgccgtattatatcgatggcgacgtaaaactgacccaatcaatggccattattcgctacatcgcagataaacataacatgctgggtggctgccctaaagaacgggctgagatctccatgctggaaggtgcggtgctcgacattcgctacggcgtcagtagaattgcgtatagcaaggatttcgaaactttaaaagtggatttcctgagcaaacttccggagatgctgaaaatgtttgaggataggctttgtcataagacgtatctcaatggtgatcatgttacccacccggactttatgctgtacgacgcccttgatgtcgttctgtatatggatcccatgtgcctggacgccttcccgaaattagtgtgttttaaaaaacgtatcgaagcgattccacagatcgataaatacttgaagtcttctaaatatattgcttggcctctgcaaggctggcaggcaacgttcggtgggggagatcatccgccaaaatcagatctggtgccgcgtgggagccctggcatacaccgcgacggtggttctggtgagaacctgtactttcaaagctcagataatgggcctcaaaaccagcgcaacgctccacgtataaccttcggtggcccgtctgactccacaggcagcaaccagaatggtgagcgtagtggagccaggtctaagcagcgccgtccccagggtctgccgaacaacacggcgagctggtttactgcgcttacccaacacggtaaagaagacttaaaattcccgcctggccagggcgtcccgatcaacccgaactctaaaccggatgatcagattggttattaccgcagacaagtgcgtcggtatcgcggcggcgacggtcagatgaaagatttgccaccgcgttggtacttttactatctcggcaccggtccggaagctggactgccctacggggcaaacaaggacgggatcatttgggtggctaccgaaggtgccctgaatactccaaaagatcatatcggcacccgtaaccctgctaataacgctgcgatcgttctgcaactgcctcagggtacaactctgccaaaaggcttctatgcagaagggtcgcgtggtggcagccaggcgagtagccgtagcagctcccgctctcgcaactcgtcccgtaactccactccgggctcttctcgcggcacgtccccggctcgtatggcaggtaacggtggtgacgctgctctggcgctgctactgctggacaggctgaaccagctggagtcgaagatgagtggtaaaggccaacagcagcagggccagaccgttaccaaaaagagcgcagctgaagcatctaaaaaaccgcgacagaaacgtaccgcgactaaagcgtacaatgtaacacaggccttcggtcgtcgaggtccggagcaaactcaaggaaactttggcgatcaggaattaatccgccaggggaccgactacaaacactggccgcaaattgcccagttcgccccatccgctagtgcattcttcggtatgagccgcatcggcatggaagtaacgccaagtggtacgtggctgacctacaccggtgctatcaagcttgatgacaaggacccgaactttaaagaccaggttattctgcttaacaaacatattgatgcctataaaactttcccgccgaccgaacccaaaaaggacaaaaagaaaaaagctgatgaaacccaggctctaccgcagcgtcagaaaaaacagcaaactgtgactctgctgccagctgcggacctggatgatttttccaagcagctgcaacagtctatgagctctgcggactctacgcaggcttaa

SEQ ID NO: 422 - DNA, 2016 bp, Artificial Sequence
  Description of Artificial Sequence: Synthetic polynucleotide
atgcaccatcatcaccatcatggtggttctggttcgccgatacttggttattggaagattaaaggactggttcagcccacacgcctcctgctagaatacttagaggaaaaatatgaagagcacctgtacgaacgtgatgagggggacaaatggcgaaacaagaaatttgaattgggcttagaatttccaaatttgccgtattatatcgatggcgacgtaaaactgacccaatcaatggccattattcgctacatcgcagataaacataacatgctgggtggctgccctaaagaacgggctgagatctccatgctggaaggtgcggtgctcgacattcgctacggcgtcagtagaattgcgtatagcaaggatttcgaaactttaaaagtggatttcctgagcaaacttccggagatgctgaaaatgtttgaggataggctttgtcataagacgtatctcaatggtgatcatgttacccacccggactttatgctgtacgacgcccttgatgtcgttctgtatatggatcccatgtgcctggacgccttcccgaaattagtgtgttttaaaaaacgtatcgaagcgattccacagatcgataaatacttgaagtcttctaaatatattgcttggcctctgcaaggctggcaggcaacgttcggtgggggagatcatccgccaaaatcagatctggtgccgcgtgggagccctggcatacaccgcgacggtggttctggtgagaacctgtactttcaaagctcagataatgggcctcaaaaccagcgcaacgctccacgtataaccttcggtggcccgtctgactccacaggcagcaaccagaatggtgagcgtagtggagccaggtctaagcagcgccgtccccagggtctgccgaacaacacggcgagctggtttactgcgcttacccaacacggtaaagaagacttaaaattcccgcgtggccagggcgtcccgatcaacactaactcttccccggatgatcagattggttattaccgcagacatactcgtcggattcgcggcggcgacggtaaaatgaaagatttgtctccgcgttggtacttttactatctcggcaccggtccggaagctggactgccctacggggcaaacaaggacgggatcatttgggtggctaccgaaggtgccctgaatactccaaaagatcatatcggcacccgtaaccctgctaataacgctgcgatcgttctgcaactgcctcagggtacaactctgccaaaaggcttctatgcagaagggtcgcgtggtggcagccaggcgagtagccgtagcagctcccgctctcgcaactcgtcccgtaactccactccgggctcttctcgcggcacgtccccggctcgtatggcaggtaacggtggtgacgctgctctggcgctgctactgctggacaggctgaaccagctggagtcgaagatgagtggtaaaggccaacagcagcagggccagaccgttaccaaaaagagcgcagctgaagcatctaaaaaaccgcgacagaaacgtaccgcgactaaagcgtacaatgtaacacaggccttcggtcgtcgaggtccggagcaaactcaaggaaactttggcgatcaggaattaatccgccaggggaccgactacaaacactggccgcaaattgcccagttcgccccatccgctagtgcattcttcggtatgagccgcatcggcatggaagtaacgccaagtggtacgtggctgacctacaccggtgctatcaagcttgatgacaaggacccgaactttaaagaccaggttattctgcttaacaaacatattgatgcctataaaactttcccgccgaccgaacccaaaaaggacaaaaagaaaaaagctgatgaaacccaggctctaccgcagcgtcagaaaaaacagcaaactgtgactctgctgccagctgcggacctggatgatttttccaagcagctgcaacagtctatgagctctgcggactctacgcaggcttaa

SEQ ID NO: 423 - DNA, 2016 bp, Artificial Sequence
  Description of Artificial Sequence: Synthetic polynucleotide
atgcaccatcatcaccatcatggtggttctggttcgccgatacttggttattggaagattaaaggactggttcagcccacacgcctcctgctagaatacttagaggaaaaatatgaagagcacctgtacgaacgtgatgagggggacaaatggcgaaacaagaaatttgaattgggcttagaatttccaaatttgccgtattatatcgatggcgacgtaaaactgacccaatcaatggccattattcgctacatcgcagataaacataacatgctgggtggctgccctaaagaacgggctgagatctccatgctggaaggtgcggtgctcgacattcgctacggcgtcagtagaattgcgtatagcaaggatttcgaaactttaaaagtggatttcctgagcaaacttccggagatgctgaaaatgtttgaggataggctttgtcataagacgtatctcaatggtgatcatgttacccacccggactttatgctgtacgacgcccttgatgtcgttctgtatatggatcccatgtgcctggacgccttcccgaaattagtgtgttttaaaaaacgtatcgaagcgattccacagatcgataaatacttgaagtcttctaaatatattgcttggcctctgcaaggctggcaggcaacgttcggtgggggagatcatccgccaaaatcagatctggtgccgcgtgggagccctggcatacaccgcgacggtggttctggtgagaacctgtactttcaaagctcagataatgggcctcaaaaccagcgcaacgctccacgtataaccttcggtggcccgtctgactccacaggcagcaaccagaatggtgagcgtagtggagccaggtctaagcagcgccgtccccagggtctgccgaacaacacggcgagctggtttactgcgcttacccaacacggtaaagaagacttaaaattcccgcgtggccagggcgtcccgatcaacactaactcttccccggatgatcagattggttattaccgcagagcaactcgtcggattcgcggcggcgacggtaaaatgaaagatttgtctccgcgttggtacttttactatctcggcaccggtccggaagctggactgccctacggggcaaacaaggacgggatcatttgggtggctaccgaaggtgccctgaatactccaaaagatcatatcggcacccgtaaccctgctaataacgctgcgatcgttctgcaactgcctcagggtacaactctgccaaaaggcttctatgcagaagggtcgcgtggtggcagccaggcgagtagccgtagcagctcccgctctcgcaactcgtcccgtaactccactccgggctcttctcgcggcacgtccccggctcgtatggcaggtaacggtggtgacgctgctctggcgctgctactgctggacaggctgaaccagctggagtcgaagatgagtggtaaaggccaacagcagcagggccagaccgttaccaaaaagagcgcagctgaagcatctaaaaaaccgcgacagaaacgtaccgcgactaaagtatacaatgtaacacaggccttcggtcgtcgaggtccggagcaaactcaaggaaactttggcgatcaggaattaatccgccaggggaccgactacaaacactggccgcaaattgcccagttcgccccatccgctagtgcattcttcggtatgagccgcatcggcatggaagtaacgccaagtggtacgtggctgacctacaccggtgctatcaagcttgatgacaaggacccgaactttaaagaccaggttattctgcttaacaaacatattgatgcctataaaactttcccgccgaccgaacccaaaaaggacaaaaagaaaaaagctgatgaaacccaggctctaccgcagcgtcagaaaaaacagcaaactgtgactctgctgccagctgcggacctggatgatttttccaagcagctgcaacagtctatgagctctgcggactctacgcaggcttaa

SEQ ID NO: 424 - DNA, 2016 bp, Artificial Sequence
  Description of Artificial Sequence: Synthetic polynucleotide
atgcaccatcatcaccatcatggtggttctggttcgccgatacttggttattggaagattaaaggactggttcagcccacacgcctcctgctagaatacttagaggaaaaatatgaagagcacctgtacgaacgtgatgagggggacaaatggcgaaacaagaaatttgaattgggcttagaatttccaaatttgccgtattatatcgatggcgacgtaaaactgacccaatcaatggccattattcgctacatcgcagataaacataacatgctgggtggctgccctaaagaacgggctgagatctccatgctggaaggtgcggtgctcgacattcgctacggcgtcagtagaattgcgtatagcaaggatttcgaaactttaaaagtggatttcctgagcaaacttccggagatgctgaaaatgtttgaggataggctttgtcataagacgtatctcaatggtgatcatgttacccacccggactttatgctgtacgacgcccttgatgtcgttctgtatatggatcccatgtgcctggacgccttcccgaaattagtgtgttttaaaaaacgtatcgaagcgattccacagatcgataaatacttgaagtcttctaaatatattgcttggcctctgcaaggctggcaggcaacgttcggtgggggagatcatccgccaaaatcagatctggtgccgcgtgggagccctggcatacaccgcgacggtggttctggtgagaacctgtactttcaaagctcagataatgggcctcaaaaccagcgcaacgctccacgtataaccttcggtggcccgtctgactccacaggcagcaaccagaatggtgagcgtagtggagccaggtctaagcagcgccgtccccagggtctgccgaacaacacggcgagctggtttactgcgcttacccaacacggtaaagaagacttatcgttcccgcgtggccagggcgtcccgatcaacactaactcttccccggatgatcagattggttattaccgcagagcaactcgtcggattcgcggcggcgacggtaaaatgaaagatttgtctccgcgttggtacttttactatctcggcaccggtccggaagctggactgccctacggggcaaacaaggacgggatcatttgggtggctaccgaaggtgccctgaatactccaaaagatcatatcggcacccgtaaccctgctaataacgctgcgatcgttctgcaactgcctcagggtacaactctgccaaaaggcttctatgcagaagggtcgcgtggtggcagccaggcgagtagccgtagcagctcccgctctcgcaactcgtcccgtaactccactccgggctcttctcgcggcacgtccccggctcgtatggcaggtaacggtggtgacgctgctctggcgctgctactgctggacaggctgaaccagctggagtcgaagatgagtggtaaaggccaacagcagcagggccagaccgttaccaaaaagagcgcagctgaagcatctaaaaaaccgcgacagaaacgtaccgcgactaaagcgtacaatgtaacacaggccttcggtcgtcgaggtccggagcaaactcaaggaaactttggcgatcaggaattaatccgccaggggaccgactacaaacactggccgcaaattgcccagttcgccccatccgctagtgcattcttcggtatgagccgcatcggcatggaagtaacgccaagtggtacgtggctgacctacaccggtgctatcaagcttgatgacaaggacccgaactttaaagaccaggttattctgcttaacaaacatattgatgcctataaaactttcccgccgaccgaacccaaaaaggacaaaaagaaaaaagctgatgaaacccaggctctaccgcagcgtcagaaaaaacagcaaactgtgactctgctgccagctgcggacctggatgatttttccaagcagctgcaacagtctatgagctctgcggactctacgcaggcttaa

SEQ ID NO: 425 - DNA, 2016 bp, Artificial Sequence
  Description of Artificial Sequence: Synthetic polynucleotide
atgcaccatcatcaccatcatggtggttctggttcgccgatacttggttattggaagattaaaggactggttcagcccacacgcctcctgctagaatacttagaggaaaaatatgaagagcacctgtacgaacgtgatgagggggacaaatggcgaaacaagaaatttgaattgggcttagaatttccaaatttgccgtattatatcgatggcgacgtaaaactgacccaatcaatggccattattcgctacatcgcagataaacataacatgctgggtggctgccctaaagaacgggctgagatctccatgctggaaggtgcggtgctcgacattcgctacggcgtcagtagaattgcgtatagcaaggatttcgaaactttaaaagtggatttcctgagcaaacttccggagatgctgaaaatgtttgaggataggctttgtcataagacgtatctcaatggtgatcatgttacccacccggactttatgctgtacgacgcccttgatgtcgttctgtatatggatcccatgtgcctggacgccttcccgaaattagtgtgttttaaaaaacgtatcgaagcgattccacagatcgataaatacttgaagtcttctaaatatattgcttggcctctgcaaggctggcaggcaacgttcggtgggggagatcatccgccaaaatcagatctggtgccgcgtgggagccctggcatacaccgcgacggtggttctggtgagaacctgtactttcaaagctcagataatgggcctcaaaaccagcgcaacgctccacgtataaccttcggtggcccgtctgactccacaggcagcaaccagaatggtgagcgtagtggagccaggtctaagcagcgccgtccccagggtctgccgaacaacacggcgagctggtttactgcgcttacccaacacggtaaagaagacttaaaattcccgcgtggccagggcgtcccgatcaacactaactcttccccggatgatcagattggttattaccgcagagcaactcgtcggattcgcggcggcgacggtaaaatgaaagatttgtctccgcgttggtacttttactatctcggcaccggtccggaagctggactgccctacggggcaaacaaggacgggatcatttgggtggctaccgaaggtgccctgaatactccaaaagatcatatcggcgttcgtaaccctgctaataacgctgcgatcgttctgcaactgcctcagggtacaactctgccaaaaggcttctatgcagaagggtcgcgtggtggcagccaggcgagtagccgtagcagctcccgctctcgcaactcgtcccgtaactccactccgggctcttctcgcggcacgtccccggctcgtatggcaggtaacggtggtgacgctgctctggcgctgctactgctggacaggctgaaccagctggagtcgaagatgagtggtaaaggccaacagcagcagggccagaccgttaccaaaaagagcgcagctgaagcatctaaaaaaccgcgacagaaacgtaccgcgactaaagcgtacaatgtaacacaggccttcggtcgtcgaggtccggagcaaactcaaggaaactttggcgatcaggaattaatccgccaggggaccgactacaaacactggccgcaaattgcccagttcgccccatccgctagtgcattcttcggtatgagccgcatcggcatggaagtaacgccaagtggtacgtggctgacctacaccggtgctatcaagcttgatgacaaggacccgaactttaaagaccaggttattctgcttaacaaacatattgatgcctataaaactttcccgccgaccgaacccaaaaaggacaaaaagaaaaaagctgatgaaacccaggctctaccgcagcgtcagaaaaaacagcaaactgtgactctgctgccagctgcggacctggatgatttttccaagcagctgcaacagtctatgagctctgcggactctacgcaggcttaa

SEQ ID NO: 426 - DNA, 2016 bp, Artificial Sequence
  Description of Artificial Sequence: Synthetic polynucleotide
atgcaccatcatcaccatcatggtggttctggttcgccgatacttggttattggaagattaaaggactggttcagcccacacgcctcctgctagaatacttagaggaaaaatatgaagagcacctgtacgaacgtgatgagggggacaaatggcgaaacaagaaatttgaattgggcttagaatttccaaatttgccgtattatatcgatggcgacgtaaaactgacccaatcaatggccattattcgctacatcgcagataaacataacatgctgggtggctgccctaaagaacgggctgagatctccatgctggaaggtgcggtgctcgacattcgctacggcgtcagtagaattgcgtatagcaaggatttcgaaactttaaaagtggatttcctgagcaaacttccggagatgctgaaaatgtttgaggataggctttgtcataagacgtatctcaatggtgatcatgttacccacccggactttatgctgtacgacgcccttgatgtcgttctgtatatggatcccatgtgcctggacgccttcccgaaattagtgtgttttaaaaaacgtatcgaagcgattccacagatcgataaatacttgaagtcttctaaatatattgcttggcctctgcaaggctggcaggcaacgttcggtgggggagatcatccgccaaaatcagatctggtgccgcgtgggagccctggcatacaccgcgacggtggttctggtgagaacctgtactttcaaagctcagataatgggcctcaaaaccagcgcaacgctccacgtataaccttcggtggcccgtctgactccacaggcagcaaccagaatggtgagcgtagtggagccaggtctaagcagcgccgtccccagggtctgccgaacaacacggcgagctggtttactgcgcttacccaacacggtaaagaagacttaaaattcccgcgtggccagggcgtcccgatcaacactaactcttccccggatgatcagattggttattaccgcagagcaactcgtcggattcgcggcggcgacggtaaaatgaaagatttgtctccgcgttggtacttttactatctcggcaccggtccggaagctggactgccctacggggcaaacaaggacgggatcatttgggtggctaccgaaggtgccctgaatactccaaaagatcatatcggcacccgtaaccctgctaataacgctgcgatcgttctgcaactgcctcagggtacagtactgccaaaaggcttctatgcagaagggtcgcgtggtggcagccaggcgagtagccgtagcagctcccgctctcgcaactcgtcccgtaactccactccgggctcttctcgcggcacgtccccggctcgtatggcaggtaacggtggtgacgctgctctggcgctgctactgctggacaggctgaaccagctggagtcgaagatgagtggtaaaggccaacagcagcagggccagaccgttaccaaaaagagcgcagctgaagcatctaaaaaaccgcgacagaaacgtaccgcgactaaagcgtacaatgtaacacaggccttcggtcgtcgaggtccggagcaaactcaaggaaactttggcgatcaggaattaatccgccaggggaccgactacaaacactggccgcaaattgcccagttcgccccatccgctagtgcattcttcggtatgagccgcatcggcatggaagtaacgccaagtggtacgtggctgacctacaccggtgctatcaagcttgatgacaaggacccgaactttaaagaccaggttattctgcttaacaaacatattgatgcctataaaactttcccgccgaccgaacccaaaaaggacaaaaagaaaaaagctgatgaaacccaggctctaccgcagcgtcagaaaaaacagcaaactgtgactctgctgccagctgcggacctggatgatttttccaagcagctgcaacagtctatgagctctgcggactctacgcaggcttaa

SEQ ID NO: 427 - DNA, 2016 bp, Artificial Sequence
  Description of Artificial Sequence: Synthetic polynucleotide
atgcaccatcatcaccatcatggtggttctggttcgccgatacttggttattggaagattaaaggactggttcagcccacacgcctcctgctagaatacttagaggaaaaatatgaagagcacctgtacgaacgtgatgagggggacaaatggcgaaacaagaaatttgaattgggcttagaatttccaaatttgccgtattatatcgatggcgacgtaaaactgacccaatcaatggccattattcgctacatcgcagataaacataacatgctgggtggctgccctaaagaacgggctgagatctccatgctggaaggtgcggtgctcgacattcgctacggcgtcagtagaattgcgtatagcaaggatttcgaaactttaaaagtggatttcctgagcaaacttccggagatgctgaaaatgtttgaggataggctttgtcataagacgtatctcaatggtgatcatgttacccacccggactttatgctgtacgacgcccttgatgtcgttctgtatatggatcccatgtgcctggacgccttcccgaaattagtgtgttttaaaaaacgtatcgaagcgattccacagatcgataaatacttgaagtcttctaaatatattgcttggcctctgcaaggctggcaggcaacgttcggtgggggagatcatccgccaaaatcagatctggtgccgcgtgggagccctggcatacaccgcgacggtggttctggtgagaacctgtactttcaaagctcagataatgggcctcaaaaccagcgcaacgctccacgtataaccttcggtggcccgtctgactccacaggcagcaaccagaatggtgagcgtagtggagccaggtctaagcagcgccgtccccagggtctgccgaacaacacggcgagctggtttactgcgcttacccaacacggtaaagaagacttaaaattcccgcgtggccagggcgtcccgatcaacactaactcttccccggatgatcagattggttattaccgcagagcaactcgtcggattcgcggcggcgacggtaaaatgaaagatttgtctccgcgttggtacttttactatctcggcaccggtccggaagctggactgccctacggggcaaacaaggacgggatcatttgggtggctaccgaaggtgccctgaatactccaaaagatcatatcggcacccgtaaccctgctaataacgctgcgatcgttctgcaactgcctcagggtacaactctgccaaaaggcttctatgcagaagggtcgcgtggtggcagccaggcgagtagccgtagcagctcccgctctcgcaactcgtcccgtaactccactccgggctcttctcgcggcacgtccccggctcgtatggcaggtaacggtggtgacgctgctctggcgctgctactgctggacaggctgaaccagctggagtcgaagatgagtggtaaaggccaacagcagcagggccagaccgttaccaaaaagagcgcagctgaagcatctaaaaaaccgcgacagaaacgtaccgcgactaaagcgtacaatgtaacacaggccttcggtcgtcgaggtccggagcaaactcaaggaaactttggcgatcaggaattaatccgccaggggaccgactacaaacactggccgcaaattgcccagttcgccccatccgctgcggcattcttcggtatgagccgcatcggcatggaagtaacgccaagtggtacgtggctgacctacaccggtgctatcaagcttgatgacaaggacccgaactttaaagaccaggttattctgcttaacaaacatattgatgcctataaaactttcccgccgaccgaacccaaaaaggacaaaaagaaaaaagctgatgaaacccaggctctaccgcagcgtcagaaaaaacagcaaactgtgactctgctgccagctgcggacctggatgatttttccaagcagctgcaacagtctatgagctctgcggactctacgcaggcttaa

SEQ ID NO: 428 - DNA, 2016 bp, Artificial Sequence
  Description of Artificial Sequence: Synthetic polynucleotide
atgcaccatcatcaccatcatggtggttctggttcgccgatacttggttattggaagattaaaggactggttcagcccacacgcctcctgctagaatacttagaggaaaaatatgaagagcacctgtacgaacgtgatgagggggacaaatggcgaaacaagaaatttgaattgggcttagaatttccaaatttgccgtattatatcgatggcgacgtaaaactgacccaatcaatggccattattcgctacatcgcagataaacataacatgctgggtggctgccctaaagaacgggctgagatctccatgctggaaggtgcggtgctcgacattcgctacggcgtcagtagaattgcgtatagcaaggatttcgaaactttaaaagtggatttcctgagcaaacttccggagatgctgaaaatgtttgaggataggctttgtcataagacgtatctcaatggtgatcatgttacccacccggactttatgctgtacgacgcccttgatgtcgttctgtatatggatcccatgtgcctggacgccttcccgaaattagtgtgttttaaaaaacgtatcgaagcgattccacagatcgataaatacttgaagtcttctaaatatattgcttggcctctgcaaggctggcaggcaacgttcggtgggggagatcatccgccaaaatcagatctggtgccgcgtgggagccctggcatacaccgcgacggtggttctggtgagaacctgtactttcaaagctcagataatgggcctcaaaaccagcgcaacgctccacgtataaccttcggtggcccgtctgactccacaggcagcaaccagaatggtgagcgtagtggagccaggtctaagcagcgccgtccccagggtctgccgaacaacacggcgagctggtttactgcgcttacccaacacggtaaagaagacttaaaattcccgcgtggccagggcgtcccgatcaacactaactcttccccggatgatcagattggttattaccgcagagcaactcgtcggattcgcggcggcgacggtaaaatgaaagatttgtctccgcgttggtacttttactatatcggcaccggtccggaagctggactgccctacggggcaaacaaggacgggatcatttgggtggctaccgaaggtgccctgaatactccaaaagatcatatcggcacccgtaaccctgctaataacgctgcgatcgttctgcaactgcctcagggtacaactctgccaaaaggcttctatgcagaagggtcgcgtggtggcagccaggcgagtagccgtagcagctcccgctctcgcaactcgtcccgtaactccactccgggctcttctcgcggcacgtccccggctcgtatggcaggtaacggtggtgacgctgctctggcgctgctactgctggacaggctgaaccagctggagtcgaagatgagtggtaaaggccaacagcagcagggccagaccgttaccaaaaagagcgcagctgaagcatctaaaaaaccgcgacagaaacgtaccgcgactaaagcgtacaatgtaacacaggccttcggtcgtcgaggtccggagcaaactcaaggaaactttggcgatcaggaattaatccgccaggggaccgactacaaacactggccgcaaattgcccagttcgccccatccgctagtgcattcttcggtatgagccgcatcggcatggaagtaacgccaagtggtacgtggctgacctacaccggtgctatcaagcttgatgacaaggacccgaactttaaagaccaggttattctgcttaacaaacatattgatgcctataaaactttcccgccgaccgaacccaaaaaggacaaaaagaaaaaagctgatgaaacccaggctctaccgcagcgtcagaaaaaacagcaaactgtgactctgctgccagctgcggacctggatgatttttccaagcagctgcaacagtctatgagctctgcggactctacgcaggcttaa

SEQ ID NO: 429 - DNA, 2016 bp, Artificial Sequence
  Description of Artificial Sequence: Synthetic polynucleotide
atgcaccatcatcaccatcatggtggttctggttcgccgatacttggttattggaagattaaaggactggttcagcccacacgcctcctgctagaatacttagaggaaaaatatgaagagcacctgtacgaacgtgatgagggggacaaatggcgaaacaagaaatttgaattgggcttagaatttccaaatttgccgtattatatcgatggcgacgtaaaactgacccaatcaatggccattattcgctacatcgcagataaacataacatgctgggtggctgccctaaagaacgggctgagatctccatgctggaaggtgcggtgctcgacattcgctacggcgtcagtagaattgcgtatagcaaggatttcgaaactttaaaagtggatttcctgagcaaacttccggagatgctgaaaatgtttgaggataggctttgtcataagacgtatctcaatggtgatcatgttacccacccggactttatgctgtacgacgcccttgatgtcgttctgtatatggatcccatgtgcctggacgccttcccgaaattagtgtgttttaaaaaacgtatcgaagcgattccacagatcgataaatacttgaagtcttctaaatatattgcttggcctctgcaaggctggcaggcaacgttcggtgggggagatcatccgccaaaatcagatctggtgccgcgtgggagccctggcatacaccgcgacggtggttctggtgagaacctgtactttcaaagctcagataatgggcctcaaaaccagcgcaacgctccacgtataaccttcggtggcccgtctgactccacaggcagcaaccagaatggtgagcgtagtggagccaggtctaagcagcgccgtccccagggtctgccgaacaacacggcgagctggtttactgcgcttacccaacacggtaaagaagacttaaaattcccgcgtggccagggcgtcccgatcaacactaactcttccccggatgatcagattggttattaccgcagagcaactcgtcggattcgcggcggcgacggtaaaatgaaagatttgtctccgcgttggtacttttactatctcggcaccggtccggaagctggactgccctacggggcaaacaaggacgggatcatttgggtggctaccgaaggtgccctgaatactccaaaagatcatatcggcacccgtaaccctgctaataacgctgcgatcgttctgcaactgcctcagggtacaactctgccaaaaggcttctatgcagaagggtcgcgtggtggcagccaggcgagtagccgtagcagctcccgctctcgcaactcgtcccgtaactccactccgggctcttctcgcggcacgtccccggctcgtatggcaggtaacggtggtgacgctgctctggcgctgctactgctggacaggctgaaccagctggagtcgaagatgagtggtaaaggccaacagcagcagggccagaccgttaccaaaaagagcgcagctgaagcatctaaaaaaccgcgacagaaacgtaccgcgactaaattttacaatgtaacacaggccttcggtcgtcgaggtccggagcaaactcaaggaaactttggcgatcaggaattaatccgccaggggaccgactacaaacactggccgcaaattgcccagttcgccccatccgctagtgcattcttcggtatgagccgcatcggcatggaagtaacgccaagtggtacgtggctgacctacaccggtgctatcaagcttgatgacaaggacccgaactttaaagaccaggttattctgcttaacaaacatattgatgcctataaaactttcccgccgaccgaacccaaaaaggacaaaaagaaaaaagctgatgaaacccaggctctaccgcagcgtcagaaaaaacagcaaactgtgactctgctgccagctgcggacctggatgatttttccaagcagctgcaacagtctatgagctctgcggactctacgcaggcttaa

SEQ ID NO: 430 - DNA, 2016 bp, Artificial Sequence
  Description of Artificial Sequence: Synthetic polynucleotide
atgcaccatcatcaccatcatggtggttctggttcgccgatacttggttattggaagattaaaggactggttcagcccacacgcctcctgctagaatacttagaggaaaaatatgaagagcacctgtacgaacgtgatgagggggacaaatggcgaaacaagaaatttgaattgggcttagaatttccaaatttgccgtattatatcgatggcgacgtaaaactgacccaatcaatggccattattcgctacatcgcagataaacataacatgctgggtggctgccctaaagaacgggctgagatctccatgctggaaggtgcggtgctcgacattcgctacggcgtcagtagaattgcgtatagcaaggatttcgaaactttaaaagtggatttcctgagcaaacttccggagatgctgaaaatgtttgaggataggctttgtcataagacgtatctcaatggtgatcatgttacccacccggactttatgctgtacgacgcccttgatgtcgttctgtatatggatcccatgtgcctggacgccttcccgaaattagtgtgttttaaaaaacgtatcgaagcgattccacagatcgataaatacttgaagtcttctaaatatattgcttggcctctgcaaggctggcaggcaacgttcggtgggggagatcatccgccaaaatcagatctggtgccgcgtgggagccctggcatacaccgcgacggtggttctggtgagaacctgtactttcaaagctcagataatgggcctcaaaaccagcgcaacgctccacgtataaccttcggtggcccgtctgactccacaggcagcaaccagaatggtgagcgtagtggagccaggtctaagcagcgccgtccccagggtctgccgaacaacacggcgagctggtttactgcgattacccaacacggtaaagaagacttaaaattcccgcgtggccagggcgtcccgatcaacactaactcttccccggatgatcagattggttattaccgcagagcaactcgtcggattcgcggcggcgacggtaaaatgaaagatttgtctccgcgttggtacttttactatctcggcaccggtccggaagctggactgccctacggggcaaacaaggacgggatcatttgggtggctaccgaaggtgccctgaatactccaaaagatcatatcggcacccgtaaccctgctaataacgctgcgatcgttctgcaactgcctcagggtacaactctgccaaaaggcttctatgcagaagggtcgcgtggtggcagccaggcgagtagccgtagcagctcccgctctcgcaactcgtcccgtaactccactccgggctcttctcgcggcacgtccccggctcgtatggcaggtaacggtggtgacgctgctctggcgctgctactgctggacaggctgaaccagctggagtcgaagatgagtggtaaaggccaacagcagcagggccagaccgttaccaaaaagagcgcagctgaagcatctaaaaaaccgcgacagaaacgtaccgcgactaaagcgtacaatgtaacacaggccttcggtcgtcgaggtccggagcaaactcaaggaaactttggcgatcaggaattaatccgccaggggaccgactacaaacactggccgcaaattgcccagttcgccccatccgctagtgcattcttcggtatgagccgcatcggcatggaagtaacgccaagtggtacgtggctgacctacaccggtgctatcaagcttgatgacaaggacccgaactttaaagaccaggttattctgcttaacaaacatattgatgcctataaaactttcccgccgaccgaacccaaaaaggacaaaaagaaaaaagctgatgaaacccaggctctaccgcagcgtcagaaaaaacagcaaactgtgactctgctgccagctgcggacctggatgatttttccaagcagctgcaacagtctatgagctctgcggactctacgcaggcttaa

SEQ ID NO: 431 - DNA, 2016 bp, Artificial Sequence
  Description of Artificial Sequence: Synthetic polynucleotide
atgcaccatcatcaccatcatggtggttctggttcgccgatacttggttattggaagattaaaggactggttcagcccacacgcctcctgctagaatacttagaggaaaaatatgaagagcacctgtacgaacgtgatgagggggacaaatggcgaaacaagaaatttgaattgggcttagaatttccaaatttgccgtattatatcgatggcgacgtaaaactgacccaatcaatggccattattcgctacatcgcagataaacataacatgctgggtggctgccctaaagaacgggctgagatctccatgctggaaggtgcggtgctcgacattcgctacggcgtcagtagaattgcgtatagcaaggatttcgaaactttaaaagtggatttcctgagcaaacttccggagatgctgaaaatgtttgaggataggctttgtcataagacgtatctcaatggtgatcatgttacccacccggactttatgctgtacgacgcccttgatgtcgttctgtatatggatcccatgtgcctggacgccttcccgaaattagtgtgttttaaaaaacgtatcgaagcgattccacagatcgataaatacttgaagtcttctaaatatattgcttggcctctgcaaggctggcaggcaacgttcggtgggggagatcatccgccaaaatcagatctggtgccgcgtgggagccctggcatacaccgcgacggtggttctggtgagaacctgtactttcaaagctcagataatgggcctcaaaaccagcgcaacgctccacgtataaccttcggtggcccgtctgactccacaggcagcaaccagaatggtgagcgtagtggagccaggtctaagcagcgccgtccccagggtctgccgaacaacacggcgagctggtttactgcgcttacccaacacggtaaagaagacttaaaattcccgcgtggccagggcgtcccgatcaacactaactcttccccggatgatcagattggttattaccgcagagcaactcgtcggattcgcggcggcgacggtaaaatgaaagatttgtctccgcgttggtacttttactatctcggcaccggtccggaagctggactgccctacggggcaaacaaggacgggatcatttgggtggctaccgaaggtgccctgaatactccaaaagatcatatcggcacccgtaaccctgctaataacgctgcgatcgttctgcaactgcctcagggtacaactctgccaaaaggcttctatgcagaagggtcgcgtggtggcagccaggcgagtagccgtagcagctcccgctctcgcaactcgtcccgtaactccactccgggctcttctcgcggcacgtccccggctcgtatggcaggtaacggtggtgacgctgctctggcgctgctactgctggacaggctgaaccagctggagtcgaagatgagtggtaaaggccaacagcagcagggccagaccgttaccaaaaagagcgcagctgaagcatctaaaaaaccgcgacagaaacgtaccgcgactaaagcgtacaatgtaacacaggccttcggtcgtcgaggtccggagcaacttcaaggaaactttggcgatcaggaattaatccgccaggggaccgactacaaacactggccgcaaattgcccagttcgccccatccgctagtgcattcttcggtatgagccgcatcggcatggaagtaacgccaagtggtacgtggctgacctacaccggtgctatcaagcttgatgacaaggacccgaactttaaagaccaggttattctgcttaacaaacatattgatgcctataaaactttcccgccgaccgaacccaaaaaggacaaaaagaaaaaagctgatgaaacccaggctctaccgcagcgtcagaaaaaacagcaaactgtgactctgctgccagctgcggacctggatgatttttccaagcagctgcaacagtctatgagctctgcggactctacgcaggcttaa

SEQ ID NO: 432 - DNA, 2016 bp, Artificial Sequence
  Description of Artificial Sequence: Synthetic polynucleotide
atgcaccatcatcaccatcatggtggttctggttcgccgatacttggttattggaagattaaaggactggttcagcccacacgcctcctgctagaatacttagaggaaaaatatgaagagcacctgtacgaacgtgatgagggggacaaatggcgaaacaagaaatttgaattgggcttagaatttccaaatttgccgtattatatcgatggcgacgtaaaactgacccaatcaatggccattattcgctacatcgcagataaacataacatgctgggtggctgccctaaagaacgggctgagatctccatgctggaaggtgcggtgctcgacattcgctacggcgtcagtagaattgcgtatagcaaggatttcgaaactttaaaagtggatttcctgagcaaacttccggagatgctgaaaatgtttgaggataggctttgtcataagacgtatctcaatggtgatcatgttacccacccggactttatgctgtacgacgcccttgatgtcgttctgtatatggatcccatgtgcctggacgccttcccgaaattagtgtgttttaaaaaacgtatcgaagcgattccacagatcgataaatacttgaagtcttctaaatatattgcttggcctctgcaaggctggcaggcaacgttcggtgggggagatcatccgccaaaatcagatctggtgccgcgtgggagccctggcatacaccgcgacggtggttctggtgagaacctgtactttcaaagctcagataatgggcctcaaaaccagcgcaacgctccacgtataaccttcggtggcccgtctgactccacaggcagcaaccagaatggtgagcgtagtggagccaggtctaagcagcgccgtccccagggtctgccgaacaacacggcgagctggtttactgcgcttacccaacacggtaaagaagacttaaaattcccgcgtggccagggcgtcccgatcaacactaactcttccccggatgatcagattggttattaccgcagagcaactcgtcggattcgcggcggcgacggtaaaatgaaagatttgtctccgcgttggtacttttactatctcggcaccggtccggaagctggactgccctacggggcaaacaaggacgggatcatttgggtggctaccgaaggtgccctgaatactccaaaagatcatatcggcacccgtaaccctgctaataacgctgcgatcgttctgcaactgcctacgggtacaactctgccaaaaggcttctatgcagaagggtcgcgtggtggcagccaggcgagtagccgtagcagctcccgctctcgcaactcgtcccgtaactccactccgggctcttctcgcggcacgtccccggctcgtatggcaggtaacggtggtgacgctgctctggcgctgctactgctggacaggctgaaccagctggagtcgaagatgagtggtaaaggccaacagcagcagggccagaccgttaccaaaaagagcgcagctgaagcatctaaaaaaccgcgacagaaacgtaccgcgactaaagcgtacaatgtaacacaggccttcggtcgtcgaggtccggagcaaactcaaggaaactttggcgatcaggaattaatccgccaggggaccgactacaaacactggccgcaaattgcccagttcgccccatccgctagtgcattcttcggtatgagccgcatcggcatggaagtaacgccaagtggtacgtggctgacctacaccggtgctatcaagcttgatgacaaggacccgaactttaaagaccaggttattctgcttaacaaacatattgatgcctataaaactttcccgccgaccgaacccaaaaaggacaaaaagaaaaaagctgatgaaacccaggctctaccgcagcgtcagaaaaaacagcaaactgtgactctgctgccagctgcggacctggatgatttttccaagcagctgcaacagtctatgagctctgcggactctacgcaggcttaa

SEQ ID NO: 433 - DNA, 2016 bp, Artificial Sequence
  Description of Artificial Sequence: Synthetic polynucleotide
atgcaccatcatcaccatcatggtggttctggttcgccgatacttggttattggaagattaaaggactggttcagcccacacgcctcctgctagaatacttagaggaaaaatatgaagagcacctgtacgaacgtgatgagggggacaaatggcgaaacaagaaatttgaattgggcttagaatttccaaatttgccgtattatatcgatggcgacgtaaaactgacccaatcaatggccattattcgctacatcgcagataaacataacatgctgggtggctgccctaaagaacgggctgagatctccatgctggaaggtgcggtgctcgacattcgctacggcgtcagtagaattgcgtatagcaaggatttcgaaactttaaaagtggatttcctgagcaaacttccggagatgctgaaaatgtttgaggataggctttgtcataagacgtatctcaatggtgatcatgttacccacccggactttatgctgtacgacgcccttgatgtcgttctgtatatggatcccatgtgcctggacgccttcccgaaattagtgtgttttaaaaaacgtatcgaagcgattccacagatcgataaatacttgaagtcttctaaatatattgcttggcctctgcaaggctggcaggcaacgttcggtgggggagatcatccgccaaaatcagatctggtgccgcgtgggagccctggcatacaccgcgacggtggttctggtgagaacctgtactttcaaagctcagataatgggcctcaaaaccagcgcaacgctccacgtataaccttcggtggcccgtctgactccacaggcagcaaccagaatggtgagcgtagtggagccaggtctaagcagcgccgtccccagggtctgccgaacaacacggcgagctggtttactgcgcttacccaacacggtaaagaagacttaaaattcccgcgtggccagggcgtcccgatcaacactaactcttccccggatgatcagattggttattaccgcagagcaactcgtcggattcgcggcggcgacggtaaaatgaaagatttgtctccgcgttggtacttttactatctcggcaccggtccggaagctggactgccctacggggcaaacaaggacgggatcatttgggtggctaccgaaggtgccctgaatactccaaaagatcatatcggcacccgtaaccctgctaataacgctgcgatcgttctgcaactgcctcagggtacaactctgccaaaaggcttctatgcagaagggtcgcgtggtggcagccaggcgagtagccgtagcagctcccgctctcgcaactcgtcccgtaactccactccgggctcttctcgcggcacgtccccggctcgtatggcaggtaacggtggtgacgctgctctggcgctgctactgctggacaggctgaaccagctggagtcgaagatgagtggtaaaggccaacagcagcagggccagaccgttaccaaaaagagcgcagctgaagcatctaaaattccgcgacagaaacgtaccgcgactaaagcgtacaatgtaacacaggccttcggtcgtcgaggtccggagcaaactcaaggaaactttggcgatcaggaattaatccgccaggggaccgactacaaacactggccgcaaattgcccagttcgccccatccgctagtgcattcttcggtatgagccgcatcggcatggaagtaacgccaagtggtacgtggctgacctacaccggtgctatcaagcttgatgacaaggacccgaactttaaagaccaggttattctgcttaacaaacatattgatgcctataaaactttcccgccgaccgaacccaaaaaggacaaaaagaaaaaagctgatgaaacccaggctctaccgcagcgtcagaaaaaacagcaaactgtgactctgctgccagctgcggacctggatgatttttccaagcagctgcaacagtctatgagctctgcggactctacgcaggcttaa

SEQ ID NO: 434 - DNA, 2016 bp, Artificial Sequence
  Description of Artificial Sequence: Synthetic polynucleotide
atgcaccatcatcaccatcatggtggttctggttcgccgatacttggttattggaagattaaaggactggttcagcccacacgcctcctgctagaatacttagaggaaaaatatgaagagcacctgtacgaacgtgatgagggggacaaatggcgaaacaagaaatttgaattgggcttagaatttccaaatttgccgtattatatcgatggcgacgtaaaactgacccaatcaatggccattattcgctacatcgcagataaacataacatgctgggtggctgccctaaagaacgggctgagatctccatgctggaaggtgcggtgctcgacattcgctacggcgtcagtagaattgcgtatagcaaggatttcgaaactttaaaagtggatttcctgagcaaacttccggagatgctgaaaatgtttgaggataggctttgtcataagacgtatctcaatggtgatcatgttacccacccggactttatgctgtacgacgcccttgatgtcgttctgtatatggatcccatgtgcctggacgccttcccgaaattagtgtgttttaaaaaacgtatcgaagcgattccacagatcgataaatacttgaagtcttctaaatatattgcttggcctctgcaaggctggcaggcaacgttcggtgggggagatcatccgccaaaatcagatctggtgccgcgtgggagccctggcatacaccgcgacggtggttctggtgagaacctgtactttcaaagctcagataatgggcctcaaaaccagcgcaacgctccacgtataaccttcggtggcccgtctgactccacaggcagcaaccagaatggtgagcgtagtggagccaggtctaagcagcgccgtccccagggtctgccgaacaacacggcgagctggtttactgcgcttacccaacacggtaaagaagacttaaaattcccgcgtggccagggcgtcccgatcaacactaactcttccccggatgatcagattggttattaccgcagagcaactcgtcggattcgcggcggcgacggtaaaatgaaagatttgtctccgcgttggtacttttactatctcggcaccggtccggaagctggactgccctacggggcaaacaaggacgggatcatttgggtggctaccgaaggtgccctgaatactccaaaagatcatatcggcacccgtaaccctgctaataacgctgcgatcgttctgcaactgcctcagggtacaactctgccaaaaggcttctatgcagaagggtcgcgtggtggcagccaggcgagtagccgtagcagctcccgctctcgcaactcgtcccgtaactccactccgggctcttctcgcggcacgtccccggctcgtatggcaggtaacggtggtgacgctgctctggcgctgctactgctggacaggctgaaccagctggagtcgaagatgagtggtaaaggccaacagcagcagggccagaccgttaccaaaaagagcgcagctgaagcatctaaaaaaccgcgacagaaacgtaccgcgactaaagcgtacaatgtaacacaggccttcggtcgtcgaggtccggagcaaactcaaggaaactttggcgatcaggaattaatccgccaggggaccgactacagtcactggccgcaaattgcccagttcgccccatccgctagtgcattcttcggtatgagccgcatcggcatggaagtaacgccaagtggtacgtggctgacctacaccggtgctatcaagcttgatgacaaggacccgaactttaaagaccaggttattctgcttaacaaacatattgatgcctataaaactttcccgccgaccgaacccaaaaaggacaaaaagaaaaaagctgatgaaacccaggctctaccgcagcgtcagaaaaaacagcaaactgtgactctgctgccagctgcggacctggatgatttttccaagcagctgcaacagtctatgagctctgcggactctacgcaggcttaa

SEQ ID NO: 435 - DNA, 2016 bp, Artificial Sequence
  Description of Artificial Sequence: Synthetic polynucleotide
atgcaccatcatcaccatcatggtggttctggttcgccgatacttggttattggaagattaaaggactggttcagcccacacgcctcctgctagaatacttagaggaaaaatatgaagagcacctgtacgaacgtgatgagggggacaaatggcgaaacaagaaatttgaattgggcttagaatttccaaatttgccgtattatatcgatggcgacgtaaaactgacccaatcaatggccattattcgctacatcgcagataaacataacatgctgggtggctgccctaaagaacgggctgagatctccatgctggaaggtgcggtgctcgacattcgctacggcgtcagtagaattgcgtatagcaaggatttcgaaactttaaaagtggatttcctgagcaaacttccggagatgctgaaaatgtttgaggataggctttgtcataagacgtatctcaatggtgatcatgttacccacccggactttatgctgtacgacgcccttgatgtcgttctgtatatggatcccatgtgcctggacgccttcccgaaattagtgtgttttaaaaaacgtatcgaagcgattccacagatcgataaatacttgaagtcttctaaatatattgcttggcctctgcaaggctggcaggcaacgttcggtgggggagatcatccgccaaaatcagatctggtgccgcgtgggagccctggcatacaccgcgacggtggttctggtgagaacctgtactttcaaagctcagataatgggcctcaaaaccagcgcaacgctccacgtataaccttcggtggcccgtctgactccacaggcagcaaccagaatggtgagcgtagtggagccaggtctaagcagcgccgtccccagggtctgccgaacaacacggcgagctggtttactgcgcttacccaacacggtaaagaagacttaaaattcccgcgtggccagggcgtcccgatcaacactaactcttccccggatgatcagattggttattaccgcagagcaactcgtcggattcgcggcggcgacggtaaaatgaaagatttgtctccgcgttggtacttttactatctcggcaccggtccggaagctggactgccctacggggcaaacaaggacgggatcatttgggtggctaccgaaggtgccctgaatactccaaaagatcatatcggcacccgtaaccctgctaataacgctgcgatcgttctgcaactgcctcagggtacagagctgccaaaaggcttctatgcagaagggtcgcgtggtggcagccaggcgagtagccgtagcagctcccgctctcgcaactcgtcccgtaactccactccgggctcttctcgcggcacgtccccggctcgtatggcaggtaacggtggtgacgctgctctggcgctgctactgctggacaggctgaaccagctggagtcgaagatgagtggtaaaggccaacagcagcagggccagaccgttaccaaaaagagcgcagctgaagcatctaaaaaaccgcgacagaaacgtaccgcgactaaagcgtacaatgtaacacaggccttcggtcgtcgaggtccggagcaaactcaaggaaactttggcgatcaggaattaatccgccaggggaccgactacaaacactggccgcaaattgcccagttcgccccatccgctagtgcattcttcggtatgagccgcatcggcatggaagtaacgccaagtggtacgtggctgacctacaccggtgctatcaagcttgatgacaaggacccgaactttaaagaccaggttattctgcttaacaaacatattgatgcctataaaactttcccgccgaccgaacccaaaaaggacaaaaagaaaaaagctgatgaaacccaggctctaccgcagcgtcagaaaaaacagcaaactgtgactctgctgccagctgcggacctggatgatttttccaagcagctgcaacagtctatgagctctgcggactctacgcaggcttaa

SEQ ID NO: 436 - DNA, 2016 bp, Artificial Sequence
  Description of Artificial Sequence: Synthetic polynucleotide
atgcaccatcatcaccatcatggtggttctggttcgccgatacttggttattggaagattaaaggactggttcagcccacacgcctcctgctagaatacttagaggaaaaatatgaagagcacctgtacgaacgtgatgagggggacaaatggcgaaacaagaaatttgaattgggcttagaatttccaaatttgccgtattatatcgatggcgacgtaaaactgacccaatcaatggccattattcgctacatcgcagataaacataacatgctgggtggctgccctaaagaacgggctgagatctccatgctggaaggtgcggtgctcgacattcgctacggcgtcagtagaattgcgtatagcaaggatttcgaaactttaaaagtggatttcctgagcaaacttccggagatgctgaaaatgtttgaggataggctttgtcataagacgtatctcaatggtgatcatgttacccacccggactttatgctgtacgacgcccttgatgtcgttctgtatatggatcccatgtgcctggacgccttcccgaaattagtgtgttttaaaaaacgtatcgaagcgattccacagatcgataaatacttgaagtcttctaaatatattgcttggcctctgcaaggctggcaggcaacgttcggtgggggagatcatccgccaaaatcagatctggtgccgcgtgggagccctggcatacaccgcgacggtggttctggtgagaacctgtactttcaaagctcagataatgggcctcaaaaccagcgcaacgctccacgtataaccttcggtggcccgtctgactccacaggcagcaaccagaatggtgagcgtagtggagccaggtctaagcagcgccgtccccagggtctgccgaacaacacggcgagctggtttactgcgcttacccaacacggtaaagaagacttaaaattcccgcgtggccagggcgtcccgatcaacactaactcttccccggatgatcagattggttattaccgcagagcaactcgtcggattcgcggcggcgacggtaaaatgaaagatttgtctccgcgttggtacttttactatctcggcaccggtccggaagctggactgccctacggggcaaacaaggacgggatcatttgggtggctatggaaggtgccctgaatactccaaaagatcatatcggcacccgtaaccctgctaataacgctgcgatcgttctgcaactgcctcagggtacaactctgccaaaaggcttctatgcagaagggtcgcgtggtggcagccaggcgagtagccgtagcagctcccgctctcgcaactcgtcccgtaactccactccgggctcttctcgcggcacgtccccggctcgtatggcaggtaacggtggtgacgctgctctggcgctgctactgctggacaggctgaaccagctggagtcgaagatgagtggtaaaggccaacagcagcagggccagaccgttaccaaaaagagcgcagctgaagcatctaaaaaaccgcgacagaaacgtaccgcgactaaagcgtacaatgtaacacaggccttcggtcgtcgaggtccggagcaaactcaaggaaactttggcgatcaggaattaatccgccaggggaccgactacaaacactggccgcaaattgcccagttcgccccatccgctagtgcattcttcggtatgagccgcatcggcatggaagtaacgccaagtggtacgtggctgacctacaccggtgctatcaagcttgatgacaaggacccgaactttaaagaccaggttattctgcttaacaaacatattgatgcctataaaactttcccgccgaccgaacccaaaaaggacaaaaagaaaaaagctgatgaaacccaggctctaccgcagcgtcagaaaaaacagcaaactgtgactctgctgccagctgcggacctggatgatttttccaagcagctgcaacagtctatgagctctgcggactctacgcaggcttaa

SEQ ID NO: 437 - DNA, 2016 bp, Artificial Sequence
  Description of Artificial Sequence: Synthetic polynucleotide
atgcaccatcatcaccatcatggtggttctggttcgccgatacttggttattggaagattaaaggactggttcagcccacacgcctcctgctagaatacttagaggaaaaatatgaagagcacctgtacgaacgtgatgagggggacaaatggcgaaacaagaaatttgaattgggcttagaatttccaaatttgccgtattatatcgatggcgacgtaaaactgacccaatcaatggccattattcgctacatcgcagataaacataacatgctgggtggctgccctaaagaacgggctgagatctccatgctggaaggtgcggtgctcgacattcgctacggcgtcagtagaattgcgtatagcaaggatttcgaaactttaaaagtggatttcctgagcaaacttccggagatgctgaaaatgtttgaggataggctttgtcataagacgtatctcaatggtgatcatgttacccacccggactttatgctgtacgacgcccttgatgtcgttctgtatatggatcccatgtgcctggacgccttcccgaaattagtgtgttttaaaaaacgtatcgaagcgattccacagatcgataaatacttgaagtcttctaaatatattgcttggcctctgcaaggctggcaggcaacgttcggtgggggagatcatccgccaaaatcagatctggtgccgcgtgggagccctggcatacaccgcgacggtggttctggtgagaacctgtactttcaaagctcagataatgggcctcaaaaccagcgcaacgctccacgtataaccttcggtggcccgtctgactccacaggcagcaaccagaatggtgagcgtagtggagccaggtctaagcagcgccgtccccagggtctgccgaacaacacggcgagctggtttactgcgcttacccaacacggtaaagaagacttaaaattcccgcgtggccagggcgtcccgatcaacactaactcttccccggatgatcagattggttattaccgcagagcaactcgtcggattcgcggcggcgacggtaaaatgaaagatttgctcccgcgttggtacttttactatctcggcaccggtccggaagctggactgccctacggggcaaacaaggacgggatcatttgggtggctaccgaaggtgccctgaatactccaaaagatcatatcggcacccgtaaccctgctaataacgctgcgatcgttctgcaactgcctcagggtacaactctgccaaaaggcttctatgcagaagggtcgcgtggtggcagccaggcgagtagccgtagcagctcccgctctcgcaactcgtcccgtaactccactccgggctcttctcgcggcacgtccccggctcgtatggcaggtaacggtggtgacgctgctctggcgctgctactgctggacaggctgaaccagctggagtcgaagatgagtggtaaaggccaacagcagcagggccagaccgttaccaaaaagagcgcagctgaagcatctaaaaaaccgcgacagaaacgtaccgcgactaaagcgtacaatgtaacacaggccttcggtcgtcgaggtccggagcaaactcaaggaaactttggcgatcaggaattaatccgccaggggaccgactacaaacactggccgcaaattgcccagttcgccccatccgctagtgcattcttcggtatgagccgcatcggcatggaagtaacgccaagtggtacgtggctgacctacaccggtgctatcaagcttgatgacaaggacccgaactttaaagaccaggttattctgcttaacaaacatattgatgcctataaaactttcccgccgaccgaacccaaaaaggacaaaaagaaaaaagctgatgaaacccaggctctaccgcagcgtcagaaaaaacagcaaactgtgactctgctgccagctgcggacctggatgatttttccaagcagctgcaacagtctatgagctctgcggactctacgcaggcttaa

SEQ ID NO: 438 - DNA, 2016 bp, Artificial Sequence
  Description of Artificial Sequence: Synthetic polynucleotide
atgcaccatcatcaccatcatggtggttctggttcgccgatacttggttattggaagattaaaggactggttcagcccacacgcctcctgctagaatacttagaggaaaaatatgaagagcacctgtacgaacgtgatgagggggacaaatggcgaaacaagaaatttgaattgggcttagaatttccaaatttgccgtattatatcgatggcgacgtaaaactgacccaatcaatggccattattcgctacatcgcagataaacataacatgctgggtggctgccctaaagaacgggctgagatctccatgctggaaggtgcggtgctcgacattcgctacggcgtcagtagaattgcgtatagcaaggatttcgaaactttaaaagtggatttcctgagcaaacttccggagatgctgaaaatgtttgaggataggctttgtcataagacgtatctcaatggtgatcatgttacccacccggactttatgctgtacgacgcccttgatgtcgttctgtatatggatcccatgtgcctggacgccttcccgaaattagtgtgttttaaaaaacgtatcgaagcgattccacagatcgataaatacttgaagtcttctaaatatattgcttggcctctgcaaggctggcaggcaacgttcggtgggggagatcatccgccaaaatcagatctggtgccgcgtgggagccctggcatacaccgcgacggtggttctggtgagaacctgtactttcaaagctcagataatgggcctcaaaaccagcgcaacgctccacgtataaccttcggtggcccgtctgactccacaggcagcaaccagaatggtgagcgtagtggagccaggtctaagcagcgccgtccccagggtctgccgaacaacacggcgagctggtttactgcgcttacccaacacggtaaagaagacttaaaattcccgcgtggccagggcgtcccgatcaacactaactcttccccggatgatcagattggttattaccgcagagcaactcgtcggattcgcggcggcgacggtaaaatgaaagatttgtctccgcgttggtacttttactatctcggcaccggtccggaagctggactgccctacggggcaaacaaggacgggatcatttgggtggctaccgaaggtgccctgaatactccaaaagatcatatcggcacccgtaaccctgctaataacgctgcgatcgttctgcaactgcctcagggtacaactctgccaaaaggcttctatgcagaagggtcgcgtggtggcagccaggcgagtagccgtagcagctcccgctctcgcaactcgtcccgtaactccactccgggctcttctcgcggcacgtccccggctcgtatggcaggtaacggtggtgacgctgctctggcgctgctactgctggacaggctgaaccagctggagtcgaagatgagtggtaaaggccaacagcagcagggccagaccgttaccaaaaagagcgcagctgaagcatctaaaaaaccgcgacagaaacgtaccgcgactaaagcgtacaatgtaacacaggccttcggtcgtcgaggtccggagcaaactcaaggaaactttggcgatcaggaattaatccgccaggggaccgactacaaacactggccgcaaattgcccagttcgccccatccgctagtgcattcttcggtatgagccgcatcggcatggaagccacgccaagtggtacgtggctgacctacaccggtgctatcaagcttgatgacaaggacccgaactttaaagaccaggttattctgcttaacaaacatattgatgcctataaaactttcccgccgaccgaacccaaaaaggacaaaaagaaaaaagctgatgaaacccaggctctaccgcagcgtcagaaaaaacagcaaactgtgactctgctgccagctgcggacctggatgatttttccaagcagctgcaacagtctatgagctctgcggactctacgcaggcttaa

SEQ ID NO: 439 - DNA, 2016 bp, Artificial Sequence
  Description of Artificial Sequence: Synthetic polynucleotide
atgcaccatcatcaccatcatggtggttctggttcgccgatacttggttattggaagattaaaggactggttcagcccacacgcctcctgctagaatacttagaggaaaaatatgaagagcacctgtacgaacgtgatgagggggacaaatggcgaaacaagaaatttgaattgggcttagaatttccaaatttgccgtattatatcgatggcgacgtaaaactgacccaatcaatggccattattcgctacatcgcagataaacataacatgctgggtggctgccctaaagaacgggctgagatctccatgctggaaggtgcggtgctcgacattcgctacggcgtcagtagaattgcgtatagcaaggatttcgaaactttaaaagtggatttcctgagcaaacttccggagatgctgaaaatgtttgaggataggctttgtcataagacgtatctcaatggtgatcatgttacccacccggactttatgctgtacgacgcccttgatgtcgttctgtatatggatcccatgtgcctggacgccttcccgaaattagtgtgttttaaaaaacgtatcgaagcgattccacagatcgataaatacttgaagtcttctaaatatattgcttggcctctgcaaggctggcaggcaacgttcggtgggggagatcatccgccaaaatcagatctggtgccgcgtgggagccctggcatacaccgcgacggtggttctggtgagaacctgtactttcaaagctcagataatgggcctcaaaaccagcgcaacgctccacgtataaccttcggtggcccgtctgactccacaggcagcaaccagaatggtgagcgtagtggagccaggtctaagcagcgccgtccccagggtctgccgaacaacacggcgagctggtttactgcgcttacccaacacggtaaagaagacttaaaattcccgcgtggccagggcgtcccgatcaacactaactcttccccggatgatcagattggttattaccgcagagcaactcgtcggattcgcggcggcgacggtaaaatgaaagatttgtctccgcgttggtacttttactatctcggcaccggtccggaagctggactgccctacggggcaaacaaggacgggatcatttgggtggctaccgaaggtgccctgaatactccaaaagatcatatcggcacccgtaaccctgctaataacgctgcgatcgttctgcaactgcctcagggtacaactctgccaaaaggcttctatgcagaagggtcgcgtggtggcagccaggcgagtagccgtagcagctcccgctctcgcaactcgtcccgtaactccactccgggctcttctcgcggcacgtccccggctcgtatggcaggtaacggtggtgacgctgctctggcgctgctactgctggacaggctgaaccagctggagtcgaagatgagtggtaaaggccaacagcagcagggccagaccgttaccaaaaagagcgcagctgaagcatctaaaaaaccgcgacagaaacgtaccgcgactaaagcgtacaatgtaacacaggccttcggtcgtcgaggtccggagcaaactcaaggaaactttggcgatcaggaattaatccgccaggggaccgactacaaacactggccgcaaattgcccagttcgccccatccgctagtgcattcttcggtatgagcgagatcggcatggaagtaacgccaagtggtacgtggctgacctacaccggtgctatcaagcttgatgacaaggacccgaactttaaagaccaggttattctgcttaacaaacatattgatgcctataaaactttcccgccgaccgaacccaaaaaggacaaaaagaaaaaagctgatgaaacccaggctctaccgcagcgtcagaaaaaacagcaaactgtgactctgctgccagctgcggacctggatgatttttccaagcagctgcaacagtctatgagctctgcggactctacgcaggcttaa

SEQ ID NO: 440 - DNA, 2016 bp, Artificial Sequence
  Description of Artificial Sequence: Synthetic polynucleotide
atgcaccatcatcaccatcatggtggttctggttcgccgatacttggttattggaagattaaaggactggttcagcccacacgcctcctgctagaatacttagaggaaaaatatgaagagcacctgtacgaacgtgatgagggggacaaatggcgaaacaagaaatttgaattgggcttagaatttccaaatttgccgtattatatcgatggcgacgtaaaactgacccaatcaatggccattattcgctacatcgcagataaacataacatgctgggtggctgccctaaagaacgggctgagatctccatgctggaaggtgcggtgctcgacattcgctacggcgtcagtagaattgcgtatagcaaggatttcgaaactttaaaagtggatttcctgagcaaacttccggagatgctgaaaatgtttgaggataggctttgtcataagacgtatctcaatggtgatcatgttacccacccggactttatgctgtacgacgcccttgatgtcgttctgtatatggatcccatgtgcctggacgccttcccgaaattagtgtgttttaaaaaacgtatcgaagcgattccacagatcgataaatacttgaagtcttctaaatatattgcttggcctctgcaaggctggcaggcaacgttcggtgggggagatcatccgccaaaatcagatctggtgccgcgtgggagccctggcatacaccgcgacggtggttctggtgagaacctgtactttcaaagctcagataatgggcctcaaaaccagcgcaacgctccacgtataaccttcggtggcccgtctgactccacaggcagcaaccagaatggtgagcgtagtggagccaggtctaagcagcgccgtccccagggtctgccgaacaacacggcgagctggtttactgcgcttacccaacacggtaaagaagacttaaaattcccgcgtggccagggcgtcccgatcaacactaactcttccccggatgatcagattggttattaccgcagagcaactcgtcggattcgcggcggcgacggtaaaatgaaagatttgtctccgcgttggtacttttactatctcggcaccggtccggaagctggactgccctacggggcaaacaaggacgggatcatttgggtggctaccgaaggtgccctgaatactccaaaagatcatatcggcacccgtaaccctgctaataacgctgcgatcgttctgcaactgcctgcgggtacaactctgccaaaaggcttctatgcagaagggtcgcgtggtggcagccaggcgagtagccgtagcagctcccgctctcgcaactcgtcccgtaactccactccgggctcttctcgcggcacgtccccggctcgtatggcaggtaacggtggtgacgctgctctggcgctgctactgctggacaggctgaaccagctggagtcgaagatgagtggtaaaggccaacagcagcagggccagaccgttaccaaaaagagcgcagctgaagcatctaaaaaaccgcgacagaaacgtaccgcgactaaagcgtacaatgtaacacaggccttcggtcgtcgaggtccggagcaaactcaaggaaactttggcgatcaggaattaatccgccaggggaccgactacaaacactggccgcaaattgcccagttcgccccatccgctagtgcattcttcggtatgagccgcatcggcatggaagtaacgccaagtggtacgtggctgacctacaccggtgctatcaagcttgatgacaaggacccgaactttaaagaccaggttattctgcttaacaaacatattgatgcctataaaactttcccgccgaccgaacccaaaaaggacaaaaagaaaaaagctgatgaaacccaggctctaccgcagcgtcagaaaaaacagcaaactgtgactctgctgccagctgcggacctggatgatttttccaagcagctgcaacagtctatgagctctgcggactctacgcaggcttaa

SEQ ID NO: 441 - DNA, 2016 bp, Artificial Sequence
  Description of Artificial Sequence: Synthetic polynucleotide
atgcaccatcatcaccatcatggtggttctggttcgccgatacttggttattggaagattaaaggactggttcagcccacacgcctcctgctagaatacttagaggaaaaatatgaagagcacctgtacgaacgtgatgagggggacaaatggcgaaacaagaaatttgaattgggcttagaatttccaaatttgccgtattatatcgatggcgacgtaaaactgacccaatcaatggccattattcgctacatcgcagataaacataacatgctgggtggctgccctaaagaacgggctgagatctccatgctggaaggtgcggtgctcgacattcgctacggcgtcagtagaattgcgtatagcaaggatttcgaaactttaaaagtggatttcctgagcaaacttccggagatgctgaaaatgtttgaggataggctttgtcataagacgtatctcaatggtgatcatgttacccacccggactttatgctgtacgacgcccttgatgtcgttctgtatatggatcccatgtgcctggacgccttcccgaaattagtgtgttttaaaaaacgtatcgaagcgattccacagatcgataaatacttgaagtcttctaaatatattgcttggcctctgcaaggctggcaggcaacgttcggtgggggagatcatccgccaaaatcagatctggtgccgcgtgggagccctggcatacaccgcgacggtggttctggtgagaacctgtactttcaaagctcagataatgggcctcaaaaccagcgcaacgctccacgtataaccttcggtggcccgtctgactccacaggcagcaaccagaatggtgagcgtagtggagccaggtctaagcagcgccgtccccagggtctgccgaacaacacggcgagctggtttactgcgcttacccaacacggtaaagaagacttaaaattcccgcgtggccagggcgtcccgatcaacactaactcttccccggatgatcagattggttattaccgcagagcaactcgtcggattcgcggcggcgacggtaaaatgaaagatttgtctccgcgttggtacttttactatctcggcaccggtccggaagctggactgccctacggggcaaacaaggacgggatcatttgggtggctaccgaaggtgccctgaatactccaaaagatcatatcggcacccgtaaccctgctaataacgctgcgatcgttctgcaactgcctcagggtacaactctgccaaaaggcttctatgcagaagggtcgcgtggtggcagccaggcgagtagccgtagcagctcccgctctcgcaactcgtcccgtaactccactccgggctcttctcgcggcacgtccccggctcgtatggcaggtaacggtggtgacgctgctctggcgctgctactgctggacaggctgaaccagctggagtcgaagatgagtggtaaaggccaacagcagcagggccagaccgttaccaaaaagagcgcagctgaagcatctaaaaaaccgcgacagaaacgtaccgcgactaaaacgtacaatgtaacacaggccttcggtcgtcgaggtccggagcaaactcaaggaaactttggcgatcaggaattaatccgccaggggaccgactacaaacactggccgcaaattgcccagttcgccccatccgctagtgcattcttcggtatgagccgcatcggcatggaagtaacgccaagtggtacgtggctgacctacaccggtgctatcaagcttgatgacaaggacccgaactttaaagaccaggttattctgcttaacaaacatattgatgcctataaaactttcccgccgaccgaacccaaaaaggacaaaaagaaaaaagctgatgaaacccaggctctaccgcagcgtcagaaaaaacagcaaactgtgactctgctgccagctgcggacctggatgatttttccaagcagctgcaacagtctatgagctctgcggactctacgcaggcttaa

SEQ ID NO: 442 - DNA, 2016 bp, Artificial Sequence
  Description of Artificial Sequence: Synthetic polynucleotide
atgcaccatcatcaccatcatggtggttctggttcgccgatacttggttattggaagattaaaggactggttcagcccacacgcctcctgctagaatacttagaggaaaaatatgaagagcacctgtacgaacgtgatgagggggacaaatggcgaaacaagaaatttgaattgggcttagaatttccaaatttgccgtattatatcgatggcgacgtaaaactgacccaatcaatggccattattcgctacatcgcagataaacataacatgctgggtggctgccctaaagaacgggctgagatctccatgctggaaggtgcggtgctcgacattcgctacggcgtcagtagaattgcgtatagcaaggatttcgaaactttaaaagtggatttcctgagcaaacttccggagatgctgaaaatgtttgaggataggctttgtcataagacgtatctcaatggtgatcatgttacccacccggactttatgctgtacgacgcccttgatgtcgttctgtatatggatcccatgtgcctggacgccttcccgaaattagtgtgttttaaaaaacgtatcgaagcgattccacagatcgataaatacttgaagtcttctaaatatattgcttggcctctgcaaggctggcaggcaacgttcggtgggggagatcatccgccaaaatcagatctggtgccgcgtgggagccctggcatacaccgcgacggtggttctggtgagaacctgtactttcaaagctcagataatgggcctcaaaaccagcgcaacgctccacgtataaccttcggtggcccgtctgactccacaggcagcaaccagaatggtgagcgtagtggagccaggtctaagcagcgccgtccccagggtctgccgaacaacacggcgagctggtttactgcgcttacccaacacggtaaagaagacttaaaattcccgcgtggccagggcgtcccgatcaacactaactcttccccggatgatcagattggttattaccgcagagcaactcgtcggattcgcggcggcgacggtaaaatgaaagatttgtctccgcgttggtacttttactatctcggcaccggtccggaagctggactgccctacggggcaaacaaggacgggatcatttgggtggctaccgaaggtgccctgaatactccaaaagatcatatcggcacccgtaaccctgctaataacgctgcgatcgttctgcaactgcctcagggtacaactctgccaaaaggcttctatgcagaagggtcgcgtggtggcagccaggcgagtagccgtagcagctcccgctctcgcaactcgtcccgtaactccactccgggctcttctcgcggcacgtccccggctcgtatggcaggtaacggtggtgacgctgctctggcgctgctactgctggacaggctgaaccagctggagtcgaagatgagtggtaaaggccaacagcagcagggccagaccgttaccaaaaagagcgcagctgaagcatctaaaaaaccgcgacagaaacgtaccgcgactaaaggatacaatgtaacacaggccttcggtcgtcgaggtccggagcaaactcaaggaaactttggcgatcaggatttaatcaaattggggaccgactacaaacactggccgcaaattgcccagttcgccccatccgctagtgcattcttcggtatgagccgcatcggcatgcgcgaaacgccaagtggtacgtggctgacctacaccggtgctatcaagcttgataaaaaggacccgaactttaaagaccaggttattctgcttaacaaacatattgatgcctataaaactttcccgccgaccgaacccaaaaaggacaaaaagaaaaaagctgatgaaacccaggctctaccgcagcgtcagaaaaaacagcaaactgtgactctgctgccagctgcggacctggatgatttttccaagcagctgcaacagtctatgagctctgcggactctacgcaggcttaa

SEQ ID NO: 443 - DNA, 2016 bp, Artificial Sequence
  Description of Artificial Sequence: Synthetic polynucleotide
atgcaccatcatcaccatcatggtggttctggttcgccgatacttggttattggaagattaaaggactggttcagcccacacgcctcctgctagaatacttagaggaaaaatatgaagagcacctgtacgaacgtgatgagggggacaaatggcgaaacaagaaatttgaattgggcttagaatttccaaatttgccgtattatatcgatggcgacgtaaaactgacccaatcaatggccattattcgctacatcgcagataaacataacatgctgggtggctgccctaaagaacgggctgagatctccatgctggaaggtgcggtgctcgacattcgctacggcgtcagtagaattgcgtatagcaaggatttcgaaactttaaaagtggatttcctgagcaaacttccggagatgctgaaaatgtttgaggataggctttgtcataagacgtatctcaatggtgatcatgttacccacccggactttatgctgtacgacgcccttgatgtcgttctgtatatggatcccatgtgcctggacgccttcccgaaattagtgtgttttaaaaaacgtatcgaagcgattccacagatcgataaatacttgaagtcttctaaatatattgcttggcctctgcaaggctggcaggcaacgttcggtgggggagatcatccgccaaaatcagatctggtgccgcgtgggagccctggcatacaccgcgacggtggttctggtgagaacctgtactttcaaagctcagataatgggcctcaaaaccagcgcaacgctccacgtataaccttcggtggcccgtctgactccacaggcagcaaccagaatggtgagcgtagtggagccaggtctaagcagcgccgtccccagggtctgccgaacaacacggcgagctggtttactgcgcttacccaacacggtaaagaagacttaaaattcccgcgtggccagggcgtcccgatcaacactaactcttccccggatgatcagattggttattaccgcagagcaactcgtcggattcgcggcggcgacggtaaaatgaaagatttgtctccgcgttggtacttttactatctcggcaccggtccggaagctcatctgccctacggggcaaacaaggacgggatcatttgggtggctaccgaaggtgccctgaatactccaaaagatcatatcggcacccgtaaccctgctaataacgctgcgatcgttctgcaactgcctcagggtacaactctgccaaaaggcttctatgcagaagggtcgcgtggtggcagccaggcgagtagccgtagcagctcccgctctcgcaactcgtcccgtaactccactccgggctcttctcgcggcacgtccccggctcgtatggcaggtaacggtggtgacgctgctctggcgctgctactgctggacaggctgaaccagctggagtcgaagatgagtggtaaaggccaacagcagcagggccagaccgttaccaaaaagagcgcagctgaagcatctaaaaaaccgcgacagaaacgtaccgcgactaaagcgtacaatgtaacacaggccttcggtcgtcgaggtccggagcaaactcaaggaaactttggcgatcaggaattaatccgccaggggaccgactacaaacactggccgcaaattgcccagttcgccccatccgctagtgcattcttcggtatgagccgcatcggcatggaagtaacgccaagtggtacgtggctgacctacaccggtgctatcaagcttgatgacaaggacccgaactttaaagaccaggttattctgcttaacaaacatattgatgcctataaaactttcccgccgaccgaacccaaaaaggacaaaaagaaaaaagctgatgaaacccaggctctaccgcagcgtcagaaaaaacagcaaactgtgactctgctgccagctgcggacctggatgatttttccaagcagctgcaacagtctatgagctctgcggactctacgcaggcttaa

SEQ ID NO: 444 - DNA, 2016 bp, Artificial Sequence
  Description of Artificial Sequence: Synthetic polynucleotide
atgcaccatcatcaccatcatggtggttctggttcgccgatacttggttattggaagattaaaggactggttcagcccacacgcctcctgctagaatacttagaggaaaaatatgaagagcacctgtacgaacgtgatgagggggacaaatggcgaaacaagaaatttgaattgggcttagaatttccaaatttgccgtattatatcgatggcgacgtaaaactgacccaatcaatggccattattcgctacatcgcagataaacataacatgctgggtggctgccctaaagaacgggctgagatctccatgctggaaggtgcggtgctcgacattcgctacggcgtcagtagaattgcgtatagcaaggatttcgaaactttaaaagtggatttcctgagcaaacttccggagatgctgaaaatgtttgaggataggctttgtcataagacgtatctcaatggtgatcatgttacccacccggactttatgctgtacgacgcccttgatgtcgttctgtatatggatcccatgtgcctggacgccttcccgaaattagtgtgttttaaaaaacgtatcgaagcgattccacagatcgataaatacttgaagtcttctaaatatattgcttggcctctgcaaggctggcaggcaacgttcggtgggggagatcatccgccaaaatcagatctggtgccgcgtgggagccctggcatacaccgcgacggtggttctggtgagaacctgtactttcaaagctcagataatgggcctcaaaaccagcgcaacgctccacgtataaccttcggtggcccgtctgactccacaggcagcaaccagaatggtgagcgtagtggagccaggtctaagcagcgccgtccccagggtctgccgaacaacacggcgagctggtttactgcgcttacccaacacggtaaagaagacttaaaattcccgcgtggccagggcgtcccgatcaacactaactcttccccggatgatcagattggttattaccgcagagcaactcgtcggattcgcggcggcgacggtaaaatgaaagatttgtctccgcgttggtacttttactatctcggcaccggtccggaagctggactgccctacggggcaaacaaggacgggatcatttgggtggctaccgaaggtgccctgaatactccaaaagatcatatcggcacccgtaaccctgctaataacgctgcgatcgttctgcaactgcctcagggtacaactctgccaaaaggcttctatgcagaagggtcgcgtggtggcagccaggcgagtagccgtagcagctcccgctctcgcaactcgtcccgtaactccactccgggctcttctcgcggcacgtccccggctcgtatggcaggtaacggtggtgacgctgctctggcgctgctactgctggacaggctgaaccagctggagtcgaagatgagtggtaaaggccaacagcagcagggccagaccgttaccaaaaagagcgcagctgaagcatctaaaaaaccgcgacagaaacgtaccgcgactaaagcgtacaatgtaacacaggccttcggtcgtcgaggtccggagcaaactcaaggaaactttggcgatcaggaattaatccgccaggggaccgactacaaacactggccgcaaattgcccagttcttgccatccgctagtgcattcttcggtatgagccgcatcggcatggaagtaacgccaagtggtacgtggctgacctacaccggtgctatcaagcttgatgacaaggacccgaactttaaagaccaggttattctgcttaacaaacatattgatgcctataaaactttcccgccgaccgaacccaaaaaggacaaaaagaaaaaagctgatgaaacccaggctctaccgcagcgtcagaaaaaacagcaaactgtgactctgctgccagctgcggacctggatgatttttccaagcagctgcaacagtctatgagctctgcggactctacgcaggcttaa

SEQ ID NO: 445 - DNA, 2016 bp, Artificial Sequence
  Description of Artificial Sequence: Synthetic polynucleotide
atgcaccatcatcaccatcatggtggttctggttcgccgatacttggttattggaagattaaaggactggttcagcccacacgcctcctgctagaatacttagaggaaaaatatgaagagcacctgtacgaacgtgatgagggggacaaatggcgaaacaagaaatttgaattgggcttagaatttccaaatttgccgtattatatcgatggcgacgtaaaactgacccaatcaatggccattattcgctacatcgcagataaacataacatgctgggtggctgccctaaagaacgggctgagatctccatgctggaaggtgcggtgctcgacattcgctacggcgtcagtagaattgcgtatagcaaggatttcgaaactttaaaagtggatttcctgagcaaacttccggagatgctgaaaatgtttgaggataggctttgtcataagacgtatctcaatggtgatcatgttacccacccggactttatgctgtacgacgcccttgatgtcgttctgtatatggatcccatgtgcctggacgccttcccgaaattagtgtgttttaaaaaacgtatcgaagcgattccacagatcgataaatacttgaagtcttctaaatatattgcttggcctctgcaaggctggcaggcaacgttcggtgggggagatcatccgccaaaatcagatctggtgccgcgtgggagccctggcatacaccgcgacggtggttctggtgagaacctgtactttcaaagctcagataatgggcctcaaaaccagcgcaacgctccacgtataaccttcggtggcccgtctgactccacaggcagcaaccagaatggtgagcgtagtggagccaggtctaagcagcgccgtccccagggtctgccgaacaacacggcgagctggtttactgcgcttacccaacacggtaaagaagacttaaaattcccgcgtggccagggcgtcccgatcaacactaactcttccccggatgatcagattggttattaccgcagagcaactcgtcggattcgcggcggcgacggtaaaatgaaagatttgtctccgcgttggtacttttactatctcggcaccggtccggaagctggactgccctacggggcaaacaaggacgggatcatttgggtggctaccgaaggtgccctgaatactccaaaagatcatatcggcacccgtaaccctgctaataacgctgcgatcgttctgcaactgcctcagggtacaactctgccaaaaggcttctatgcagaagggtcgcgtggtggcagccaggcgagtagccgtagcagctcccgctctcgcaactcgtcccgtaactccactccgggctcttctcgcggcacgtccccggctcgtatggcaggtaacggtggtgacgctgctctggcgctgctactgctggacaggctgaaccagctggagtcgaagatgagtggtaaaggccaacagcagcagggccagaccgttaccaaaaagagcgcagctgaagcatctaaaaaaccgcgacagaaacgtaccgcgactaaagcgtacaatgtaacacaggccttcggtcgtcgaggtccggagcaaactcaaggaaactttggcgatcaggaattaatccgccaggggaccgactacaaacactggccgcaaattgcccagttcgccccatccgctagtgcattcttcggtatgagccgcatcggcatggaacaaacgccaagtggtacgtggctgacctacaccggtgctatcaagcttgatgacaaggacccgaactttaaagaccaggttattctgcttaacaaacatattgatgcctataaaactttcccgccgaccgaacccaaaaaggacaaaaagaaaaaagctgatgaaacccaggctctaccgcagcgtcagaaaaaacagcaaactgtgactctgctgccagctgcggacctggatgatttttccaagcagctgcaacagtctatgagctctgcggactctacgcaggcttaa

SEQ ID NO: 446 - DNA, 2016 bp, Artificial Sequence
  Description of Artificial Sequence: Synthetic polynucleotide
atgcaccatcatcaccatcatggtggttctggttcgccgatacttggttattggaagattaaaggactggttcagcccacacgcctcctgctagaatacttagaggaaaaatatgaagagcacctgtacgaacgtgatgagggggacaaatggcgaaacaagaaatttgaattgggcttagaatttccaaatttgccgtattatatcgatggcgacgtaaaactgacccaatcaatggccattattcgctacatcgcagataaacataacatgctgggtggctgccctaaagaacgggctgagatctccatgctggaaggtgcggtgctcgacattcgctacggcgtcagtagaattgcgtatagcaaggatttcgaaactttaaaagtggatttcctgagcaaacttccggagatgctgaaaatgtttgaggataggctttgtcataagacgtatctcaatggtgatcatgttacccacccggactttatgctgtacgacgcccttgatgtcgttctgtatatggatcccatgtgcctggacgccttcccgaaattagtgtgttttaaaaaacgtatcgaagcgattccacagatcgataaatacttgaagtcttctaaatatattgcttggcctctgcaaggctggcaggcaacgttcggtgggggagatcatccgccaaaatcagatctggtgccgcgtgggagccctggcatacaccgcgacggtggttctggtgagaacctgtactttcaaagctcagataatgggcctcaaaaccagcgcaacgctccacgtataaccttcggtggcccgtctgactccacaggcagcaaccagaatggtgagcgtagtggagccaggtctaagcagcgccgtccccagggtctgccgaacaacacggcgagctggtttactgcgcttacccaacacggtaaagaagacttaaaattcccgcgtggccagggcgtcccgatcaacactaactcttccccggatgatcagattggttattaccgcagagcaactcgtcggattcgcggcggcgacggtaaaatgaaagatttgtctccgcgttggtacttttactatctcggcaccggtccggaagctgatctgccctacggggcaaacaaggacgggatcatttgggtggctaccgaaggtgccctgaatactccaaaagatcatatcggcacccgtaaccctgctaataacgctgcgatcgttctgcaactgcctcagggtacaactctgccaaaaggcttctatgcagaagggtcgcgtggtggcagccaggcgagtagccgtagcagctcccgctctcgcaactcgtcccgtaactccactccgggctcttctcgcggcacgtccccggctcgtatggcaggtaacggtggtgacgctgctctggcgctgctactgctggacaggctgaaccagctggagtcgaagatgagtggtaaaggccaacagcagcagggccagaccgttaccaaaaagagcgcagctgaagcatctaaaaaaccgcgacagaaacgtaccgcgactaaagcgtacaatgtaacacaggccttcggtcgtcgaggtccggagcaaactcaaggaaactttggcgatcaggaattaatccgccaggggaccgactacaaacactggccgcaaattgcccagttcgccccatccgctagtgcattcttcggtatgagccgcatcggcatggaagtaacgccaagtggtacgtggctgacctacaccggtgctatcaagcttgatgacaaggacccgaactttaaagaccaggttattctgcttaacaaacatattgatgcctataaaactttcccgccgaccgaacccaaaaaggacaaaaagaaaaaagctgatgaaacccaggctctaccgcagcgtcagaaaaaacagcaaactgtgactctgctgccagctgcggacctggatgatttttccaagcagctgcaacagtctatgagctctgcggactctacgcaggcttaa

SEQ ID NO: 447 - DNA, 2016 bp, Artificial Sequence
  Description of Artificial Sequence: Synthetic polynucleotide
atgcaccatcatcaccatcatggtggttctggttcgccgatacttggttattggaagattaaaggactggttcagcccacacgcctcctgctagaatacttagaggaaaaatatgaagagcacctgtacgaacgtgatgagggggacaaatggcgaaacaagaaatttgaattgggcttagaatttccaaatttgccgtattatatcgatggcgacgtaaaactgacccaatcaatggccattattcgctacatcgcagataaacataacatgctgggtggctgccctaaagaacgggctgagatctccatgctggaaggtgcggtgctcgacattcgctacggcgtcagtagaattgcgtatagcaaggatttcgaaactttaaaagtggatttcctgagcaaacttccggagatgctgaaaatgtttgaggataggctttgtcataagacgtatctcaatggtgatcatgttacccacccggactttatgctgtacgacgcccttgatgtcgttctgtatatggatcccatgtgcctggacgccttcccgaaattagtgtgttttaaaaaacgtatcgaagcgattccacagatcgataaatacttgaagtcttctaaatatattgcttggcctctgcaaggctggcaggcaacgttcggtgggggagatcatccgccaaaatcagatctggtgccgcgtgggagccctggcatacaccgcgacggtggttctggtgagaacctgtactttcaaagctcagataatgggcctcaaaaccagcgcaacgctccacgtataaccttcggtggcccgtctgactccacaggcagcaaccagaatggtgagcgtagtggagccaggtctaagcagcgccgtccccagggtctgccgaacaacacggcgagctggtttactgcgcttacccaacacggtaaagaagacttaaaattcccgaaaggccagggcgtcccgatcaacactaactctaaaccggatgatcagattggttattggcgcagacaagtgcgtcggtaccgcggcggcgacggtcagatgaaagatttgaatccgcgttggtacttttactatctcggcaccggtccggaagctggactgccctacggggcaaacaaggacgggatcatttgggtggctaccgaaggtgccctgaatactccaaaagatcatatcggcacccgtaaccctgctaataacgctgcgatcgttctgcaactgcctcagggtacaactctgccaaaaggcttctatgcagaagggtcgcgtggtggcagccaggcgagtagccgtagcagctcccgctctcgcaactcgtcccgtaactccactccgggctcttctcgcggcacgtccccggctcgtatggcaggtaacggtggtgacgctgctctggcgctgctactgctggacaggctgaaccagctggagtcgaagatgagtggtaaaggccaacagcagcagggccagaccgttaccaaaaagagcgcagctgaagcatctaaaaaaccgcgacagaaacgtaccgcgactaaagcgtacaatgtaacacaggccttcggtcgtcgaggtccggagcaaactcaaggaaactttggcgatcaggaattaatccgccaggggaccgactacaaacactggccgcaaattgcccagttcgccccatccgctagtgcattcttcggtatgagccgcatcggcatggaagtaacgccaagtggtacgtggctgacctacaccggtgctatcaagcttgatgacaaggacccgaactttaaagaccaggttattctgcttaacaaacatattgatgcctataaaactttcccgccgaccgaacccaaaaaggacaaaaagaaaaaagctgatgaaacccaggctctaccgcagcgtcagaaaaaacagcaaactgtgactctgctgccagctgcggacctggatgatttttccaagcagctgcaacagtctatgagctctgcggactctacgcaggcttaa

SEQ ID NO: 448 - DNA, 2016 bp, Artificial Sequence
  Description of Artificial Sequence: Synthetic polynucleotide
atgcaccatcatcaccatcatggtggttctggttcgccgatacttggttattggaagattaaaggactggttcagcccacacgcctcctgctagaatacttagaggaaaaatatgaagagcacctgtacgaacgtgatgagggggacaaatggcgaaacaagaaatttgaattgggcttagaatttccaaatttgccgtattatatcgatggcgacgtaaaactgacccaatcaatggccattattcgctacatcgcagataaacataacatgctgggtggctgccctaaagaacgggctgagatctccatgctggaaggtgcggtgctcgacattcgctacggcgtcagtagaattgcgtatagcaaggatttcgaaactttaaaagtggatttcctgagcaaacttccggagatgctgaaaatgtttgaggataggctttgtcataagacgtatctcaatggtgatcatgttacccacccggactttatgctgtacgacgcccttgatgtcgttctgtatatggatcccatgtgcctggacgccttcccgaaattagtgtgttttaaaaaacgtatcgaagcgattccacagatcgataaatacttgaagtcttctaaatatattgcttggcctctgcaaggctggcaggcaacgttcggtgggggagatcatccgccaaaatcagatctggtgccgcgtgggagccctggcatacaccgcgacggtggttctggtgagaacctgtactttcaaagctcagataatgggcctcaaaaccagcgcaacgctccacgtataaccttcggtggcccgtctgactccacaggcagcaaccagaatggtgagcgtagtggagccaggtctaagcagcgccgtccccagggtctgccgaacaacacggcgagctggtttactgcgcttacccaacacggtaaagaagacttaaaattcccgcgtggccagggcgtcccgatcaacactaactcttccccggatgatcagattggttattaccgcagagcaactcgtcggattcgcggcggcgacggtaaaatgaaagatttgtctccgcgttggtcgttttactatctcggcaccggtccggaagctggactgccctacggggcaaacaaggacgggatcatttgggtggctaccgaaggtgccctgaatactccaaaagatcatatcggcacccgtaaccctgctaataacgctgcgatcgttctgcaactgcctcagggtacaactctgccaaaaggcttctatgcagaagggtcgcgtggtggcagccaggcgagtagccgtagcagctcccgctctcgcaactcgtcccgtaactccactccgggctcttctcgcggcacgtccccggctcgtatggcaggtaacggtggtgacgctgctctggcgctgctactgctggacaggctgaaccagctggagtcgaagatgagtggtaaaggccaacagcagcagggccagaccgttaccaaaaagagcgcagctgaagcatctaaaaaaccgcgacagaaacgtaccgcgactaaagcgtacaatgtaacacaggccttcggtcgtcgaggtccggagcaaactcaaggaaactttggcgatcaggaattaatccgccaggggaccgactacaaacactggccgcaaattgcccagttcgccccatccgctagtgcattcttcggtatgagccgcatcggcatggaagtaacgccaagtggtacgtggctgacctacaccggtgctatcaagcttgatgacaaggacccgaactttaaagaccaggttattctgcttaacaaacatattgatgcctataaaactttcccgccgaccgaacccaaaaaggacaaaaagaaaaaagctgatgaaacccaggctctaccgcagcgtcagaaaaaacagcaaactgtgactctgctgccagctgcggacctggatgatttttccaagcagctgcaacagtctatgagctctgcggactctacgcaggcttaa

SEQ ID NO: 449 - DNA, 2016 bp, Artificial Sequence
  Description of Artificial Sequence: Synthetic polynucleotide
atgcaccatcatcaccatcatggtggttctggttcgccgatacttggttattggaagattaaaggactggttcagcccacacgcctcctgctagaatacttagaggaaaaatatgaagagcacctgtacgaacgtgatgagggggacaaatggcgaaacaagaaatttgaattgggcttagaatttccaaatttgccgtattatatcgatggcgacgtaaaactgacccaatcaatggccattattcgctacatcgcagataaacataacatgctgggtggctgccctaaagaacgggctgagatctccatgctggaaggtgcggtgctcgacattcgctacggcgtcagtagaattgcgtatagcaaggatttcgaaactttaaaagtggatttcctgagcaaacttccggagatgctgaaaatgtttgaggataggctttgtcataagacgtatctcaatggtgatcatgttacccacccggactttatgctgtacgacgcccttgatgtcgttctgtatatggatcccatgtgcctggacgccttcccgaaattagtgtgttttaaaaaacgtatcgaagcgattccacagatcgataaatacttgaagtcttctaaatatattgcttggcctctgcaaggctggcaggcaacgttcggtgggggagatcatccgccaaaatcagatctggtgccgcgtgggagccctggcatacaccgcgacggtggttctggtgagaacctgtactttcaaagctcagataatgggcctcaaaaccagcgcaacgctccacgtataaccttcggtggcccgtctgactccacaggcagcaaccagaatggtgagcgtagtggagccaggtctaagcagcgccgtccccagggtctgccgaacaacacggcgagctggtttactgcgcttacccaacacggtaaagaagacttaaaattcccgcgtggccagggcgtcccgatcaacactaactcttccccggatgatcagattggttattaccgcagagcaactcgtcggattcgcggcggcgacggtaaaatgaaagatttgtctccgcgttggtacttttactatctcggcaccggtccggaagctggactgccctacggggcaaagaaggacgggatcatttgggtggctaccgaaggtgccctgaatactccaaaagatcatatcggcacccgtaaccctgctaataacgctgcgatcgttctgcaactgcctcagggtacaactctgccaaaaggcttctatgcagaagggtcgcgtggtggcagccaggcgagtagccgtagcagctcccgctctcgcaactcgtcccgtaactccactccgggctcttctcgcggcacgtccccggctcgtatggcaggtaacggtggtgacgctgctctggcgctgctactgctggacaggctgaaccagctggagtcgaagatgagtggtaaaggccaacagcagcagggccagaccgttaccaaaaagagcgcagctgaagcatctaaaaaaccgcgacagaaacgtaccgcgactaaagcgtacaatgtaacacaggccttcggtcgtcgaggtccggagcaaactcaaggaaactttggcgatcaggaattaatccgccaggggaccgactacaaacactggccgcaaattgcccagttcgccccatccgctagtgcattcttcggtatgagccgcatcggcatggaagtaacgccaagtggtacgtggctgacctacaccggtgctatcaagcttgatgacaaggacccgaactttaaagaccaggttattctgcttaacaaacatattgatgcctataaaactttcccgccgaccgaacccaaaaaggacaaaaagaaaaaagctgatgaaacccaggctctaccgcagcgtcagaaaaaacagcaaactgtgactctgctgccagctgcggacctggatgatttttccaagcagctgcaacagtctatgagctctgcggactctacgcaggcttaa

SEQ ID NO: 450 - DNA, 2016 bp, Artificial Sequence
  Description of Artificial Sequence: Synthetic polynucleotide
atgcaccatcatcaccatcatggtggttctggttcgccgatacttggttattggaagattaaaggactggttcagcccacacgcctcctgctagaatacttagaggaaaaatatgaagagcacctgtacgaacgtgatgagggggacaaatggcgaaacaagaaatttgaattgggcttagaatttccaaatttgccgtattatatcgatggcgacgtaaaactgacccaatcaatggccattattcgctacatcgcagataaacataacatgctgggtggctgccctaaagaacgggctgagatctccatgctggaaggtgcggtgctcgacattcgctacggcgtcagtagaattgcgtatagcaaggatttcgaaactttaaaagtggatttcctgagcaaacttccggagatgctgaaaatgtttgaggataggctttgtcataagacgtatctcaatggtgatcatgttacccacccggactttatgctgtacgacgcccttgatgtcgttctgtatatggatcccatgtgcctggacgccttcccgaaattagtgtgttttaaaaaacgtatcgaagcgattccacagatcgataaatacttgaagtcttctaaatatattgcttggcctctgcaaggctggcaggcaacgttcggtgggggagatcatccgccaaaatcagatctggtgccgcgtgggagccctggcatacaccgcgacggtggttctggtgagaacctgtactttcaaagctcagataatgggcctcaaaaccagcgcaacgctccacgtataaccttcggtggcccgtctgactccacaggcagcaaccagaatggtgagcgtagtggagccaggtctaagcagcgccgtccccagggtctgccgaacaacacggcgagctggtttactgcgcttacccaacacggtaaagaagacttaaaattcccgcgtggccagggcgtcccgatcaacactaactcttccccggatgatcagattggttattaccgcagagcaactcgtcggattcgcggcggcgacggtaaaatgaaagatttgtctccgcgttggtacttttactatctcggcaccggtccggaagctggactgccctacggggcaaacaaggacgggatcatttgggtggctaccgaaggtgccctgaatactccaaaaggccatatcggcacccgtaaccctgctaataacgctgcgatcgttctgcaactgcctcagggtacaactctgccaaaaggcttctatgcagaagggtcgcgtggtggcagccaggcgagtagccgtagcagctcccgctctcgcaactcgtcccgtaactccactccgggctcttctcgcggcacgtccccggctcgtatggcaggtaacggtggtgacgctgctctggcgctgctactgctggacaggctgaaccagctggagtcgaagatgagtggtaaaggccaacagcagcagggccagaccgttaccaaaaagagcgcagctgaagcatctaaaaaaccgcgacagaaacgtaccgcgactaaagcgtacaatgtaacacaggccttcggtcgtcgaggtccggagcaaactcaaggaaactttggcgatcaggaattaatccgccaggggaccgactacaaacactggccgcaaattgcccagttcgccccatccgctagtgcattcttcggtatgagccgcatcggcatggaagtaacgccaagtggtacgtggctgacctacaccggtgctatcaagcttgatgacaaggacccgaactttaaagaccaggttattctgcttaacaaacatattgatgcctataaaactttcccgccgaccgaacccaaaaaggacaaaaagaaaaaagctgatgaaacccaggctctaccgcagcgtcagaaaaaacagcaaactgtgactctgctgccagctgcggacctggatgatttttccaagcagctgcaacagtctatgagctctgcggactctacgcaggcttaa

SEQ ID NO: 451 - DNA, 2016 bp, Artificial Sequence
  Description of Artificial Sequence: Synthetic polynucleotide
atgcaccatcatcaccatcatggtggttctggttcgccgatacttggttattggaagattaaaggactggttcagcccacacgcctcctgctagaatacttagaggaaaaatatgaagagcacctgtacgaacgtgatgagggggacaaatggcgaaacaagaaatttgaattgggcttagaatttccaaatttgccgtattatatcgatggcgacgtaaaactgacccaatcaatggccattattcgctacatcgcagataaacataacatgctgggtggctgccctaaagaacgggctgagatctccatgctggaaggtgcggtgctcgacattcgctacggcgtcagtagaattgcgtatagcaaggatttcgaaactttaaaagtggatttcctgagcaaacttccggagatgctgaaaatgtttgaggataggctttgtcataagacgtatctcaatggtgatcatgttacccacccggactttatgctgtacgacgcccttgatgtcgttctgtatatggatcccatgtgcctggacgccttcccgaaattagtgtgttttaaaaaacgtatcgaagcgattccacagatcgataaatacttgaagtcttctaaatatattgcttggcctctgcaaggctggcaggcaacgttcggtgggggagatcatccgccaaaatcagatctggtgccgcgtgggagccctggcatacaccgcgacggtggttctggtgagaacctgtactttcaaagctcagataatgggcctcaaaaccagcgcaacgctccacgtataaccttcggtggcccgtctgactccacaggcagcaaccagaatggtgagcgtagtggagccaggtctaagcagcgccgtccccagggtctgccgaacaacacggcgagctggtttactgcgcttacccaacacggtaaagaagacttaaaattcccgcgtggccagggcgtcccgatcaacactaactcttccccggatgatcagattggtgcataccgcagagcaactcgtcggattcgcggcggcgacggtaaaatgaaagatttgtctccgcgttggtacttttactatctcggcaccggtccggaagctggactgccctacggggcaaacaaggacgggatcatttgggtggctaccgaaggtgccctgaatactccaaaagatcatatcggcacccgtaaccctgctaataacgctgcgatcgttctgcaactgcctcagggtacaactctgccaaaaggcttctatgcagaagggtcgcgtggtggcagccaggcgagtagccgtagcagctcccgctctcgcaactcgtcccgtaactccactccgggctcttctcgcggcacgtccccggctcgtatggcaggtaacggtggtgacgctgctctggcgctgctactgctggacaggctgaaccagctggagtcgaagatgagtggtaaaggccaacagcagcagggccagaccgttaccaaaaagagcgcagctgaagcatctaaaaaaccgcgacagaaacgtaccgcgactaaagcgtacaatgtaacacaggccttcggtcgtcgaggtccggagcaaactcaaggaaactttggcgatcaggaattaatccgccaggggaccgactacaaacactggccgcaaattgcccagttcgccccatccgctagtgcattcttcggtatgagccgcatcggcatggaagtaacgccaagtggtacgtggctgacctacaccggtgctatcaagcttgatgacaaggacccgaactttaaagaccaggttattctgcttaacaaacatattgatgcctataaaactttcccgccgaccgaacccaaaaaggacaaaaagaaaaaagctgatgaaacccaggctctaccgcagcgtcagaaaaaacagcaaactgtgactctgctgccagctgcggacctggatgatttttccaagcagctgcaacagtctatgagctctgcggactctacgcaggcttaa

SEQ ID NO: 452 - DNA, 2016 bp, Artificial Sequence
  Description of Artificial Sequence: Synthetic polynucleotide
atgcaccatcatcaccatcatggtggttctggttcgccgatacttggttattggaagattaaaggactggttcagcccacacgcctcctgctagaatacttagaggaaaaatatgaagagcacctgtacgaacgtgatgagggggacaaatggcgaaacaagaaatttgaattgggcttagaatttccaaatttgccgtattatatcgatggcgacgtaaaactgacccaatcaatggccattattcgctacatcgcagataaacataacatgctgggtggctgccctaaagaacgggctgagatctccatgctggaaggtgcggtgctcgacattcgctacggcgtcagtagaattgcgtatagcaaggatttcgaaactttaaaagtggatttcctgagcaaacttccggagatgctgaaaatgtttgaggataggctttgtcataagacgtatctcaatggtgatcatgttacccacccggactttatgctgtacgacgcccttgatgtcgttctgtatatggatcccatgtgcctggacgccttcccgaaattagtgtgttttaaaaaacgtatcgaagcgattccacagatcgataaatacttgaagtcttctaaatatattgcttggcctctgcaaggctggcaggcaacgttcggtgggggagatcatccgccaaaatcagatctggtgccgcgtgggagccctggcatacaccgcgacggtggttctggtgagaacctgtactttcaaagctcagataatgggcctcaaaaccagcgcaacgctccacgtataaccttcggtggcccgtctgactccacaggcagcaaccagaatggtgagcgtagtggagccaggtctaagcagcgccgtccccagggtctgccgaacaacacggcgagctggtttactgcgcttacccaacacggtaaagaagacttaaaattcccgcgtggccagggcgtcccgatcaacactaactcttccccggatgatcagattggttattaccgcagagcaactcgtcggattcgcggcggcgacggtaaaatgaaagatttgtctccgcgttggtacttttactatctcggcaccggtccggaagctggactgccctacggggcaaacaaggacgggatcatttgggtggctaccgaaggtgccctgaatactccaaaagatcatatcggcacccgtaaccctgctaataacgctgcgatcgttctgcaactgcctcagggtacaactctgccaaaaggcttctataatgaagggtcgcgtggtggcagccaggcgagtagccgtagcagctcccgctctcgcaactcgtcccgtaactccactccgggctcttctcgcggcacgtccccggctcgtatggcaggtaacggtggtgacgctgctctggcgctgctactgctggacaggctgaaccagctggagtcgaagatgagtggtaaaggccaacagcagcagggccagaccgttaccaaaaagagcgcagctgaagcatctaaaaaaccgcgacagaaacgtaccgcgactaaagcgtacaatgtaacacaggccttcggtcgtcgaggtccggagcaaactcaaggaaactttggcgatcaggaattaatccgccaggggaccgactacaaacactggccgcaaattgcccagttcgccccatccgctagtgcattcttcggtatgagccgcatcggcatggaagtaacgccaagtggtacgtggctgacctacaccggtgctatcaagcttgatgacaaggacccgaactttaaagaccaggttattctgcttaacaaacatattgatgcctataaaactttcccgccgaccgaacccaaaaaggacaaaaagaaaaaagctgatgaaacccaggctctaccgcagcgtcagaaaaaacagcaaactgtgactctgctgccagctgcggacctggatgatttttccaagcagctgcaacagtctatgagctctgcggactctacgcaggcttaa

SEQ ID NO: 453 - DNA, 2016 bp, Artificial Sequence
  Description of Artificial Sequence: Synthetic polynucleotide
atgcaccatcatcaccatcatggtggttctggttcgccgatacttggttattggaagattaaaggactggttcagcccacacgcctcctgctagaatacttagaggaaaaatatgaagagcacctgtacgaacgtgatgagggggacaaatggcgaaacaagaaatttgaattgggcttagaatttccaaatttgccgtattatatcgatggcgacgtaaaactgacccaatcaatggccattattcgctacatcgcagataaacataacatgctgggtggctgccctaaagaacgggctgagatctccatgctggaaggtgcggtgctcgacattcgctacggcgtcagtagaattgcgtatagcaaggatttcgaaactttaaaagtggatttcctgagcaaacttccggagatgctgaaaatgtttgaggataggctttgtcataagacgtatctcaatggtgatcatgttacccacccggactttatgctgtacgacgcccttgatgtcgttctgtatatggatcccatgtgcctggacgccttcccgaaattagtgtgttttaaaaaacgtatcgaagcgattccacagatcgataaatacttgaagtcttctaaatatattgcttggcctctgcaaggctggcaggcaacgttcggtgggggagatcatccgccaaaatcagatctggtgccgcgtgggagccctggcatacaccgcgacggtggttctggtgagaacctgtactttcaaagctcagataatgggcctcaaaaccagcgcaacgctccacgtataaccttcggtggcccgtctgactccacaggcagcaaccagaatggtgagcgtagtggagccaggtctaagcagcgccgtccccagggtctgccgaacaacacggcgagctggtttactgcgcttacccaacacggtaaagaagacttaaaattcccgcgtggccagggcgtcccgatcaacaataactcttccccggatgatcagattggttattaccgcagagcaactcgtcggattcgcggcggcgacggtaaaatgaaagatttgtctccgcgttggtacttttactatctcggcaccggtccggaagctggactgccctacggggcaaacaaggacgggatcatttgggtggctaccgaaggtgccctgaatactccaaaagatcatatcggcacccgtaaccctgctaataacgctgcgatcgttctgcaactgcctcagggtacaactctgccaaaaggcttctatgcagaagggtcgcgtggtggcagccaggcgagtagccgtagcagctcccgctctcgcaactcgtcccgtaactccactccgggctcttctcgcggcacgtccccggctcgtatggcaggtaacggtggtgacgctgctctggcgctgctactgctggacaggctgaaccagctggagtcgaagatgagtggtaaaggccaacagcagcagggccagaccgttaccaaaaagagcgcagctgaagcatctaaaaaaccgcgacagaaacgtaccgcgactaaagcgtacaatgtaacacaggccttcggtcgtcgaggtccggagcaaactcaaggaaactttggcgatcaggaattaatccgccaggggaccgactacaaacactggccgcaaattgcccagttcgccccatccgctagtgcattcttcggtatgagccgcatcggcatggaagtaacgccaagtggtacgtggctgacctacaccggtgctatcaagcttgatgacaaggacccgaactttaaagaccaggttattctgcttaacaaacatattgatgcctataaaactttcccgccgaccgaacccaaaaaggacaaaaagaaaaaagctgatgaaacccaggctctaccgcagcgtcagaaaaaacagcaaactgtgactctgctgccagctgcggacctggatgatttttccaagcagctgcaacagtctatgagctctgcggactctacgcaggcttaa

SEQ ID NO: 454 - DNA, 2016 bp, Artificial Sequence
  Description of Artificial Sequence: Synthetic polynucleotide
atgcaccatcatcaccatcatggtggttctggttcgccgatacttggttattggaagattaaaggactggttcagcccacacgcctcctgctagaatacttagaggaaaaatatgaagagcacctgtacgaacgtgatgagggggacaaatggcgaaacaagaaatttgaattgggcttagaatttccaaatttgccgtattatatcgatggcgacgtaaaactgacccaatcaatggccattattcgctacatcgcagataaacataacatgctgggtggctgccctaaagaacgggctgagatctccatgctggaaggtgcggtgctcgacattcgctacggcgtcagtagaattgcgtatagcaaggatttcgaaactttaaaagtggatttcctgagcaaacttccggagatgctgaaaatgtttgaggataggctttgtcataagacgtatctcaatggtgatcatgttacccacccggactttatgctgtacgacgcccttgatgtcgttctgtatatggatcccatgtgcctggacgccttcccgaaattagtgtgttttaaaaaacgtatcgaagcgattccacagatcgataaatacttgaagtcttctaaatatattgcttggcctctgcaaggctggcaggcaacgttcggtgggggagatcatccgccaaaatcagatctggtgccgcgtgggagccctggcatacaccgcgacggtggttctggtgagaacctgtactttcaaagctcagataatgggcctcaaaaccagcgcaacgctccacgtataaccttcggtggcccgtctgactccacaggcagcaaccagaatggtgagcgtagtggagccaggtctaagcagcgccgtccccagggtctgccgaacaacacggcgagctggtttactgcgcttacccaacacggtaaagaagacttaaaattcccgcgtggccagggcgtcccgatcaacactaactcttccccggatgatcagattggttattaccgcagagcaactcgtcggattcgcggcggcgacggtaaaatgaaagatttgtctccgcgttggtacttttactatctcggcaccggtccggaagctggactgccctacggggcaaacaaggacgggatcatttgggtggctaccgaaggtgccctgaatactccaaaagatcatatcggcacccgtaaccctgctaataacgctgcgatcgttctgcgactgcctcagggtacaactctgccaaaaggcttctatgcagaagggtcgcgtggtggcagccaggcgagtagccgtagcagctcccgctctcgcaactcgtcccgtaactccactccgggctcttctcgcggcacgtccccggctcgtatggcaggtaacggtggtgacgctgctctggcgctgctactgctggacaggctgaaccagctggagtcgaagatgagtggtaaaggccaacagcagcagggccagaccgttaccaaaaagagcgcagctgaagcatctaaaaaaccgcgacagaaacgtaccgcgactaaagcgtacaatgtaacacaggccttcggtcgtcgaggtccggagcaaactcaaggaaactttggcgatcaggaattaatccgccaggggaccgactacaaacactggccgcaaattgcccagttcgccccatccgctagtgcattcttcggtatgagccgcatcggcatggaagtaacgccaagtggtacgtggctgacctacaccggtgctatcaagcttgatgacaaggacccgaactttaaagaccaggttattctgcttaacaaacatattgatgcctataaaactttcccgccgaccgaacccaaaaaggacaaaaagaaaaaagctgatgaaacccaggctctaccgcagcgtcagaaaaaacagcaaactgtgactctgctgccagctgcggacctggatgatttttccaagcagctgcaacagtctatgagctctgcggactctacgcaggcttaa

SEQ ID NO: 455 - DNA, 2016 bp, Artificial Sequence
  Description of Artificial Sequence: Synthetic polynucleotide
atgcaccatcatcaccatcatggtggttctggttcgccgatacttggttattggaagattaaaggactggttcagcccacacgcctcctgctagaatacttagaggaaaaatatgaagagcacctgtacgaacgtgatgagggggacaaatggcgaaacaagaaatttgaattgggcttagaatttccaaatttgccgtattatatcgatggcgacgtaaaactgacccaatcaatggccattattcgctacatcgcagataaacataacatgctgggtggctgccctaaagaacgggctgagatctccatgctggaaggtgcggtgctcgacattcgctacggcgtcagtagaattgcgtatagcaaggatttcgaaactttaaaagtggatttcctgagcaaacttccggagatgctgaaaatgtttgaggataggctttgtcataagacgtatctcaatggtgatcatgttacccacccggactttatgctgtacgacgcccttgatgtcgttctgtatatggatcccatgtgcctggacgccttcccgaaattagtgtgttttaaaaaacgtatcgaagcgattccacagatcgataaatacttgaagtcttctaaatatattgcttggcctctgcaaggctggcaggcaacgttcggtgggggagatcatccgccaaaatcagatctggtgccgcgtgggagccctggcatacaccgcgacggtggttctggtgagaacctgtactttcaaagctcagataatgggcctcaaaaccagcgcaacgctccacgtataaccttcggtggcccgtctgactccacaggcagcaaccagaatggtgagcgtagtggagccaggtctaagcagcgccgtccccagggtctgccgaacaacacggcgagctggtttactccgcttacccaaaatggtaaagaagacttaaaattcccgcctggccagggcgtcccgatcaacactaactcttccccggatgatcagattggttattaccgcagagcaactcgtcggattcgcggcggcgacggtaaaatgaaagatttgccaccgaaatggtacttttactatctcggcaccggtccgcatgctgatctgccctacgggcaaaagcaacctggggttttttgggtggctcggcctggtgccctgaatactccaaaagatcatatcggcacccgtaaccctgctaataacgctgcgatcccgctgcaactgcctcccggtacaaaactgccaaaaggcttctatgcagaagggtcgcgtggtggcagccaggcgagtagccgtagcagctcccgctctcgcaactcgtcccgtaactccactccgggctcttctcgcggcacgtccccggctcgtatggcaggtaacggtggtgacgctgctctggcgctgctactgctggacaggctgaaccagctggagtcgaagatgagtggtaaaggccaacagcagcagggccagaccgttaccaaaaagagcgcagctgaagcatctaaaaaaccgcgacagaaacgtaccgcgactaaagcgtacaatgtaacacaggccttcggtcgtcgaggtccggagcaaactcaaggaaactttggcgatcaggaattaatccgccaggggaccgactacaaacactggccgcaaattgcccagttcgccccatccgctagtgcattcttcggtatgagccgcatcggcatggaagtaacgccaagtggtacgtggctgacctacaccggtgctatcaagcttgatgacaaggacccgaactttaaagaccaggttattctgcttaacaaacatattgatgcctataaaactttcccgccgaccgaacccaaaaaggacaaaaagaaaaaagctgatgaaacccaggctctaccgcagcgtcagaaaaaacagcaaactgtgactctgctgccagctgcggacctggatgatttttccaagcagctgcaacagtctatgagctctgcggactctacgcaggcttaa

SEQ ID NO: 456 - DNA, 2016 bp, Artificial Sequence
  Description of Artificial Sequence: Synthetic polynucleotide
atgcaccatcatcaccatcatggtggttctggttcgccgatacttggttattggaagattaaaggactggttcagcccacacgcctcctgctagaatacttagaggaaaaatatgaagagcacctgtacgaacgtgatgagggggacaaatggcgaaacaagaaatttgaattgggcttagaatttccaaatttgccgtattatatcgatggcgacgtaaaactgacccaatcaatggccattattcgctacatcgcagataaacataacatgctgggtggctgccctaaagaacgggctgagatctccatgctggaaggtgcggtgctcgacattcgctacggcgtcagtagaattgcgtatagcaaggatttcgaaactttaaaagtggatttcctgagcaaacttccggagatgctgaaaatgtttgaggataggctttgtcataagacgtatctcaatggtgatcatgttacccacccggactttatgctgtacgacgcccttgatgtcgttctgtatatggatcccatgtgcctggacgccttcccgaaattagtgtgttttaaaaaacgtatcgaagcgattccacagatcgataaatacttgaagtcttctaaatatattgcttggcctctgcaaggctggcaggcaacgttcggtgggggagatcatccgccaaaatcagatctggtgccgcgtgggagccctggcatacaccgcgacggtggttctggtgagaacctgtactttcaaagctcagataatgggcctcaaaaccagcgcaacgctccacgtataaccttcggtggcccgtctgactccacaggcagcaaccagaatggtgagcgtagtggagccaggtctaagcagcgccgtccccagggtctgccgaacaacacggcgagctggtttactgcgcttacccaacacggtaaagaagacttaaaattcccgccaggccagggcgtcccgatcaacccgaactctaaaccggatgatcagattggttattaccgcagacaaactcgtcggtatcgcggcggcgacggtcagatgaaagatttgcctccgcgttggtacttttactatctcggcaccggtccggaagctggactgccctacggggcaaacaaggacgggatcatttgggtggctaccgaaggtgccctgaatactccaaaagatcatatcggcacccgtaaccctgctaataacgctgcgatcgttctgcaactgcctcagggtacaactctgccaaaaggcttctatgcagaagggtcgcgtggtggcagccaggcgagtagccgtagcagctcccgctctcgcaactcgtcccgtaactccactccgggctcttctcgcggcacgtccccggctcgtatggcaggtaacggtggtgacgctgctctggcgctgctactgctggacaggctgaaccagctggagtcgaagatgagtggtaaaggccaacagcagcagggccagaccgttaccaaaaagagcgcagctgaagcatctaaaaaaccgcgacagaaacgtaccgcgactaaagcgtacaatgtaacacaggccttcggtcgtcgaggtccggagcaaactcaaggaaactttggcgatcaggaattaatccgccaggggaccgactacaaacactggccgcaaattgcccagttcgccccatccgctagtgcattcttcggtatgagccgcatcggcatggaagtaacgccaagtggtacgtggctgacctacaccggtgctatcaagcttgatgacaaggacccgaactttaaagaccaggttattctgcttaacaaacatattgatgcctataaaactttcccgccgaccgaacccaaaaaggacaaaaagaaaaaagctgatgaaacccaggctctaccgcagcgtcagaaaaaacagcaaactgtgactctgctgccagctgcggacctggatgatttttccaagcagctgcaacagtctatgagctctgcggactctacgcaggcttaa

SEQ ID NO: 457 - DNA, 2016 bp, Artificial Sequence
  Description of Artificial Sequence: Synthetic polynucleotide
atgcaccatcatcaccatcatggtggttctggttcgccgatacttggttattggaagattaaaggactggttcagcccacacgcctcctgctagaatacttagaggaaaaatatgaagagcacctgtacgaacgtgatgagggggacaaatggcgaaacaagaaatttgaattgggcttagaatttccaaatttgccgtattatatcgatggcgacgtaaaactgacccaatcaatggccattattcgctacatcgcagataaacataacatgctgggtggctgccctaaagaacgggctgagatctccatgctggaaggtgcggtgctcgacattcgctacggcgtcagtagaattgcgtatagcaaggatttcgaaactttaaaagtggatttcctgagcaaacttccggagatgctgaaaatgtttgaggataggctttgtcataagacgtatctcaatggtgatcatgttacccacccggactttatgctgtacgacgcccttgatgtcgttctgtatatggatcccatgtgcctggacgccttcccgaaattagtgtgttttaaaaaacgtatcgaagcgattccacagatcgataaatacttgaagtcttctaaatatattgcttggcctctgcaaggctggcaggcaacgttcggtgggggagatcatccgccaaaatcagatctggtgccgcgtgggagccctggcatacaccgcgacggtggttctggtgagaacctgtactttcaaagctcagataatgggcctcaaaaccagcgcaacgctccacgtataaccttcggtggcccgtctgactccacaggcagcaaccagaatggtgagcgtagtggagccaggtctaagcagcgccgtccccagggtctgccgaacaacacggcgagctggtttactgcgcttacccaacacggtaaagaagacttaaaattcccgcgtggccagggcgtcccgatcaacactaactcttccccggatgatcagattggttattaccgcagagcaactcgtcggattcgcggcggcgacggtaaaatgaaagatttgtctccgcgttggtacttttactatctcggcaccggtccggaagctggactgccctacggggcaaacaaggacgggatcatttgggtggctaccgaaggtgccctgaatactccaaaagatcatatcggcacccgtaaccctgctaataacgctgcgatcgttctgcaactgcctcagggtacaactctgccaaaaggcttctatgcagaagggtcgcgtggtggcagccaggcgagtagccgtagcagctcccgctctcgcaactcgtcccgtaactccactccgggctcttctcgcggcacgtccccggctcgtatggcaggtaacggtggtgacgctgctctggcgctgctactgctggacaggctgaaccagctggagtcgaagatgagtggtaaaggccaacagcagcagggccagaccgttaccaaaaagagcgcagctgaagcatctaaaaaaccgcgacagaaacgtaccgcgactaaagcgtacaatgtaacacaggccttcggtcgtcgaggtccggagcaaactcaaggaaactttggcgatcaggaattaatccgccaggggaccgactacaaacactggccgcaaattgcccagttcgccccatccgctagtgcattcttcggtatgagccgcatcggcatggaagtaacgccaagtggtatttggctgacctacaccggtgctatcaagcttgatgacaaggacccgaactttaaagaccaggttattctgcttaacaaacatattgatgcctataaaactttcccgccgaccgaacccaaaaaggacaaaaagaaaaaagctgatgaaacccaggctctaccgcagcgtcagaaaaaacagcaaactgtgactctgctgccagctgcggacctggatgatttttccaagcagctgcaacagtctatgagctctgcggactctacgcaggcttaa

SEQ ID NO: 458 - DNA, 2016 bp, Artificial Sequence
  Description of Artificial Sequence: Synthetic polynucleotide
atgcaccatcatcaccatcatggtggttctggttcgccgatacttggttattggaagattaaaggactggttcagcccacacgcctcctgctagaatacttagaggaaaaatatgaagagcacctgtacgaacgtgatgagggggacaaatggcgaaacaagaaatttgaattgggcttagaatttccaaatttgccgtattatatcgatggcgacgtaaaactgacccaatcaatggccattattcgctacatcgcagataaacataacatgctgggtggctgccctaaagaacgggctgagatctccatgctggaaggtgcggtgctcgacattcgctacggcgtcagtagaattgcgtatagcaaggatttcgaaactttaaaagtggatttcctgagcaaacttccggagatgctgaaaatgtttgaggataggctttgtcataagacgtatctcaatggtgatcatgttacccacccggactttatgctgtacgacgcccttgatgtcgttctgtatatggatcccatgtgcctggacgccttcccgaaattagtgtgttttaaaaaacgtatcgaagcgattccacagatcgataaatacttgaagtcttctaaatatattgcttggcctctgcaaggctggcaggcaacgttcggtgggggagatcatccgccaaaatcagatctggtgccgcgtgggagccctggcatacaccgcgacggtggttctggtgagaacctgtactttcaaagctcagataatgggcctcaaaaccagcgcaacgctccacgtataaccttcggtggcccgtctgactccacaggcagcaaccagaatggtgagcgtagtggagccaggtctaagcagcgccgtccccagggtctgccgaacaacacggcgagctggtttactgcgcttacccaacacggtaaagaagacttaaaattcccgcgtggccagggcgtcccgatcaacactaactcttccccggatgatcagattggttattaccgcagagcaactcgtcggattcgcggcggcgacggtaaaatgaaagatttgtctccgcgttggtacttttactatctcggcaccggtccggaagctggactgccctacggggcaaacaaggacgggatcatttgggtggctaccgaaggtgccctgaatactccaaaagatcatatcggcacccgtaaccctgctaataacgctgcgatcgttctgcaactgcctcagggtacaactctgccaaaaggcttctatgcagaagggtcgcgtggtggcagccaggcgagtagccgtagcagctcccgctctcgcaactcgtcccgtaactccactccgggctcttctcgcggcacgtccccggctcgtatggcaggtaacggtggtgacgctgctctggcgctgctactgctggacaggctgaaccagctggagtcgaagatgagtggtaaaggccaacagcagcagggccagaccgttaccaaaaagagcgcagctgaagcatctaaaaaaccgcgacagaaacgtaccgcgactaaatcatacaatgtaacacaggccttcggtcgtcgaggtccggagcaaactcaaggaaactttggcgatcaggaattaatccgccaggggaccgactacaaacactggccgcaaattgcccagttcgccccatccgctagtgcattcttcggtatgagccgcatcggcatggaagtaacgccaagtggtacgtggctgacctacaccggtgctatcaagcttgatgacaaggacccgaactttaaagaccaggttattctgcttaacaaacatattgatgcctataaaactttcccgccgaccgaacccaaaaaggacaaaaagaaaaaagctgatgaaacccaggctctaccgcagcgtcagaaaaaacagcaaactgtgactctgctgccagctgcggacctggatgatttttccaagcagctgcaacagtctatgagctctgcggactctacgcaggcttaa

SEQ ID NO: 459 - DNA, 2016 bp, Artificial Sequence
  Description of Artificial Sequence: Synthetic polynucleotide
atgcaccatcatcaccatcatggtggttctggttcgccgatacttggttattggaagattaaaggactggttcagcccacacgcctcctgctagaatacttagaggaaaaatatgaagagcacctgtacgaacgtgatgagggggacaaatggcgaaacaagaaatttgaattgggcttagaatttccaaatttgccgtattatatcgatggcgacgtaaaactgacccaatcaatggccattattcgctacatcgcagataaacataacatgctgggtggctgccctaaagaacgggctgagatctccatgctggaaggtgcggtgctcgacattcgctacggcgtcagtagaattgcgtatagcaaggatttcgaaactttaaaagtggatttcctgagcaaacttccggagatgctgaaaatgtttgaggataggctttgtcataagacgtatctcaatggtgatcatgttacccacccggactttatgctgtacgacgcccttgatgtcgttctgtatatggatcccatgtgcctggacgccttcccgaaattagtgtgttttaaaaaacgtatcgaagcgattccacagatcgataaatacttgaagtcttctaaatatattgcttggcctctgcaaggctggcaggcaacgttcggtgggggagatcatccgccaaaatcagatctggtgccgcgtgggagccctggcatacaccgcgacggtggttctggtgagaacctgtactttcaaagctcagataatgggcctcaaaaccagcgcaacgctccacgtataaccttcggtggcccgtctgactccacaggcagcaaccagaatggtgagcgtagtggagccaggtctaagcagcgccgtccccagggtctgccgaacaacacggcgagctggtttactgcgcttacccaacacggtaaagaagacttaaaattcccgcgtggccagggcgtcccgatcaacactaactcttccccggatgatcagattggttattaccgcagagcaactcgtcggattcgcggcggcgacggtaaaatgaaagatttgtctccgcgttggtacttttactatctcggcaccggtccggaagctggactgccctacggggcaaacaaggacgggatcatttgggtggctaccgaaggtgccctgaatactccaaaagatcatatcggcacccgtaaccctgctaataacgctgcgatcgttctgcaactgcctcagggtacaactctgccaaaaggcttctatgcagaagggtcgcgtggtggcagccaggcgagtagccgtagcagctcccgctctcgcaactcgtcccgtaactccactccgggctcttctcgcggcacgtccccggctcgtatggcaggtaacggtggtgacgctgctctggcgctgctactgctggacaggctgaaccagctggagtcgaagatgagtggtaaaggccaacagcagcagggccagaccgttaccaaaaagagcgcagctgaagcatctaaaaaaccgcgacagaaacgtaccgcgactaaagcgtacaatgtaacacaggccttcggtcgtcgaggtccggagcaaactcaaggaaactttggcgatcaggaattaatccgccaggggaccgactacaaacactggccgcaaattgcccagttcgccccatccgctagtgcattcttcggtatgagccgcatcggcatgaaagtaacgccaagtggtacgtggctgacctacaccggtgctatcaagcttgatgacaaggacccgaactttaaagaccaggttattctgcttaacaaacatattgatgcctataaaactttcccgccgaccgaacccaaaaaggacaaaaagaaaaaagctgatgaaacccaggctctaccgcagcgtcagaaaaaacagcaaactgtgactctgctgccagctgcggacctggatgatttttccaagcagctgcaacagtctatgagctctgcggactctacgcaggcttaa

SEQ ID NO: 460 - DNA, 2016 bp, Artificial Sequence
  Description of Artificial Sequence: Synthetic polynucleotide
atgcaccatcatcaccatcatggtggttctggttcgccgatacttggttattggaagattaaaggactggttcagcccacacgcctcctgctagaatacttagaggaaaaatatgaagagcacctgtacgaacgtgatgagggggacaaatggcgaaacaagaaatttgaattgggcttagaatttccaaatttgccgtattatatcgatggcgacgtaaaactgacccaatcaatggccattattcgctacatcgcagataaacataacatgctgggtggctgccctaaagaacgggctgagatctccatgctggaaggtgcggtgctcgacattcgctacggcgtcagtagaattgcgtatagcaaggatttcgaaactttaaaagtggatttcctgagcaaacttccggagatgctgaaaatgtttgaggataggctttgtcataagacgtatctcaatggtgatcatgttacccacccggactttatgctgtacgacgcccttgatgtcgttctgtatatggatcccatgtgcctggacgccttcccgaaattagtgtgttttaaaaaacgtatcgaagcgattccacagatcgataaatacttgaagtcttctaaatatattgcttggcctctgcaaggctggcaggcaacgttcggtgggggagatcatccgccaaaatcagatctggtgccgcgtgggagccctggcatacaccgcgacggtggttctggtgagaacctgtactttcaaagctcagataatgggcctcaaaaccagcgcaacgctccacgtataaccttcggtggcccgtctgactccacaggcagcaaccagaatggtgagcgtagtggagccaggtctaagcagcgccgtccccagggtctgccgaacaacacggcgagctggtttactgcgcttacccaacacggtaaagaagacttaaaattcccgcgtggccagggcgtcccgatcaacactaactcttccccggatgatcagattggttattaccgcagagcaactcgtcggattcgcggcggcgacggtaaaatgaaagatttgtctccgcgttggtacttttactatctcggcaccggtccggaagctggactgccctacggggcaaacaaggacgggatcatttgggtggctaccgaaggtgccctgaatactccaaaagatcatatcggcacccgtaaccctgctaataacgctgcgatcgttctgcaactgcctcagggtacaactctgccaaaaggcttctatgcagaagggtcgcgtggtggcagccaggcgagtagccgtagcagctcccgctctcgcaactcgtcccgtaactccactccgggctcttctcgcggcacgtccccggctcgtatggcaggtaacggtggtgacgctgctctggcgctgctactgctggacaggctgaaccagctggagtcgaagatgagtggtaaaggccaacagcagcagggccagaccgttaccaaaaagagcgcagctgaagcatctaaaaaaccgcgacagaaacgtaccgcgactaaagcgtacaatgtaacacaggccttcggtcgtcgaggtccggagcaaactcaaggaaactttggcgatcaggaattaatccgccaggggaccgactacaaacactggccgcaaattgcccagttcgccccatccgtgagtgcattcttcggtatgagccgcatcggcatggaagtaacgccaagtggtacgtggctgacctacaccggtgctatcaagcttgatgacaaggacccgaactttaaagaccaggttattctgcttaacaaacatattgatgcctataaaactttcccgccgaccgaacccaaaaaggacaaaaagaaaaaagctgatgaaacccaggctctaccgcagcgtcagaaaaaacagcaaactgtgactctgctgccagctgcggacctggatgatttttccaagcagctgcaacagtctatgagctctgcggactctacgcaggcttaa

SEQ ID NO: 461 - DNA, 2016 bp, Artificial Sequence
  Description of Artificial Sequence: Synthetic polynucleotide
atgcaccatcatcaccatcatggtggttctggttcgccgatacttggttattggaagattaaaggactggttcagcccacacgcctcctgctagaatacttagaggaaaaatatgaagagcacctgtacgaacgtgatgagggggacaaatggcgaaacaagaaatttgaattgggcttagaatttccaaatttgccgtattatatcgatggcgacgtaaaactgacccaatcaatggccattattcgctacatcgcagataaacataacatgctgggtggctgccctaaagaacgggctgagatctccatgctggaaggtgcggtgctcgacattcgctacggcgtcagtagaattgcgtatagcaaggatttcgaaactttaaaagtggatttcctgagcaaacttccggagatgctgaaaatgtttgaggataggctttgtcataagacgtatctcaatggtgatcatgttacccacccggactttatgctgtacgacgcccttgatgtcgttctgtatatggatcccatgtgcctggacgccttcccgaaattagtgtgttttaaaaaacgtatcgaagcgattccacagatcgataaatacttgaagtcttctaaatatattgcttggcctctgcaaggctggcaggcaacgttcggtgggggagatcatccgccaaaatcagatctggtgccgcgtgggagccctggcatacaccgcgacggtggttctggtgagaacctgtactttcaaagctcagataatgggcctcaaaaccagcgcaacgctccacgtataaccttcggtggcccgtctgactccacaggcagcaaccagaatggtgagcgtagtggagccaggtctaagcagcgccgtccccagggtctgccgaacaacacggcgagctggtttactgcgcttacccaacacggtaaagaagacttaaaattcccgcgtggccagggcgtcccgatcaacactaactcttccccggatgatcagattggttattaccgcagagcaactcgtcggattcgcggcggcgacggtaaaatgaaagatttgtctccgcgttggtacttttactatctcggcaccggtccggaagctggactgccctacggggcaaacaaggacgggatcatttgggtggctaccgaaggtgccctgaatactccaaaagatcatatcggcacccgtaaccctgctaataacgctgcgatcgttctgcaactgcctcagggtacaactctgccaaaaggcttctatgcagaagggtcgcgtggtggcagccaggcgagtagccgtagcagctcccgctctcgcaactcgtcccgtaactccactccgggctcttctcgcggcacgtccccggctcgtatggcaggtaacggtggtgacgctgctctggcgctgctactgctggacaggctgaaccagctggagtcgaagatgagtggtaaaggccaacagcagcagggccagaccgttaccaaaaagagcgcagctgaagcatctaaaaaaccgcgacagaaacgtaccgcgactaaagcgtacaatgtaacacaggccttcggtcgtcgaggtccggagcaaactcaaggaaactttggcgatcaggaattaatccgccaggggaccgactacccacactggccgcaaattgcccagttcgccccatccgctagtgcattcttcggtatgagccgcatcggcatggaagtaacgccaagtggtacgtggctgacctacaccggtgctatcaagcttgatgacaaggacccgaactttaaagaccaggttattctgcttaacaaacatattgatgcctataaaactttcccgccgaccgaacccaaaaaggacaaaaagaaaaaagctgatgaaacccaggctctaccgcagcgtcagaaaaaacagcaaactgtgactctgctgccagctgcggacctggatgatttttccaagcagctgcaacagtctatgagctctgcggactctacgcaggcttaa

SEQ ID NO: 462 - DNA, 2016 bp, Artificial Sequence
  Description of Artificial Sequence: Synthetic polynucleotide
atgcaccatcatcaccatcatggtggttctggttcgccgatacttggttattggaagattaaaggactggttcagcccacacgcctcctgctagaatacttagaggaaaaatatgaagagcacctgtacgaacgtgatgagggggacaaatggcgaaacaagaaatttgaattgggcttagaatttccaaatttgccgtattatatcgatggcgacgtaaaactgacccaatcaatggccattattcgctacatcgcagataaacataacatgctgggtggctgccctaaagaacgggctgagatctccatgctggaaggtgcggtgctcgacattcgctacggcgtcagtagaattgcgtatagcaaggatttcgaaactttaaaagtggatttcctgagcaaacttccggagatgctgaaaatgtttgaggataggctttgtcataagacgtatctcaatggtgatcatgttacccacccggactttatgctgtacgacgcccttgatgtcgttctgtatatggatcccatgtgcctggacgccttcccgaaattagtgtgttttaaaaaacgtatcgaagcgattccacagatcgataaatacttgaagtcttctaaatatattgcttggcctctgcaaggctggcaggcaacgttcggtgggggagatcatccgccaaaatcagatctggtgccgcgtgggagccctggcatacaccgcgacggtggttctggtgagaacctgtactttcaaagctcagataatgggcctcaaaaccagcgcaacgctccacgtataaccttcggtggcccgtctgactccacaggcagcaaccagaatggtgagcgtagtggagccaggtctaagcagcgccgtccccagggtctgccgaacaacacggcgagctggtttactgcgcttacccaacacggtaaagaagacttaaaattcccgcgtggccagggcgtcccgatcaacactaactcttccccggatgatcagattggttattaccgcagagcaactcgtcggattcgcggcggcgacggtaaaatgaaagatttgtctccgcgttggtacttttactatctcggcaccggtccggaagctggactgccctacggggcaaacaaggacgggatcatttgggtggctaccgaaggtgccctgaatactccaaaagatcatatcggcacccgtaaccctgctaataacgctgcggaggttctgcaactgcctcagggtacaactctgccaaaaggcttctatgcagaagggtcgcgtggtggcagccaggcgagtagccgtagcagctcccgctctcgcaactcgtcccgtaactccactccgggctcttctcgcggcacgtccccggctcgtatggcaggtaacggtggtgacgctgctctggcgctgctactgctggacaggctgaaccagctggagtcgaagatgagtggtaaaggccaacagcagcagggccagaccgttaccaaaaagagcgcagctgaagcatctaaaaaaccgcgacagaaacgtaccgcgactaaagcgtacaatgtaacacaggccttcggtcgtcgaggtccggagcaaactcaaggaaactttggcgatcaggaattaatccgccaggggaccgactacaaacactggccgcaaattgcccagttcgccccatccgctagtgcattcttcggtatgagccgcatcggcatggaagtaacgccaagtggtacgtggctgacctacaccggtgctatcaagcttgatgacaaggacccgaactttaaagaccaggttattctgcttaacaaacatattgatgcctataaaactttcccgccgaccgaacccaaaaaggacaaaaagaaaaaagctgatgaaacccaggctctaccgcagcgtcagaaaaaacagcaaactgtgactctgctgccagctgcggacctggatgatttttccaagcagctgcaacagtctatgagctctgcggactctacgcaggcttaa

SEQ ID NO: 463 - DNA, 2016 bp, Artificial Sequence
  Description of Artificial Sequence: Synthetic polynucleotide
atgcaccatcatcaccatcatggtggttctggttcgccgatacttggttattggaagattaaaggactggttcagcccacacgcctcctgctagaatacttagaggaaaaatatgaagagcacctgtacgaacgtgatgagggggacaaatggcgaaacaagaaatttgaattgggcttagaatttccaaatttgccgtattatatcgatggcgacgtaaaactgacccaatcaatggccattattcgctacatcgcagataaacataacatgctgggtggctgccctaaagaacgggctgagatctccatgctggaaggtgcggtgctcgacattcgctacggcgtcagtagaattgcgtatagcaaggatttcgaaactttaaaagtggatttcctgagcaaacttccggagatgctgaaaatgtttgaggataggctttgtcataagacgtatctcaatggtgatcatgttacccacccggactttatgctgtacgacgcccttgatgtcgttctgtatatggatcccatgtgcctggacgccttcccgaaattagtgtgttttaaaaaacgtatcgaagcgattccacagatcgataaatacttgaagtcttctaaatatattgcttggcctctgcaaggctggcaggcaacgttcggtgggggagatcatccgccaaaatcagatctggtgccgcgtgggagccctggcatacaccgcgacggtggttctggtgagaacctgtactttcaaagctcagataatgggcctcaaaaccagcgcaacgctccacgtataaccttcggtggcccgtctgactccacaggcagcaaccagaatggtgagcgtagtggagccaggtctaagcagcgccgtccccagggtctgccgaacaacacggcgagctggtttactgcgcttacccaacacggtaaagaagacttaaaattcccgcgtggccagggcgtcccgatcaacactaactcttccccggatgatcagattggttattaccgcagaaaaactcgtcggattcgcggcggcgacggtaaaatgaaagatttgtctccgcgttggtacttttactatctcggcaccggtccggaagctggactgccctacggggcaaacaaggacgggatcatttgggtggctaccgaaggtgccctgaatactccaaaagatcatatcggcacccgtaaccctgctaataacgctgcgatcgttctgcaactgcctcagggtacaactctgccaaaaggcttctatgcagaagggtcgcgtggtggcagccaggcgagtagccgtagcagctcccgctctcgcaactcgtcccgtaactccactccgggctcttctcgcggcacgtccccggctcgtatggcaggtaacggtggtgacgctgctctggcgctgctactgctggacaggctgaaccagctggagtcgaagatgagtggtaaaggccaacagcagcagggccagaccgttaccaaaaagagcgcagctgaagcatctaaaaaaccgcgacagaaacgtaccgcgactaaagcgtacaatgtaacacaggccttcggtcgtcgaggtccggagcaaactcaaggaaactttggcgatcaggaattaatccgccaggggaccgactacaaacactggccgcaaattgcccagttcgccccatccgctagtgcattcttcggtatgagccgcatcggcatggaagtaacgccaagtggtacgtggctgacctacaccggtgctatcaagcttgatgacaaggacccgaactttaaagaccaggttattctgcttaacaaacatattgatgcctataaaactttcccgccgaccgaacccaaaaaggacaaaaagaaaaaagctgatgaaacccaggctctaccgcagcgtcagaaaaaacagcaaactgtgactctgctgccagctgcggacctggatgatttttccaagcagctgcaacagtctatgagctctgcggactctacgcaggcttaa

SEQ ID NO: 464 - DNA, 2016 bp, Artificial Sequence
  Description of Artificial Sequence: Synthetic polynucleotide
atgcaccatcatcaccatcatggtggttctggttcgccgatacttggttattggaagattaaaggactggttcagcccacacgcctcctgctagaatacttagaggaaaaatatgaagagcacctgtacgaacgtgatgagggggacaaatggcgaaacaagaaatttgaattgggcttagaatttccaaatttgccgtattatatcgatggcgacgtaaaactgacccaatcaatggccattattcgctacatcgcagataaacataacatgctgggtggctgccctaaagaacgggctgagatctccatgctggaaggtgcggtgctcgacattcgctacggcgtcagtagaattgcgtatagcaaggatttcgaaactttaaaagtggatttcctgagcaaacttccggagatgctgaaaatgtttgaggataggctttgtcataagacgtatctcaatggtgatcatgttacccacccggactttatgctgtacgacgcccttgatgtcgttctgtatatggatcccatgtgcctggacgccttcccgaaattagtgtgttttaaaaaacgtatcgaagcgattccacagatcgataaatacttgaagtcttctaaatatattgcttggcctctgcaaggctggcaggcaacgttcggtgggggagatcatccgccaaaatcagatctggtgccgcgtgggagccctggcatacaccgcgacggtggttctggtgagaacctgtactttcaaagctcagataatgggcctcaaaaccagcgcaacgctccacgtataaccttcggtggcccgtctgactccacaggcagcaaccagaatggtgagcgtagtggagccaggtctaagcagcgccgtccccagggtctgccgaacaacacggcgagctggtttactgcgcttacccaacacggtaaagaagacttaaaattcccgcgtggccagggcgtcccgatcaacactaactcttccccggatgatcagattggttattggcgcagagcaactcgtcggattcgcggcggcgacggtaaaatgaaagatttgtctccgcgttggtacttttactatctcggcaccggtccggaagctggactgccctacggggcaaacaaggacgggatcatttgggtggctaccgaaggtgccctgaatactccaaaagatcatatcggcacccgtaaccctgctaataacgctgcgatcgttctgcaactgcctcagggtacaactctgccaaaaggcttctatgcagaagggtcgcgtggtggcagccaggcgagtagccgtagcagctcccgctctcgcaactcgtcccgtaactccactccgggctcttctcgcggcacgtccccggctcgtatggcaggtaacggtggtgacgctgctctggcgctgctactgctggacaggctgaaccagctggagtcgaagatgagtggtaaaggccaacagcagcagggccagaccgttaccaaaaagagcgcagctgaagcatctaaaaaaccgcgacagaaacgtaccgcgactaaagcgtacaatgtaacacaggccttcggtcgtcgaggtccggagcaaactcaaggaaactttggcgatcaggaattaatccgccaggggaccgactacaaacactggccgcaaattgcccagttcgccccatccgctagtgcattcttcggtatgagccgcatcggcatggaagtaacgccaagtggtacgtggctgacctacaccggtgctatcaagcttgatgacaaggacccgaactttaaagaccaggttattctgcttaacaaacatattgatgcctataaaactttcccgccgaccgaacccaaaaaggacaaaaagaaaaaagctgatgaaacccaggctctaccgcagcgtcagaaaaaacagcaaactgtgactctgctgccagctgcggacctggatgatttttccaagcagctgcaacagtctatgagctctgcggactctacgcaggcttaa

SEQ ID NO: 465 - DNA, 2016 bp, Artificial Sequence
  Description of Artificial Sequence: Synthetic polynucleotide
atgcaccatcatcaccatcatggtggttctggttcgccgatacttggttattggaagattaaaggactggttcagcccacacgcctcctgctagaatacttagaggaaaaatatgaagagcacctgtacgaacgtgatgagggggacaaatggcgaaacaagaaatttgaattgggcttagaatttccaaatttgccgtattatatcgatggcgacgtaaaactgacccaatcaatggccattattcgctacatcgcagataaacataacatgctgggtggctgccctaaagaacgggctgagatctccatgctggaaggtgcggtgctcgacattcgctacggcgtcagtagaattgcgtatagcaaggatttcgaaactttaaaagtggatttcctgagcaaacttccggagatgctgaaaatgtttgaggataggctttgtcataagacgtatctcaatggtgatcatgttacccacccggactttatgctgtacgacgcccttgatgtcgttctgtatatggatcccatgtgcctggacgccttcccgaaattagtgtgttttaaaaaacgtatcgaagcgattccacagatcgataaatacttgaagtcttctaaatatattgcttggcctctgcaaggctggcaggcaacgttcggtgggggagatcatccgccaaaatcagatctggtgccgcgtgggagccctggcatacaccgcgacggtggttctggtgagaacctgtactttcaaagctcagataatgggcctcaaaaccagcgcaacgctccacgtataaccttcggtggcccgtctgactccacaggcagcaaccagaatggtgagcgtagtggagccaggtctaagcagcgccgtccccagggtctgccgaacaacacggcgagctggtttactgcgcttacccaacacggtaaagaagacttaaaattcccgcgtggccagggcgtcccgatcaacactaactcttccccggatgatcagattggttattaccgcagagcaactcgtcggattcgcggcggcgacggtaaaatgaaagatttgtctccgcgttggtacttttactatctcggcaccggtccggaagctggactgccctacggggcaaacaaggacgggatcatttgggtggctaccgaaggtgccctgaatactccaaaagatcatatcggcacccgtaaccctgctaataacgctgcgatcgttctgcaactgcctcagggtacaactctgccaaaaggcttctatgcagaagggtcgcgtggtggcagccaggcgagtagccgtagcagctcccgctctcgcaactcgtcccgtaactccactccgggctcttctcgcggcacgtccccggctcgtatggcaggtaacggtggtgacgctgctctggcgctgctactgctggacaggctgaaccagctggagtcgaagatgagtggtaaaggccaacagcagcagggccagaccgttaccaaaaagagcgcagctgaagcatctaaaaaaccgcgacagaaacgtaccgcgactaaagcgtacaatgtaacacaggccttcggtcgtcgaggtccggagcaaactcaaggaaactttggcgataaagaattaatccgccaggggaccgactacaaacactggccgcaaattgcccagttcgccccatccgctagtgcattcttcggtatgagccgcatcggcatggaagtaacgccaagtggtacgtggctgacctacaccggtgctatcaagcttgatgacaaggacccgaactttaaagaccaggttattctgcttaacaaacatattgatgcctataaaactttcccgccgaccgaacccaaaaaggacaaaaagaaaaaagctgatgaaacccaggctctaccgcagcgtcagaaaaaacagcaaactgtgactctgctgccagctgcggacctggatgatttttccaagcagctgcaacagtctatgagctctgcggactctacgcaggcttaa

SEQ ID NO: 466 - DNA, 2016 bp, Artificial Sequence
  Description of Artificial Sequence: Synthetic polynucleotide
atgcaccatcatcaccatcatggtggttctggttcgccgatacttggttattggaagattaaaggactggttcagcccacacgcctcctgctagaatacttagaggaaaaatatgaagagcacctgtacgaacgtgatgagggggacaaatggcgaaacaagaaatttgaattgggcttagaatttccaaatttgccgtattatatcgatggcgacgtaaaactgacccaatcaatggccattattcgctacatcgcagataaacataacatgctgggtggctgccctaaagaacgggctgagatctccatgctggaaggtgcggtgctcgacattcgctacggcgtcagtagaattgcgtatagcaaggatttcgaaactttaaaagtggatttcctgagcaaacttccggagatgctgaaaatgtttgaggataggctttgtcataagacgtatctcaatggtgatcatgttacccacccggactttatgctgtacgacgcccttgatgtcgttctgtatatggatcccatgtgcctggacgccttcccgaaattagtgtgttttaaaaaacgtatcgaagcgattccacagatcgataaatacttgaagtcttctaaatatattgcttggcctctgcaaggctggcaggcaacgttcggtgggggagatcatccgccaaaatcagatctggtgccgcgtgggagccctggcatacaccgcgacggtggttctggtgagaacctgtactttcaaagctcagataatgggcctcaaaaccagcgcaacgctccacgtataaccttcggtggcccgtctgactccacaggcagcaaccagaatggtgagcgtagtggagccaggtctaagcagcgccgtccccagggtctgccgaacaacacgctcagctggtttactgcgcttacccaacacggtaaagaagacttaaaattcccgcgtggccagggcgtcccgatcaacactaactcttccccggatgatcagattggttattaccgcagagcaactcgtcggattcgcggcggcgacggtaaaatgaaagatttgtctccgcgttggtacttttactatctcggcaccggtccggaagctggactgccctacggggcaaacaaggacgggatcatttgggtggctaccgaaggtgccctgaatactccaaaagatcatatcggcacccgtaaccctgctaataacgctgcgatcgttctgcaactgcctcagggtacaactctgccaaaaggcttctatgcagaagggtcgcgtggtggcagccaggcgagtagccgtagcagctcccgctctcgcaactcgtcccgtaactccactccgggctcttctcgcggcacgtccccggctcgtatggcaggtaacggtggtgacgctgctctggcgctgctactgctggacaggctgaaccagctggagtcgaagatgagtggtaaaggccaacagcagcagggccagaccgttaccaaaaagagcgcagctgaagcatctaaaaaaccgcgacagaaacgtaccgcgactaaagcgtacaatgtaacacaggccttcggtcgtcgaggtccggagcaaactcaaggaaactttggcgatcaggaattaatccgccaggggaccgactacaaacactggccgcaaattgcccagttcgccccatccgctagtgcattcttcggtatgagccgcatcggcatggaagtaacgccaagtggtacgtggctgacctacaccggtgctatcaagcttgatgacaaggacccgaactttaaagaccaggttattctgcttaacaaacatattgatgcctataaaactttcccgccgaccgaacccaaaaaggacaaaaagaaaaaagctgatgaaacccaggctctaccgcagcgtcagaaaaaacagcaaactgtgactctgctgccagctgcggacctggatgatttttccaagcagctgcaacagtctatgagctctgcggactctacgcaggcttaa

SEQ ID NO: 467 - DNA, 2016 bp, Artificial Sequence
  Description of Artificial Sequence: Synthetic polynucleotide
atgcaccatcatcaccatcatggtggttctggttcgccgatacttggttattggaagattaaaggactggttcagcccacacgcctcctgctagaatacttagaggaaaaatatgaagagcacctgtacgaacgtgatgagggggacaaatggcgaaacaagaaatttgaattgggcttagaatttccaaatttgccgtattatatcgatggcgacgtaaaactgacccaatcaatggccattattcgctacatcgcagataaacataacatgctgggtggctgccctaaagaacgggctgagatctccatgctggaaggtgcggtgctcgacattcgctacggcgtcagtagaattgcgtatagcaaggatttcgaaactttaaaagtggatttcctgagcaaacttccggagatgctgaaaatgtttgaggataggctttgtcataagacgtatctcaatggtgatcatgttacccacccggactttatgctgtacgacgcccttgatgtcgttctgtatatggatcccatgtgcctggacgccttcccgaaattagtgtgttttaaaaaacgtatcgaagcgattccacagatcgataaatacttgaagtcttctaaatatattgcttggcctctgcaaggctggcaggcaacgttcggtgggggagatcatccgccaaaatcagatctggtgccgcgtgggagccctggcatacaccgcgacggtggttctggtgagaacctgtactttcaaagctcagataatgggcctcaaaaccagcgcaacgctccacgtataaccttcggtggcccgtctgactccacaggcagcaaccagaatggtgagcgtagtggagccaggtctaagcagcgccgtccccagggtctgccgaacaacacggcgagctggtttactgcgcttacccaacacggtaaagaagacttaaaattcccgcagggccagggcgtcccgatcaacactaactcttccccggatgatcagattggttattaccgcagagcaactcgtcggattcgcggcggcgacggtaaaatgaaagatttgtctccgcgttggtacttttactatctcggcaccggtccggaagctggactgccctacggggcaaacaaggacgggatcatttgggtggctaccgaaggtgccctgaatactccaaaagatcatatcggcacccgtaaccctgctaataacgctgcgatcgttctgcaactgcctcagggtacaactctgccaaaaggcttctatgcagaagggtcgcgtggtggcagccaggcgagtagccgtagcagctcccgctctcgcaactcgtcccgtaactccactccgggctcttctcgcggcacgtccccggctcgtatggcaggtaacggtggtgacgctgctctggcgctgctactgctggacaggctgaaccagctggagtcgaagatgagtggtaaaggccaacagcagcagggccagaccgttaccaaaaagagcgcagctgaagcatctaaaaaaccgcgacagaaacgtaccgcgactaaagcgtacaatgtaacacaggccttcggtcgtcgaggtccggagcaaactcaaggaaactttggcgatcaggaattaatccgccaggggaccgactacaaacactggccgcaaattgcccagttcgccccatccgctagtgcattcttcggtatgagccgcatcggcatggaagtaacgccaagtggtacgtggctgacctacaccggtgctatcaagcttgatgacaaggacccgaactttaaagaccaggttattctgcttaacaaacatattgatgcctataaaactttcccgccgaccgaacccaaaaaggacaaaaagaaaaaagctgatgaaacccaggctctaccgcagcgtcagaaaaaacagcaaactgtgactctgctgccagctgcggacctggatgatttttccaagcagctgcaacagtctatgagctctgcggactctacgcaggcttaa

SEQ ID NO: 468 - DNA, 2016 bp, Artificial Sequence
  Description of Artificial Sequence: Synthetic polynucleotide
atgcaccatcatcaccatcatggtggttctggttcgccgatacttggttattggaagattaaaggactggttcagcccacacgcctcctgctagaatacttagaggaaaaatatgaagagcacctgtacgaacgtgatgagggggacaaatggcgaaacaagaaatttgaattgggcttagaatttccaaatttgccgtattatatcgatggcgacgtaaaactgacccaatcaatggccattattcgctacatcgcagataaacataacatgctgggtggctgccctaaagaacgggctgagatctccatgctggaaggtgcggtgctcgacattcgctacggcgtcagtagaattgcgtatagcaaggatttcgaaactttaaaagtggatttcctgagcaaacttccggagatgctgaaaatgtttgaggataggctttgtcataagacgtatctcaatggtgatcatgttacccacccggactttatgctgtacgacgcccttgatgtcgttctgtatatggatcccatgtgcctggacgccttcccgaaattagtgtgttttaaaaaacgtatcgaagcgattccacagatcgataaatacttgaagtcttctaaatatattgcttggcctctgcaaggctggcaggcaacgttcggtgggggagatcatccgccaaaatcagatctggtgccgcgtgggagccctggcatacaccgcgacggtggttctggtgagaacctgtactttcaaagctcagataatgggcctcaaaaccagcgcaacgctccacgtataaccttcggtggcccgtctgactccacaggcagcaaccagaatggtgagcgtagtggagccaggtctaagcagcgccgtccccagggtctgccgaacaacacggcgagctggtttactgcgcttacccaacacggtaaagaagacttaaaattcccgcgtggccagggcgtcccgatcaacactaactcttccccggatgatcagattggttattaccgcagagcaactcgtcggattcgcggcggcgacggtaaaatgaaagatttgaatccgcgttggtacttttactatctcggcaccggtccggaagctggactgccctacggggcaaacaaggacgggatcatttgggtggctaccgaaggtgccctgaatactccaaaagatcatatcggcacccgtaaccctgctaataacgctgcgatcgttctgcaactgcctcagggtacaactctgccaaaaggcttctatgcagaagggtcgcgtggtggcagccaggcgagtagccgtagcagctcccgctctcgcaactcgtcccgtaactccactccgggctcttctcgcggcacgtccccggctcgtatggcaggtaacggtggtgacgctgctctggcgctgctactgctggacaggctgaaccagctggagtcgaagatgagtggtaaaggccaacagcagcagggccagaccgttaccaaaaagagcgcagctgaagcatctaaaaaaccgcgacagaaacgtaccgcgactaaagcgtacaatgtaacacaggccttcggtcgtcgaggtccggagcaaactcaaggaaactttggcgatcaggaattaatccgccaggggaccgactacaaacactggccgcaaattgcccagttcgccccatccgctagtgcattcttcggtatgagccgcatcggcatggaagtaacgccaagtggtacgtggctgacctacaccggtgctatcaagcttgatgacaaggacccgaactttaaagaccaggttattctgcttaacaaacatattgatgcctataaaactttcccgccgaccgaacccaaaaaggacaaaaagaaaaaagctgatgaaacccaggctctaccgcagcgtcagaaaaaacagcaaactgtgactctgctgccagctgcggacctggatgatttttccaagcagctgcaacagtctatgagctctgcggactctacgcaggcttaa

SEQ ID NO: 469 - DNA, 2016 bp, Artificial Sequence
  Description of Artificial Sequence: Synthetic polynucleotide
atgcaccatcatcaccatcatggtggttctggttcgccgatacttggttattggaagattaaaggactggttcagcccacacgcctcctgctagaatacttagaggaaaaatatgaagagcacctgtacgaacgtgatgagggggacaaatggcgaaacaagaaatttgaattgggcttagaatttccaaatttgccgtattatatcgatggcgacgtaaaactgacccaatcaatggccattattcgctacatcgcagataaacataacatgctgggtggctgccctaaagaacgggctgagatctccatgctggaaggtgcggtgctcgacattcgctacggcgtcagtagaattgcgtatagcaaggatttcgaaactttaaaagtggatttcctgagcaaacttccggagatgctgaaaatgtttgaggataggctttgtcataagacgtatctcaatggtgatcatgttacccacccggactttatgctgtacgacgcccttgatgtcgttctgtatatggatcccatgtgcctggacgccttcccgaaattagtgtgttttaaaaaacgtatcgaagcgattccacagatcgataaatacttgaagtcttctaaatatattgcttggcctctgcaaggctggcaggcaacgttcggtgggggagatcatccgccaaaatcagatctggtgccgcgtgggagccctggcatacaccgcgacggtggttctggtgagaacctgtactttcaaagctcagataatgggcctcaaaaccagcgcaacgctccacgtataaccttcggtggcccgtctgactccacaggcagcaaccagaatggtgagcgtagtggagccaggtctaagcagcgccgtccccagggtctgccgaacaacacggcgagctggtttactgcgcttacccaacacggtaaagaagacttaaaattcccgcgtggccagggcgtcccgatcaacactaactcttccccggatgatcagattggttattaccgcagatatactcgtcggattcgcggcggcgacggtaaaatgaaagatttgtctccgcgttggtacttttactatctcggcaccggtccggaagctggactgccctacggggcaaacaaggacgggatcatttgggtggctaccgaaggtgccctgaatactccaaaagatcatatcggcacccgtaaccctgctaataacgctgcgatcgttctgcaactgcctcagggtacaactctgccaaaaggcttctatgcagaagggtcgcgtggtggcagccaggcgagtagccgtagcagctcccgctctcgcaactcgtcccgtaactccactccgggctcttctcgcggcacgtccccggctcgtatggcaggtaacggtggtgacgctgctctggcgctgctactgctggacaggctgaaccagctggagtcgaagatgagtggtaaaggccaacagcagcagggccagaccgttaccaaaaagagcgcagctgaagcatctaaaaaaccgcgacagaaacgtaccgcgactaaagcgtacaatgtaacacaggccttcggtcgtcgaggtccggagcaaactcaaggaaactttggcgatcaggaattaatccgccaggggaccgactacaaacactggccgcaaattgcccagttcgccccatccgctagtgcattcttcggtatgagccgcatcggcatggaagtaacgccaagtggtacgtggctgacctacaccggtgctatcaagcttgatgacaaggacccgaactttaaagaccaggttattctgcttaacaaacatattgatgcctataaaactttcccgccgaccgaacccaaaaaggacaaaaagaaaaaagctgatgaaacccaggctctaccgcagcgtcagaaaaaacagcaaactgtgactctgctgccagctgcggacctggatgatttttccaagcagctgcaacagtctatgagctctgcggactctacgcaggcttaa

SEQ ID NO: 470 - DNA, 2016 bp, Artificial Sequence
  Description of Artificial Sequence: Synthetic polynucleotide
atgcaccatcatcaccatcatggtggttctggttcgccgatacttggttattggaagattaaaggactggttcagcccacacgcctcctgctagaatacttagaggaaaaatatgaagagcacctgtacgaacgtgatgagggggacaaatggcgaaacaagaaatttgaattgggcttagaatttccaaatttgccgtattatatcgatggcgacgtaaaactgacccaatcaatggccattattcgctacatcgcagataaacataacatgctgggtggctgccctaaagaacgggctgagatctccatgctggaaggtgcggtgctcgacattcgctacggcgtcagtagaattgcgtatagcaaggatttcgaaactttaaaagtggatttcctgagcaaacttccggagatgctgaaaatgtttgaggataggctttgtcataagacgtatctcaatggtgatcatgttacccacccggactttatgctgtacgacgcccttgatgtcgttctgtatatggatcccatgtgcctggacgccttcccgaaattagtgtgttttaaaaaacgtatcgaagcgattccacagatcgataaatacttgaagtcttctaaatatattgcttggcctctgcaaggctggcaggcaacgttcggtgggggagatcatccgccaaaatcagatctggtgccgcgtgggagccctggcatacaccgcgacggtggttctggtgagaacctgtactttcaaagctcagataatgggcctcaaaaccagcgcaacgctccacgtataaccttcggtggcccgtctgactccacaggcagcaaccagaatggtgagcgtagtggagccaggtctaagcagcgccgtccccagggtctgccgaacaacacggcgagctggtttactgcgcttacccaacacggtaaagaagacttaaaattcccgcgtggccagggcgtcccgatcaacactaactcttccccggatgatcagattggttattaccgcagagcaactcgtcggattcgcggcggcgacggtaaaatgaaagatttgtctccgcgttggtacttttactatctcggcaccggtccggaagctggactgccctacggggcaaacaaggacgggatcatttgggtggctaccgaaggtgccctgaatactccaaaagatcatatcggcacccgtaaccctgctaataacgctgcgatcgttctgcaactgcctcagggtacaactctgccaaaaggcttctatgcagaagggtcgcgtggtggcagccaggcgagtagccgtagcagctcccgctctcgcaactcgtcccgtaactccactccgggctcttctcgcggcacgtccccggctcgtatggcaggtaacggtggtgacgctgctctggcgctgctactgctggacaggctgaaccagctggagtcgaagatgagtggtaaaggccaacagcagcagggccagaccgttaccaaaaagagcgcagctgaagcatctaaaaaaccgcgacagaaacgtaccgcgactaaagcgtacaatgtaacacaggccttcggtcgtcgaggtccggagcaaactcaaggaaactttggcgatcaggaattaacgcgccaggggaccgactacaaacactggccgcaaattgcccagttcgccccatccgctagtgcattcttcggtatgagccgcatcggcatggaagtaacgccaagtggtacgtggctgacctacaccggtgctatcaagcttgatgacaaggacccgaactttaaagaccaggttattctgcttaacaaacatattgatgcctataaaactttcccgccgaccgaacccaaaaaggacaaaaagaaaaaagctgatgaaacccaggctctaccgcagcgtcagaaaaaacagcaaactgtgactctgctgccagctgcggacctggatgatttttccaagcagctgcaacagtctatgagctctgcggactctacgcaggcttaa

SEQ ID NO: 471 - DNA, 2016 bp, Artificial Sequence
  Description of Artificial Sequence: Synthetic polynucleotide
atgcaccatcatcaccatcatggtggttctggttcgccgatacttggttattggaagattaaaggactggttcagcccacacgcctcctgctagaatacttagaggaaaaatatgaagagcacctgtacgaacgtgatgagggggacaaatggcgaaacaagaaatttgaattgggcttagaatttccaaatttgccgtattatatcgatggcgacgtaaaactgacccaatcaatggccattattcgctacatcgcagataaacataacatgctgggtggctgccctaaagaacgggctgagatctccatgctggaaggtgcggtgctcgacattcgctacggcgtcagtagaattgcgtatagcaaggatttcgaaactttaaaagtggatttcctgagcaaacttccggagatgctgaaaatgtttgaggataggctttgtcataagacgtatctcaatggtgatcatgttacccacccggactttatgctgtacgacgcccttgatgtcgttctgtatatggatcccatgtgcctggacgccttcccgaaattagtgtgttttaaaaaacgtatcgaagcgattccacagatcgataaatacttgaagtcttctaaatatattgcttggcctctgcaaggctggcaggcaacgttcggtgggggagatcatccgccaaaatcagatctggtgccgcgtgggagccctggcatacaccgcgacggtggttctggtgagaacctgtactttcaaagctcagataatgggcctcaaaaccagcgcaacgctccacgtataaccttcggtggcccgtctgactccacaggcagcaaccagaatggtgagcgtagtggagccaggtctaagcagcgccgtccccagggtctgccgaacaacacggtaagctggtttactgcgcttacccaacacggtaaagaagacttaaaattcccgcgtggccagggcgtcccgatcaacactaactcttccccggatgatcagattggttattaccgcagagcaactcgtcggattcgcggcggcgacggtaaaatgaaagatttgtctccgcgttggtacttttactatctcggcaccggtccggaagctggactgccctacggggcaaacaaggacgggatcatttgggtggctaccgaaggtgccctgaatactccaaaagatcatatcggcacccgtaaccctgctaataacgctgcgatcgttctgcaactgcctcagggtacaactctgccaaaaggcttctatgcagaagggtcgcgtggtggcagccaggcgagtagccgtagcagctcccgctctcgcaactcgtcccgtaactccactccgggctcttctcgcggcacgtccccggctcgtatggcaggtaacggtggtgacgctgctctggcgctgctactgctggacaggctgaaccagctggagtcgaagatgagtggtaaaggccaacagcagcagggccagaccgttaccaaaaagagcgcagctgaagcatctaaaaaaccgcgacagaaacgtaccgcgactaaagcgtacaatgtaacacaggccttcggtcgtcgaggtccggagcaaactcaaggaaactttggcgatcaggaattaatccgccaggggaccgactacaaacactggccgcaaattgcccagttcgccccatccgctagtgcattcttcggtatgagccgcatcggcatggaagtaacgccaagtggtacgtggctgacctacaccggtgctatcaagcttgatgacaaggacccgaactttaaagaccaggttattctgcttaacaaacatattgatgcctataaaactttcccgccgaccgaacccaaaaaggacaaaaagaaaaaagctgatgaaacccaggctctaccgcagcgtcagaaaaaacagcaaactgtgactctgctgccagctgcggacctggatgatttttccaagcagctgcaacagtctatgagctctgcggactctacgcaggcttaa

SEQ ID NO: 472 - DNA, 2016 bp, Artificial Sequence
  Description of Artificial Sequence: Synthetic polynucleotide
atgcaccatcatcaccatcatggtggttctggttcgccgatacttggttattggaagattaaaggactggttcagcccacacgcctcctgctagaatacttagaggaaaaatatgaagagcacctgtacgaacgtgatgagggggacaaatggcgaaacaagaaatttgaattgggcttagaatttccaaatttgccgtattatatcgatggcgacgtaaaactgacccaatcaatggccattattcgctacatcgcagataaacataacatgctgggtggctgccctaaagaacgggctgagatctccatgctggaaggtgcggtgctcgacattcgctacggcgtcagtagaattgcgtatagcaaggatttcgaaactttaaaagtggatttcctgagcaaacttccggagatgctgaaaatgtttgaggataggctttgtcataagacgtatctcaatggtgatcatgttacccacccggactttatgctgtacgacgcccttgatgtcgttctgtatatggatcccatgtgcctggacgccttcccgaaattagtgtgttttaaaaaacgtatcgaagcgattccacagatcgataaatacttgaagtcttctaaatatattgcttggcctctgcaaggctggcaggcaacgttcggtgggggagatcatccgccaaaatcagatctggtgccgcgtgggagccctggcatacaccgcgacggtggttctggtgagaacctgtactttcaaagctcagataatgggcctcaaaaccagcgcaacgctccacgtataaccttcggtggcccgtctgactccacaggcagcaaccagaatggtgagcgtagtggagccaggtctaagcagcgccgtccccagggtctgccgaacaacacggcgagctggtttactgcgcttacccaacacggtaaagaagacttaaaattcccgcgtggccagggcgtcccgatcaacactaactcttccccggatgatcagattggttattaccgcagagcaactcgtcggattcgcggcggcgacggtaaaatgaaagatttgtctccgcgttggtacttttactatctcggcaccggtccggaagctggactgccctacggggcaaacaaggacgggatcatttgggtggctaccgaaggtgccctgaatactccaaaagatcatatcggcacccgtaaccctgataataacgctgcgatcgttctgcaactgcctcagggtacaactctgccaaaaggcttctatgcagaagggtcgcgtggtggcagccaggcgagtagccgtagcagctcccgctctcgcaactcgtcccgtaactccactccgggctcttctcgcggcacgtccccggctcgtatggcaggtaacggtggtgacgctgctctggcgctgctactgctggacaggctgaaccagctggagtcgaagatgagtggtaaaggccaacagcagcagggccagaccgttaccaaaaagagcgcagctgaagcatctaaaaaaccgcgacagaaacgtaccgcgactaaagcgtacaatgtaacacaggccttcggtcgtcgaggtccggagcaaactcaaggaaactttggcgatcaggaattaatccgccaggggaccgactacaaacactggccgcaaattgcccagttcgccccatccgctagtgcattcttcggtatgagccgcatcggcatggaagtaacgccaagtggtacgtggctgacctacaccggtgctatcaagcttgatgacaaggacccgaactttaaagaccaggttattctgcttaacaaacatattgatgcctataaaactttcccgccgaccgaacccaaaaaggacaaaaagaaaaaagctgatgaaacccaggctctaccgcagcgtcagaaaaaacagcaaactgtgactctgctgccagctgcggacctggatgatttttccaagcagctgcaacagtctatgagctctgcggactctacgcaggcttaa

SEQ ID NO: 473 - DNA, 2016 bp, Artificial Sequence
  Description of Artificial Sequence: Synthetic polynucleotide
atgcaccatcatcaccatcatggtggttctggttcgccgatacttggttattggaagattaaaggactggttcagcccacacgcctcctgctagaatacttagaggaaaaatatgaagagcacctgtacgaacgtgatgagggggacaaatggcgaaacaagaaatttgaattgggcttagaatttccaaatttgccgtattatatcgatggcgacgtaaaactgacccaatcaatggccattattcgctacatcgcagataaacataacatgctgggtggctgccctaaagaacgggctgagatctccatgctggaaggtgcggtgctcgacattcgctacggcgtcagtagaattgcgtatagcaaggatttcgaaactttaaaagtggatttcctgagcaaacttccggagatgctgaaaatgtttgaggataggctttgtcataagacgtatctcaatggtgatcatgttacccacccggactttatgctgtacgacgcccttgatgtcgttctgtatatggatcccatgtgcctggacgccttcccgaaattagtgtgttttaaaaaacgtatcgaagcgattccacagatcgataaatacttgaagtcttctaaatatattgcttggcctctgcaaggctggcaggcaacgttcggtgggggagatcatccgccaaaatcagatctggtgccgcgtgggagccctggcatacaccgcgacggtggttctggtgagaacctgtactttcaaagctcagataatgggcctcaaaaccagcgcaacgctccacgtataaccttcggtggcccgtctgactccacaggcagcaaccagaatggtgagcgtagtggagccaggtctaagcagcgccgtccccagggtctgccgaacaacacggcgagctggtttactgcgcttacccaacacggtaaagaagacttaaaattcccgcgtggccagggcgtcccgatcaacactaactcttccccggatgatcagattggttattaccgcagagcaactcgtcggattcgcggcggcgacggtaaaatgaaagatttgtctccgcgttggtacttttactatctcggcaccggtccggaagctggactgccctacggggcaaacaaggacgggatcatttgggtggctaccgaaggtgccctgaatactccaaaagatcatatcggcacccgtaaccctgctaataacgctgcgatcgttctgcaactgcctcagggtacaactctgccaaaaggcttctatgcagaagggtcgcgtggtggcagccaggcgagtagccgtagcagctcccgctctcgcaactcgtcccgtaactccactccgggcgaggaacgcggcacgtccccggctcgtatggcaggtaacggtggtgacgctgctctggcgctgctactgctggacaggctgaaccagctggagtcgaagatgagtggtaaaggccaacagcagcagggccagaccgttaccaaaaagagcgcagctgaagcatctaaaaaaccgcgacagaaacgtaccgcgactaaagcgtacaatgtaacacaggccttcggtcgtcgaggtccggagcaaactcaaggaaactttggcgatcaggaattaatccgccaggggaccgactacaaacactggccgcaaattgcccagttcgccccatccgctagtgcattcttcggtatgagccgcatcggcatggaagtaacgccaagtggtacgtggctgacctacaccggtgctatcaagcttgatgacaaggacccgaactttaaagaccaggttattctgcttaacaaacatattgatgcctataaaactttcccgccgaccgaacccaaaaaggacaaaaagaaaaaagctgatgaaacccaggctctaccgcagcgtcagaaaaaacagcaaactgtgactctgctgccagctgcggacctggatgatttttccaagcagctgcaacagtctatgagctctgcggactctacgcaggcttaa

SEQ ID NO: 474 - DNA, 2016 bp, Artificial Sequence
  Description of Artificial Sequence: Synthetic polynucleotide
atgcaccatcatcaccatcatggtggttctggttcgccgatacttggttattggaagattaaaggactggttcagcccacacgcctcctgctagaatacttagaggaaaaatatgaagagcacctgtacgaacgtgatgagggggacaaatggcgaaacaagaaatttgaattgggcttagaatttccaaatttgccgtattatatcgatggcgacgtaaaactgacccaatcaatggccattattcgctacatcgcagataaacataacatgctgggtggctgccctaaagaacgggctgagatctccatgctggaaggtgcggtgctcgacattcgctacggcgtcagtagaattgcgtatagcaaggatttcgaaactttaaaagtggatttcctgagcaaacttccggagatgctgaaaatgtttgaggataggctttgtcataagacgtatctcaatggtgatcatgttacccacccggactttatgctgtacgacgcccttgatgtcgttctgtatatggatcccatgtgcctggacgccttcccgaaattagtgtgttttaaaaaacgtatcgaagcgattccacagatcgataaatacttgaagtcttctaaatatattgcttggcctctgcaaggctggcaggcaacgttcggtgggggagatcatccgccaaaatcagatctggtgccgcgtgggagccctggcatacaccgcgacggtggttctggtgagaacctgtactttcaaagctcagataatgggcctcaaaaccagcgcaacgctccacgtataaccttcggtggcccgtctgactccacaggcagcaaccagaatggtgagcgtagtggagccaggtctaagcagcgccgtccccagggtctgccgaacaacacggcgagctggtttactgcgcttacccaacacggtaaagaagacttaaaattcccgcgtggccagggcgtcccgatcaacactaactcttccccggatgatcagattggttattaccgcagagcaactcgtcggattcgcggcggcgacggtaaaatgaaagatttgtctccgcgttggtacttttactatctcggcaccggtccggaagctggactgccctacggggcaaacaaggacgggatcatttgggtggctaccgaaggtgccctgaatactccaaaagatcatatcggcacccgtaaccctgctaataacgctgcgatcgttctgcaactgcctcagggtacaactctgccaaaaggcttctatgcagaagggtcgcgtggtggcagccaggcgagtagccgtagcagctcccgctctcgcaactcgtcccgtaactccactccgggctcttctcgcggcacgtccccggctcgtatggcaggtaacggtggtgacgctgctctggcgctgctactgctggacaggctgaaccagctggagtcgaagatgagtggtaaaggccaacagcagcagggccagaccgttaccaaaaagagcgcagctgaagcatctaaaaaaccgcgacagaaacgtaccgcgactaaagcgtacaatgtaacacaggccttcggtcgtcgaggtccggagaaaactcaaggaaactttggcgatcaggaattaatccgccaggggaccgactacaaacactggccgcaaattgcccagttcgccccatccgctagtgcattcttcggtatgagccgcatcggcatggaagtaacgccaagtggtacgtggctgacctacaccggtgctatcaagcttgatgacaaggacccgaactttaaagaccaggttattctgcttaacaaacatattgatgcctataaaactttcccgccgaccgaacccaaaaaggacaaaaagaaaaaagctgatgaaacccaggctctaccgcagcgtcagaaaaaacagcaaactgtgactctgctgccagctgcggacctggatgatttttccaagcagctgcaacagtctatgagctctgcggactctacgcaggcttaa

SEQ ID NO: 475 - DNA, 2016 bp, Artificial Sequence
  Description of Artificial Sequence: Synthetic polynucleotide
atgcaccatcatcaccatcatggtggttctggttcgccgatacttggttattggaagattaaaggactggttcagcccacacgcctcctgctagaatacttagaggaaaaatatgaagagcacctgtacgaacgtgatgagggggacaaatggcgaaacaagaaatttgaattgggcttagaatttccaaatttgccgtattatatcgatggcgacgtaaaactgacccaatcaatggccattattcgctacatcgcagataaacataacatgctgggtggctgccctaaagaacgggctgagatctccatgctggaaggtgcggtgctcgacattcgctacggcgtcagtagaattgcgtatagcaaggatttcgaaactttaaaagtggatttcctgagcaaacttccggagatgctgaaaatgtttgaggataggctttgtcataagacgtatctcaatggtgatcatgttacccacccggactttatgctgtacgacgcccttgatgtcgttctgtatatggatcccatgtgcctggacgccttcccgaaattagtgtgttttaaaaaacgtatcgaagcgattccacagatcgataaatacttgaagtcttctaaatatattgcttggcctctgcaaggctggcaggcaacgttcggtgggggagatcatccgccaaaatcagatctggtgccgcgtgggagccctggcatacaccgcgacggtggttctggtgagaacctgtactttcaaagctcagataatgggcctcaaaaccagcgcaacgctccacgtataaccttcggtggcccgtctgactccacaggcagcaaccagaatggtgagcgtagtggagccaggtctaagcagcgccgtccccagggtctgccgaacaacacggcgagctggtttactgcgcttacccaacacggtaaagaagacttaaaattcccgcgtggccagggcgtcccgatcaacactaactcttccccggatgatcagattggttattaccgcagagcaactcgtcggattcgcggcggcgacggtaaaatgaaagatttgtctccgcgttggtacttttactatctcggcaccggtccggaagctggactgccctacggggcaaacaaggacgggatcatttgggtggctaccgaaggtgccctgaatactccaaaagatcatatcggcacccgtaaccctgctaataacgctgcgatcgttctgcaactgcctcagggtacaactctgccagagggcttctatgcagaagggtcgcgtggtggcagccaggcgagtagccgtagcagctcccgctctcgcaactcgtcccgtaactccactccgggctcttctcgcggcacgtccccggctcgtatggcaggtaacggtggtgacgctgctctggcgctgctactgctggacaggctgaaccagctggagtcgaagatgagtggtaaaggccaacagcagcagggccagaccgttaccaaaaagagcgcagctgaagcatctaaaaaaccgcgacagaaacgtaccgcgactaaagcgtacaatgtaacacaggccttcggtcgtcgaggtccggagcaaactcaaggaaactttggcgatcaggaattaatccgccaggggaccgactacaaacactggccgcaaattgcccagttcgccccatccgctagtgcattcttcggtatgagccgcatcggcatggaagtaacgccaagtggtacgtggctgacctacaccggtgctatcaagcttgatgacaaggacccgaactttaaagaccaggttattctgcttaacaaacatattgatgcctataaaactttcccgccgaccgaacccaaaaaggacaaaaagaaaaaagctgatgaaacccaggctctaccgcagcgtcagaaaaaacagcaaactgtgactctgctgccagctgcggacctggatgatttttccaagcagctgcaacagtctatgagctctgcggactctacgcaggcttaa

SEQ ID NO: 476 - DNA, 2016 bp, Artificial Sequence
  Description of Artificial Sequence: Synthetic polynucleotide
atgcaccatcatcaccatcatggtggttctggttcgccgatacttggttattggaagattaaaggactggttcagcccacacgcctcctgctagaatacttagaggaaaaatatgaagagcacctgtacgaacgtgatgagggggacaaatggcgaaacaagaaatttgaattgggcttagaatttccaaatttgccgtattatatcgatggcgacgtaaaactgacccaatcaatggccattattcgctacatcgcagataaacataacatgctgggtggctgccctaaagaacgggctgagatctccatgctggaaggtgcggtgctcgacattcgctacggcgtcagtagaattgcgtatagcaaggatttcgaaactttaaaagtggatttcctgagcaaacttccggagatgctgaaaatgtttgaggataggctttgtcataagacgtatctcaatggtgatcatgttacccacccggactttatgctgtacgacgcccttgatgtcgttctgtatatggatcccatgtgcctggacgccttcccgaaattagtgtgttttaaaaaacgtatcgaagcgattccacagatcgataaatacttgaagtcttctaaatatattgcttggcctctgcaaggctggcaggcaacgttcggtgggggagatcatccgccaaaatcagatctggtgccgcgtgggagccctggcatacaccgcgacggtggttctggtgagaacctgtactttcaaagctcagataatgggcctcaaaaccagcgcaacgctccacgtataaccttcggtggcccgtctgactccacaggcagcaaccagaatggtgagcgtagtggagccaggtctaagcagcgccgtccccagggtctgccgaacaacacggcgagctggtttactggccttacccaatttggtaaagaagacttaaaattcccgcccggccagggcgtcccgatcaacactaactcttccccggatgatcagattggttattaccgcagagcaactcgtcggattcgcggcggcgacggtaaaatgaaagatttgccaccgaaatggtacttttactatctcggcaccggtccgcatgctgatctgccctacgggcaaaagcacgacggggtgttttgggtggctcgaccgggtgccctgaatactccaaaagatcatatcggcacccgtaaccctgctaataacgctgcgatcccgctgcaactgcctccaggtacaaaactgccaaaaggcttctatgcagaagggtcgcgtggtggcagccaggcgagtagccgtagcagctcccgctctcgcaactcgtcccgtaactccactccgggctcttctcgcggcacgtccccggctcgtatggcaggtaacggtggtgacgctgctctggcgctgctactgctggacaggctgaaccagctggagtcgaagatgagtggtaaaggccaacagcagcagggccagaccgttaccaaaaagagcgcagctgaagcatctaaaaaaccgcgacagaaacgtaccgcgactaaagcgtacaatgtaacacaggccttcggtcgtcgaggtccggagcaaactcaaggaaactttggcgatcaggaattaatccgccaggggaccgactacaaacactggccgcaaattgcccagttcgccccatccgctagtgcattcttcggtatgagccgcatcggcatggaagtaacgccaagtggtacgtggctgacctacaccggtgctatcaagcttgatgacaaggacccgaactttaaagaccaggttattctgcttaacaaacatattgatgcctataaaactttcccgccgaccgaacccaaaaaggacaaaaagaaaaaagctgatgaaacccaggctctaccgcagcgtcagaaaaaacagcaaactgtgactctgctgccagctgcggacctggatgatttttccaagcagctgcaacagtctatgagctctgcggactctacgcaggcttaa

SEQ ID NO: 477 - DNA, 2016 bp, Artificial Sequence
  Description of Artificial Sequence: Synthetic polynucleotide
atgcaccatcatcaccatcatggtggttctggttcgccgatacttggttattggaagattaaaggactggttcagcccacacgcctcctgctagaatacttagaggaaaaatatgaagagcacctgtacgaacgtgatgagggggacaaatggcgaaacaagaaatttgaattgggcttagaatttccaaatttgccgtattatatcgatggcgacgtaaaactgacccaatcaatggccattattcgctacatcgcagataaacataacatgctgggtggctgccctaaagaacgggctgagatctccatgctggaaggtgcggtgctcgacattcgctacggcgtcagtagaattgcgtatagcaaggatttcgaaactttaaaagtggatttcctgagcaaacttccggagatgctgaaaatgtttgaggataggctttgtcataagacgtatctcaatggtgatcatgttacccacccggactttatgctgtacgacgcccttgatgtcgttctgtatatggatcccatgtgcctggacgccttcccgaaattagtgtgttttaaaaaacgtatcgaagcgattccacagatcgataaatacttgaagtcttctaaatatattgcttggcctctgcaaggctggcaggcaacgttcggtgggggagatcatccgccaaaatcagatctggtgccgcgtgggagccctggcatacaccgcgacggtggttctggtgagaacctgtactttcaaagctcagataatgggcctcaaaaccagcgcaacgctccacgtataaccttcggtggcccgtctgactccacaggcagcaaccagaatggtgagcgtagtggagccaggtctaagcagcgccgtccccagggtctgccgaacaacacggcgagctggtttactgcgcttacccaacacggtaaagaagacttaaaattcccgcgtggccagggcgtcccgatcaacactaactcttccccggatgatcagattggttattaccgcagagcaactcgtcggattcgcggcggcgacggtaaaatgaaagatttgtctccgcgttggtacttttactatctcggcaccggtccggaagctggactgccctacggggcaaacaaggacgggatcatttgggtggctaccgaaggtgccctgaatactccaaaagatcatatcggcacccgtaaccctgctaataacgctgcgatcgttctgcaactgcctcagggtacaactctgccaaaaggcttctatgcagaagggtcgcgtggtggcagccaggcgagtagccgtagcagctcccgctctcgcaactcgtcccgtaactccactccgggctcttctcgcggcacgtccccggctcgtatggcaggtaacggtggtgacgctgctctggcgctgctactgctggacaggctgaaccagctggagtcgaagatgagtggtaaaggccaacagcagcagggccagaccgttaccaaaaagagcgcagctgaagcatctaaaaaaccgcgacagaaacgtaccgcgactaaagcgtacaatgtaacacaggccttcggtcgtcgaggtccggagcaaactcaaggaaactttggcgatcaggaattaatccgccaggggaccgactacaaacactggccgcaaattgcccagttcgccccatccgctagtgcattcttcggtatgagccgcatcggcatggaagtatcgccaagtggtacgtggctgacctacaccggtgctatcaagcttgatgacaaggacccgaactttaaagaccaggttattctgcttaacaaacatattgatgcctataaaactttcccgccgaccgaacccaaaaaggacaaaaagaaaaaagctgatgaaacccaggctctaccgcagcgtcagaaaaaacagcaaactgtgactctgctgccagctgcggacctggatgatttttccaagcagctgcaacagtctatgagctctgcggactctacgcaggcttaa

SEQ ID NO: 478 - DNA, 2016 bp, Artificial Sequence
  Description of Artificial Sequence: Synthetic polynucleotide
atgcaccatcatcaccatcatggtggttctggttcgccgatacttggttattggaagattaaaggactggttcagcccacacgcctcctgctagaatacttagaggaaaaatatgaagagcacctgtacgaacgtgatgagggggacaaatggcgaaacaagaaatttgaattgggcttagaatttccaaatttgccgtattatatcgatggcgacgtaaaactgacccaatcaatggccattattcgctacatcgcagataaacataacatgctgggtggctgccctaaagaacgggctgagatctccatgctggaaggtgcggtgctcgacattcgctacggcgtcagtagaattgcgtatagcaaggatttcgaaactttaaaagtggatttcctgagcaaacttccggagatgctgaaaatgtttgaggataggctttgtcataagacgtatctcaatggtgatcatgttacccacccggactttatgctgtacgacgcccttgatgtcgttctgtatatggatcccatgtgcctggacgccttcccgaaattagtgtgttttaaaaaacgtatcgaagcgattccacagatcgataaatacttgaagtcttctaaatatattgcttggcctctgcaaggctggcaggcaacgttcggtgggggagatcatccgccaaaatcagatctggtgccgcgtgggagccctggcatacaccgcgacggtggttctggtgagaacctgtactttcaaagctcagataatgggcctcaaaaccagcgcaacgctccacgtataaccttcggtggcccgtctgactccacaggcagcaaccagaatggtgagcgtagtggagccaggtctaagcagcgccgtccccagggtctgccgaacaacacggcgagctggtttactgcgcttacccaacacggtaaagaagacttaaaattcccgcgtggccagggcgtcccgatcaacactaactcttccccggatgatcagattggttattaccgcagagcaactcgtcggattcgcggcggcgacggtaaaatgaaagatttgtctccgcgttggtacttttactatctcggcaccggtccggaagctggactgccctacggggcaaacaaggacgggatcatttgggtggctaccgaaggtgccctgaatactccaaaagatcatatcggcacccgtaaccctgctaataacgctgcgatcgttctgcaactgcctcagggtacaactctgccaaaaggcttctatgcagaagggtcgcgtggtggcagccaggcgagtagccgtagcagctcccgctctcgcaactcgtcccgtaactccactccgggctcttctcgcggcacgtccccggctcgtatggcaggtaacggtggtgacgctgctctggcgctgctactgctggacaggctgaaccagctggagtcgaagatgagtggtaaaggccaacagcagcagggccagaccgttaccaaaaagagcgcagctgaagcatctaaaaaaccgcgacagaaacgtaccgcgactaaagcgtacaatgtaacacaggccttcggtcgtcgaggtccggagcaaactcaaggaaactttggcgatcaggaattaatccgccaggggaccgactacaaacactggccgcaaattgcccagttcgccccatccgctagtgcattcttcggtatgagccaaatcggcatggaagtaacgccaagtggtacgtggctgacctacaccggtgctatcaagcttgatgacaaggacccgaactttaaagaccaggttattctgcttaacaaacatattgatgcctataaaactttcccgccgaccgaacccaaaaaggacaaaaagaaaaaagctgatgaaacccaggctctaccgcagcgtcagaaaaaacagcaaactgtgactctgctgccagctgcggacctggatgatttttccaagcagctgcaacagtctatgagctctgcggactctacgcaggcttaa

SEQ ID NO: 479 - DNA, 2016 bp, Artificial Sequence
  Description of Artificial Sequence: Synthetic polynucleotide
atgcaccatcatcaccatcatggtggttctggttcgccgatacttggttattggaagattaaaggactggttcagcccacacgcctcctgctagaatacttagaggaaaaatatgaagagcacctgtacgaacgtgatgagggggacaaatggcgaaacaagaaatttgaattgggcttagaatttccaaatttgccgtattatatcgatggcgacgtaaaactgacccaatcaatggccattattcgctacatcgcagataaacataacatgctgggtggctgccctaaagaacgggctgagatctccatgctggaaggtgcggtgctcgacattcgctacggcgtcagtagaattgcgtatagcaaggatttcgaaactttaaaagtggatttcctgagcaaacttccggagatgctgaaaatgtttgaggataggctttgtcataagacgtatctcaatggtgatcatgttacccacccggactttatgctgtacgacgcccttgatgtcgttctgtatatggatcccatgtgcctggacgccttcccgaaattagtgtgttttaaaaaacgtatcgaagcgattccacagatcgataaatacttgaagtcttctaaatatattgcttggcctctgcaaggctggcaggcaacgttcggtgggggagatcatccgccaaaatcagatctggtgccgcgtgggagccctggcatacaccgcgacggtggttctggtgagaacctgtactttcaaagctcagataatgggcctcaaaaccagcgcaacgctccacgtataaccttcggtggcccgtctgactccacaggcagcaaccagaatggtgagcgtagtggagccaggtctaagcagcgccgtccccagggtctgccgaacaacacggcgagctggtttactgcgcttacccaacacggtaaagaagacttaaaattcccgcgtggccagggcgtcccgatcaacactaactcttccccggatgatcagattggttattaccgcagagcaactcgtcggattcgcggcggcgacggtaaaatgaaagatttgtctccgcgttggtacttttactatctcggcaccggtccggaagctggactgccctacggggcaaacaaggccgggatcatttgggtggctaccgaaggtgccctgaatactccaaaagatcatatcggcacccgtaaccctgctaataacgctgcgatcgttctgcaactgcctcagggtacaactctgccaaaaggcttctatgcagaagggtcgcgtggtggcagccaggcgagtagccgtagcagctcccgctctcgcaactcgtcccgtaactccactccgggctcttctcgcggcacgtccccggctcgtatggcaggtaacggtggtgacgctgctctggcgctgctactgctggacaggctgaaccagctggagtcgaagatgagtggtaaaggccaacagcagcagggccagaccgttaccaaaaagagcgcagctgaagcatctaaaaaaccgcgacagaaacgtaccgcgactaaagcgtacaatgtaacacaggccttcggtcgtcgaggtccggagcaaactcaaggaaactttggcgatcaggaattaatccgccaggggaccgactacaaacactggccgcaaattgcccagttcgccccatccgctagtgcattcttcggtatgagccgcatcggcatggaagtaacgccaagtggtacgtggctgacctacaccggtgctatcaagcttgatgacaaggacccgaactttaaagaccaggttattctgcttaacaaacatattgatgcctataaaactttcccgccgaccgaacccaaaaaggacaaaaagaaaaaagctgatgaaacccaggctctaccgcagcgtcagaaaaaacagcaaactgtgactctgctgccagctgcggacctggatgatttttccaagcagctgcaacagtctatgagctctgcggactctacgcaggcttaa

SEQ ID NO: 480 - DNA, 2016 bp, Artificial Sequence
  Description of Artificial Sequence: Synthetic polynucleotide
atgcaccatcatcaccatcatggtggttctggttcgccgatacttggttattggaagattaaaggactggttcagcccacacgcctcctgctagaatacttagaggaaaaatatgaagagcacctgtacgaacgtgatgagggggacaaatggcgaaacaagaaatttgaattgggcttagaatttccaaatttgccgtattatatcgatggcgacgtaaaactgacccaatcaatggccattattcgctacatcgcagataaacataacatgctgggtggctgccctaaagaacgggctgagatctccatgctggaaggtgcggtgctcgacattcgctacggcgtcagtagaattgcgtatagcaaggatttcgaaactttaaaagtggatttcctgagcaaacttccggagatgctgaaaatgtttgaggataggctttgtcataagacgtatctcaatggtgatcatgttacccacccggactttatgctgtacgacgcccttgatgtcgttctgtatatggatcccatgtgcctggacgccttcccgaaattagtgtgttttaaaaaacgtatcgaagcgattccacagatcgataaatacttgaagtcttctaaatatattgcttggcctctgcaaggctggcaggcaacgttcggtgggggagatcatccgccaaaatcagatctggtgccgcgtgggagccctggcatacaccgcgacggtggttctggtgagaacctgtactttcaaagctcagataatgggcctcaaaaccagcgcaacgctccacgtataaccttcggtggcccgtctgactccacaggcagcaaccagaatggtgagcgtagtggagccaggtctaagcagcgccgtccccagggtctgccgaacaacacggcgagctggtttactgcgcttacccaacacggtaaagaagacttaaaattcccgcgtggccagggcgtcccgatcaacactaactcttccccggatgatcagattggttattaccgcagagcaactcgtcggattcgcggcggcgacggtaaaatgaaagatttgtctccgcgttggtacttttactatctcggcaccggtccggaagctggactgccctacggggcaaacaaggacgggatcatttgggtggctaccgaaggtgccctgaatactccaaaagatcatatcggcacccgtaaccctgctaataacgctgcgatcgttctgcaactgcctcagggtacaactccgccaaaaggcttctatgcagaagggtcgcgtggtggcagccaggcgagtagccgtagcagctcccgctctcgcaactcgtcccgtaactccactccgggctcttctcgcggcacgtccccggctcgtatggcaggtaacggtggtgacgctgctctggcgctgctactgctggacaggctgaaccagctggagtcgaagatgagtggtaaaggccaacagcagcagggccagaccgttaccaaaaagagcgcagctgaagcatctaaaaaaccgcgacagaaacgtaccgcgactaaagcgtacaatgtaacacaggccttcggtcgtcgaggtccggagcaaactcaaggaaactttggcgatcaggaattaatccgccaggggaccgactacaaacactggccgcaaattgcccagttcgccccatccgctagtgcattcttcggtatgagccgcatcggcatggaagtaacgccaagtggtacgtggctgacctacaccggtgctatcaagcttgatgacaaggacccgaactttaaagaccaggttattctgcttaacaaacatattgatgcctataaaactttcccgccgaccgaacccaaaaaggacaaaaagaaaaaagctgatgaaacccaggctctaccgcagcgtcagaaaaaacagcaaactgtgactctgctgccagctgcggacctggatgatttttccaagcagctgcaacagtctatgagctctgcggactctacgcaggcttaa

SEQ ID NO: 481 - DNA, 2016 bp, Artificial Sequence
  Description of Artificial Sequence: Synthetic polynucleotide
atgcaccatcatcaccatcatggtggttctggttcgccgatacttggttattggaagattaaaggactggttcagcccacacgcctcctgctagaatacttagaggaaaaatatgaagagcacctgtacgaacgtgatgagggggacaaatggcgaaacaagaaatttgaattgggcttagaatttccaaatttgccgtattatatcgatggcgacgtaaaactgacccaatcaatggccattattcgctacatcgcagataaacataacatgctgggtggctgccctaaagaacgggctgagatctccatgctggaaggtgcggtgctcgacattcgctacggcgtcagtagaattgcgtatagcaaggatttcgaaactttaaaagtggatttcctgagcaaacttccggagatgctgaaaatgtttgaggataggctttgtcataagacgtatctcaatggtgatcatgttacccacccggactttatgctgtacgacgcccttgatgtcgttctgtatatggatcccatgtgcctggacgccttcccgaaattagtgtgttttaaaaaacgtatcgaagcgattccacagatcgataaatacttgaagtcttctaaatatattgcttggcctctgcaaggctggcaggcaacgttcggtgggggagatcatccgccaaaatcagatctggtgccgcgtgggagccctggcatacaccgcgacggtggttctggtgagaacctgtactttcaaagctcagataatgggcctcaaaaccagcgcaacgctccacgtataaccttcggtggcccgtctgactccacaggcagcaaccagaatggtgagcgtagtggagccaggtctaagcagcgccgtccccagggtctgccgaacaacacggcgagctggtttactccgcttacccaacacggtaaagaagacttaaaattcccgcccggccagggcgtcccgatcaacactaactcttccccggatgatcagattggttattaccgcagagcaactcgtcggattcgcggcggcgacggtaaaatgaaagatttgccaccgcgttggtacttttactatctcggcaccggtccggaagctgatctgccctacggggcagtaaaggacgggatcgtttgggtggctgcggaaggtgccctgaatactccaaaagatcatatcggcacccgtaaccctgctaataacgctgcgatcccactgcaactgcctcccggtacaactctgccaaaaggcttctatgcagaagggtcgcgtggtggcagccaggcgagtagccgtagcagctcccgctctcgcaactcgtcccgtaactccactccgggctcttctcgcggcacgtccccggctcgtatggcaggtaacggtggtgacgctgctctggcgctgctactgctggacaggctgaaccagctggagtcgaagatgagtggtaaaggccaacagcagcagggccagaccgttaccaaaaagagcgcagctgaagcatctaaaaaaccgcgacagaaacgtaccgcgactaaagcgtacaatgtaacacaggccttcggtcgtcgaggtccggagcaaactcaaggaaactttggcgatcaggaattaatccgccaggggaccgactacaaacactggccgcaaattgcccagttcgccccatccgctagtgcattcttcggtatgagccgcatcggcatggaagtaacgccaagtggtacgtggctgacctacaccggtgctatcaagcttgatgacaaggacccgaactttaaagaccaggttattctgcttaacaaacatattgatgcctataaaactttcccgccgaccgaacccaaaaaggacaaaaagaaaaaagctgatgaaacccaggctctaccgcagcgtcagaaaaaacagcaaactgtgactctgctgccagctgcggacctggatgatttttccaagcagctgcaacagtctatgagctctgcggactctacgcaggcttaa

SEQ ID NO: 482 - DNA, 2016 bp, Artificial Sequence
  Description of Artificial Sequence: Synthetic polynucleotide
atgcaccatcatcaccatcatggtggttctggttcgccgatacttggttattggaagattaaaggactggttcagcccacacgcctcctgctagaatacttagaggaaaaatatgaagagcacctgtacgaacgtgatgagggggacaaatggcgaaacaagaaatttgaattgggcttagaatttccaaatttgccgtattatatcgatggcgacgtaaaactgacccaatcaatggccattattcgctacatcgcagataaacataacatgctgggtggctgccctaaagaacgggctgagatctccatgctggaaggtgcggtgctcgacattcgctacggcgtcagtagaattgcgtatagcaaggatttcgaaactttaaaagtggatttcctgagcaaacttccggagatgctgaaaatgtttgaggataggctttgtcataagacgtatctcaatggtgatcatgttacccacccggactttatgctgtacgacgcccttgatgtcgttctgtatatggatcccatgtgcctggacgccttcccgaaattagtgtgttttaaaaaacgtatcgaagcgattccacagatcgataaatacttgaagtcttctaaatatattgcttggcctctgcaaggctggcaggcaacgttcggtgggggagatcatccgccaaaatcagatctggtgccgcgtgggagccctggcatacaccgcgacggtggttctggtgagaacctgtactttcaaagctcagataatgggcctcaaaaccagcgcaacgctccacgtataaccttcggtggcccgtctgactccacaggcagcaaccagaatggtgagcgtagtggagccaggtctaagcagcgccgtccccagggtctgccgaacaacacggcgagctggtttactccgcttacccaacacggtaaagaagacttaaaattcccgcctggccagggcgtcccgatcaacactaactcttccccggatgatcagattggttattaccgcagagcaactcgtcggattcgcggcggcgacggtaaaatgaaagatttgcccccgcgttggtacttttactatctcggcaccggtccggaagctgatctgccctacgggcaagttaagccagggatcgtatgggtggctgaagaaggtgccctgaatactccaaaagatcatatcggcacccgtaaccctgctaataacgctgcgatccctctgcaactgcctccgggtacaactctgccaaaaggcttctatgcagaagggtcgcgtggtggcagccaggcgagtagccgtagcagctcccgctctcgcaactcgtcccgtaactccactccgggctcttctcgcggcacgtccccggctcgtatggcaggtaacggtggtgacgctgctctggcgctgctactgctggacaggctgaaccagctggagtcgaagatgagtggtaaaggccaacagcagcagggccagaccgttaccaaaaagagcgcagctgaagcatctaaaaaaccgcgacagaaacgtaccgcgactaaagcgtacaatgtaacacaggccttcggtcgtcgaggtccggagcaaactcaaggaaactttggcgatcaggaattaatccgccaggggaccgactacaaacactggccgcaaattgcccagttcgccccatccgctagtgcattcttcggtatgagccgcatcggcatggaagtaacgccaagtggtacgtggctgacctacaccggtgctatcaagcttgatgacaaggacccgaactttaaagaccaggttattctgcttaacaaacatattgatgcctataaaactttcccgccgaccgaacccaaaaaggacaaaaagaaaaaagctgatgaaacccaggctctaccgcagcgtcagaaaaaacagcaaactgtgactctgctgccagctgcggacctggatgatttttccaagcagctgcaacagtctatgagctctgcggactctacgcaggcttaa

SEQ ID NO: 483 - DNA, 2016 bp, Artificial Sequence
  Description of Artificial Sequence: Synthetic polynucleotide
atgcaccatcatcaccatcatggtggttctggttcgccgatacttggttattggaagattaaaggactggttcagcccacacgcctcctgctagaatacttagaggaaaaatatgaagagcacctgtacgaacgtgatgagggggacaaatggcgaaacaagaaatttgaattgggcttagaatttccaaatttgccgtattatatcgatggcgacgtaaaactgacccaatcaatggccattattcgctacatcgcagataaacataacatgctgggtggctgccctaaagaacgggctgagatctccatgctggaaggtgcggtgctcgacattcgctacggcgtcagtagaattgcgtatagcaaggatttcgaaactttaaaagtggatttcctgagcaaacttccggagatgctgaaaatgtttgaggataggctttgtcataagacgtatctcaatggtgatcatgttacccacccggactttatgctgtacgacgcccttgatgtcgttctgtatatggatcccatgtgcctggacgccttcccgaaattagtgtgttttaaaaaacgtatcgaagcgattccacagatcgataaatacttgaagtcttctaaatatattgcttggcctctgcaaggctggcaggcaacgttcggtgggggagatcatccgccaaaatcagatctggtgccgcgtgggagccctggcatacaccgcgacggtggttctggtgagaacctgtactttcaaagctcagataatgggcctcaaaaccagcgcaacgctccacgtataaccttcggtggcccgtctgactccacaggcagcaaccagaatggtgagcgtagtggagccaggtctaagcagcgccgtccccagggtctgccgaacaacacggcgagctggtttactccgcttacccaattcggtaaagaagacttaaaattcccgcctggccagggcgtcccgatcaacactaactcttccccggatgatcagattggttattaccgcagagcaactcgtcggattcgcggcggcgacggtaaaatgaaagatttgccaccgaaatggtacttttactatctcggcaccggtccgcatgctgatctgccctacgggcaaaagaaggacggggttgtatgggtggctcggcctggtgccctgaatactccaaaagatcatatcggcacccgtaaccctgctaataacgctgcgatccccctgcaactgcctccgggtacaaaactgccaaaaggcttctatgcagaagggtcgcgtggtggcagccaggcgagtagccgtagcagctcccgctctcgcaactcgtcccgtaactccactccgggctcttctcgcggcacgtccccggctcgtatggcaggtaacggtggtgacgctgctctggcgctgctactgctggacaggctgaaccagctggagtcgaagatgagtggtaaaggccaacagcagcagggccagaccgttaccaaaaagagcgcagctgaagcatctaaaaaaccgcgacagaaacgtaccgcgactaaagcgtacaatgtaacacaggccttcggtcgtcgaggtccggagcaaactcaaggaaactttggcgatcaggaattaatccgccaggggaccgactacaaacactggccgcaaattgcccagttcgccccatccgctagtgcattcttcggtatgagccgcatcggcatggaagtaacgccaagtggtacgtggctgacctacaccggtgctatcaagcttgatgacaaggacccgaactttaaagaccaggttattctgcttaacaaacatattgatgcctataaaactttcccgccgaccgaacccaaaaaggacaaaaagaaaaaagctgatgaaacccaggctctaccgcagcgtcagaaaaaacagcaaactgtgactctgctgccagctgcggacctggatgatttttccaagcagctgcaacagtctatgagctctgcggactctacgcaggcttaa

SEQ ID NO: 484 - DNA, 2016 bp, Artificial Sequence
  Description of Artificial Sequence: Synthetic polynucleotide
atgcaccatcatcaccatcatggtggttctggttcgccgatacttggttattggaagattaaaggactggttcagcccacacgcctcctgctagaatacttagaggaaaaatatgaagagcacctgtacgaacgtgatgagggggacaaatggcgaaacaagaaatttgaattgggcttagaatttccaaatttgccgtattatatcgatggcgacgtaaaactgacccaatcaatggccattattcgctacatcgcagataaacataacatgctgggtggctgccctaaagaacgggctgagatctccatgctggaaggtgcggtgctcgacattcgctacggcgtcagtagaattgcgtatagcaaggatttcgaaactttaaaagtggatttcctgagcaaacttccggagatgctgaaaatgtttgaggataggctttgtcataagacgtatctcaatggtgatcatgttacccacccggactttatgctgtacgacgcccttgatgtcgttctgtatatggatcccatgtgcctggacgccttcccgaaattagtgtgttttaaaaaacgtatcgaagcgattccacagatcgataaatacttgaagtcttctaaatatattgcttggcctctgcaaggctggcaggcaacgttcggtgggggagatcatccgccaaaatcagatctggtgccgcgtgggagccctggcatacaccgcgacggtggttctggtgagaacctgtactttcaaagctcagataatgggcctcaaaaccagcgcaacgctccacgtataaccttcggtggcccgtctgactccacaggcagcaaccagaatggtgagcgtagtggagccaggtctaagcagcgccgtccccagggtctgccgaacaacacggcgagctggtttactgcgcttacccaacacggtaaagaagacttaaaattcccgcgtggccagggcgtcccgatcaacactaactcttccccggatgatcagattggttattaccgcagagcaactcgtcggattcgcggcggcgacggtaaaatgaaagatttgtctccgcgttggtacttttactatctcggcaccggtccggaagctggactgccctacggggcaaacaaggacgggatcatttgggtggctaccgaaggtgccctgaatactccaaaagatcatatcggcacccgtaaccctgctaataacgctgcgatcgttctgcaactgcctcagggtacaactctgccaaaaggcttctatgcagaagggtcgcgtggtggcagccaggcgagtagccgtagcagctcccgctctcgcaactcgtcccgtaactccactccgggctcttctcgcggcacgtccccggctcgtatggcaggtaacggtggtgacgctgctctggcgctgctactgctggacaggctgaaccagctggagtcgaagatgagtggtaaaggccaacagcagcagggccagaccgttaccaaaaagagcgcagctgaagcatctaaaaaaccgcgacagaaacgtaccgcgactaaagcgtacaatgtaacacaggccttcggtcgtcgaggtccggagcaaactcaaggaaactttggcgatcaggaattaatccgccaggggaccgactacaaacactggccgcaaattgcccagttcgccccatccgctagtgcattcttcggtatgagccgcatcggcatggaagtaacgccaagtggtacgtggctgacctacaccggtgctatcaagcttgatgacaatgacccgaactttaaagaccaggttattctgcttaacaaacatattgatgcctataaaactttcccgccgaccgaacccaaaaaggacaaaaagaaaaaagctgatgaaacccaggctctaccgcagcgtcagaaaaaacagcaaactgtgactctgctgccagctgcggacctggatgatttttccaagcagctgcaacagtctatgagctctgcggactctacgcaggcttaa

SEQ ID NO: 485 - DNA, 2016 bp, Artificial Sequence
  Description of Artificial Sequence: Synthetic polynucleotide
atgcaccatcatcaccatcatggtggttctggttcgccgatacttggttattggaagattaaaggactggttcagcccacacgcctcctgctagaatacttagaggaaaaatatgaagagcacctgtacgaacgtgatgagggggacaaatggcgaaacaagaaatttgaattgggcttagaatttccaaatttgccgtattatatcgatggcgacgtaaaactgacccaatcaatggccattattcgctacatcgcagataaacataacatgctgggtggctgccctaaagaacgggctgagatctccatgctggaaggtgcggtgctcgacattcgctacggcgtcagtagaattgcgtatagcaaggatttcgaaactttaaaagtggatttcctgagcaaacttccggagatgctgaaaatgtttgaggataggctttgtcataagacgtatctcaatggtgatcatgttacccacccggactttatgctgtacgacgcccttgatgtcgttctgtatatggatcccatgtgcctggacgccttcccgaaattagtgtgttttaaaaaacgtatcgaagcgattccacagatcgataaatacttgaagtcttctaaatatattgcttggcctctgcaaggctggcaggcaacgttcggtgggggagatcatccgccaaaatcagatctggtgccgcgtgggagccctggcatacaccgcgacggtggttctggtgagaacctgtactttcaaagctcagataatgggcctcaaaaccagcgcaacgctccacgtataaccttcggtggcccgtctgactccacaggcagcaaccagaatggtgagcgtagtggagccaggtctaagcagcgccgtccccagggtctgccgaacaacacggcgagctggtttactgcgcttacccaacacggtaaagaagacttaaaattcccggcaggccagggcgtcccgatcaacactaactcttccccggatgatcagattggttattaccgcagagcaactcgtcggattcgcggcggcgacggtaaaatgaaagatttgtctccgcgttggtacttttactatctcggcaccggtccggaagctggactgccctacggggcaaacaaggacgggatcatttgggtggctaccgaaggtgccctgaatactccaaaagatcatatcggcacccgtaaccctgctaataacgctgcgatcgttctgcaactgcctcagggtacaactctgccaaaaggcttctatgcagaagggtcgcgtggtggcagccaggcgagtagccgtagcagctcccgctctcgcaactcgtcccgtaactccactccgggctcttctcgcggcacgtccccggctcgtatggcaggtaacggtggtgacgctgctctggcgctgctactgctggacaggctgaaccagctggagtcgaagatgagtggtaaaggccaacagcagcagggccagaccgttaccaaaaagagcgcagctgaagcatctaaaaaaccgcgacagaaacgtaccgcgactaaagcgtacaatgtaacacaggccttcggtcgtcgaggtccggagcaaactcaaggaaactttggcgatcaggaattaatccgccaggggaccgactacaaacactggccgcaaattgcccagttcgccccatccgctagtgcattcttcggtatgagccgcatcggcatggaagtaacgccaagtggtacgtggctgacctacaccggtgctatcaagcttgatgacaaggacccgaactttaaagaccaggttattctgcttaacaaacatattgatgcctataaaactttcccgccgaccgaacccaaaaaggacaaaaagaaaaaagctgatgaaacccaggctctaccgcagcgtcagaaaaaacagcaaactgtgactctgctgccagctgcggacctggatgatttttccaagcagctgcaacagtctatgagctctgcggactctacgcaggcttaa

SEQ ID NO: 486 - DNA, 2016 bp, Artificial Sequence
  Description of Artificial Sequence: Synthetic polynucleotide
atgcaccatcatcaccatcatggtggttctggttcgccgatacttggttattggaagattaaaggactggttcagcccacacgcctcctgctagaatacttagaggaaaaatatgaagagcacctgtacgaacgtgatgagggggacaaatggcgaaacaagaaatttgaattgggcttagaatttccaaatttgccgtattatatcgatggcgacgtaaaactgacccaatcaatggccattattcgctacatcgcagataaacataacatgctgggtggctgccctaaagaacgggctgagatctccatgctggaaggtgcggtgctcgacattcgctacggcgtcagtagaattgcgtatagcaaggatttcgaaactttaaaagtggatttcctgagcaaacttccggagatgctgaaaatgtttgaggataggctttgtcataagacgtatctcaatggtgatcatgttacccacccggactttatgctgtacgacgcccttgatgtcgttctgtatatggatcccatgtgcctggacgccttcccgaaattagtgtgttttaaaaaacgtatcgaagcgattccacagatcgataaatacttgaagtcttctaaatatattgcttggcctctgcaaggctggcaggcaacgttcggtgggggagatcatccgccaaaatcagatctggtgccgcgtgggagccctggcatacaccgcgacggtggttctggtgagaacctgtactttcaaagctcagataatgggcctcaaaaccagcgcaacgctccacgtataaccttcggtggcccgtctgactccacaggcagcaaccagaatggtgagcgtagtggagccaggtctaagcagcgccgtccccagggtctgccgaacaacacggcgagctggtttactggccttacccaacacggtaaagaagacttaaaattcccgcccggccagggcgtcccgatcaacactaactcttccccggatgatcagattggttattaccgcagagcaactcgtcggattcgcggcggcgacggtaaaatgaaagatttgcctccgcgttggtacttttactatctcggcaccggtccggaagctgatctgccctacgggcaagtgaaggacgggatcttttgggtggctgccgaaggtgccctgaatactccaaaagatcatatcggcacccgtaaccctgctaataacgctgcgatcccgctgcaactgcctccaggtacaactctgccaaaaggcttctatgcagaagggtcgcgtggtggcagccaggcgagtagccgtagcagctcccgctctcgcaactcgtcccgtaactccactccgggctcttctcgcggcacgtccccggctcgtatggcaggtaacggtggtgacgctgctctggcgctgctactgctggacaggctgaaccagctggagtcgaagatgagtggtaaaggccaacagcagcagggccagaccgttaccaaaaagagcgcagctgaagcatctaaaaaaccgcgacagaaacgtaccgcgactaaagcgtacaatgtaacacaggccttcggtcgtcgaggtccggagcaaactcaaggaaactttggcgatcaggaattaatccgccaggggaccgactacaaacactggccgcaaattgcccagttcgccccatccgctagtgcattcttcggtatgagccgcatcggcatggaagtaacgccaagtggtacgtggctgacctacaccggtgctatcaagcttgatgacaaggacccgaactttaaagaccaggttattctgcttaacaaacatattgatgcctataaaactttcccgccgaccgaacccaaaaaggacaaaaagaaaaaagctgatgaaacccaggctctaccgcagcgtcagaaaaaacagcaaactgtgactctgctgccagctgcggacctggatgatttttccaagcagctgcaacagtctatgagctctgcggactctacgcaggcttaa

SEQ ID NO: 487 - DNA, 2016 bp, Artificial Sequence
  Description of Artificial Sequence: Synthetic polynucleotide
atgcaccatcatcaccatcatggtggttctggttcgccgatacttggttattggaagattaaaggactggttcagcccacacgcctcctgctagaatacttagaggaaaaatatgaagagcacctgtacgaacgtgatgagggggacaaatggcgaaacaagaaatttgaattgggcttagaatttccaaatttgccgtattatatcgatggcgacgtaaaactgacccaatcaatggccattattcgctacatcgcagataaacataacatgctgggtggctgccctaaagaacgggctgagatctccatgctggaaggtgcggtgctcgacattcgctacggcgtcagtagaattgcgtatagcaaggatttcgaaactttaaaagtggatttcctgagcaaacttccggagatgctgaaaatgtttgaggataggctttgtcataagacgtatctcaatggtgatcatgttacccacccggactttatgctgtacgacgcccttgatgtcgttctgtatatggatcccatgtgcctggacgccttcccgaaattagtgtgttttaaaaaacgtatcgaagcgattccacagatcgataaatacttgaagtcttctaaatatattgcttggcctctgcaaggctggcaggcaacgttcggtgggggagatcatccgccaaaatcagatctggtgccgcgtgggagccctggcatacaccgcgacggtggttctggtgagaacctgtactttcaaagctcagataatgggcctcaaaaccagcgcaacgctccacgtataaccttcggtggcccgtctgactccacaggcagcaaccagaatggtgagcgtagtggagccaggtctaagcagcgccgtccccagggtctgccgaacaacacggcgagctggtttactgcgcttacccaacacggtaaagaagacttaaaattcccgcgtggccagggcgtcccgatcaacactaactcttccccggatgatcagattggttattaccgcagagcaactcgtcggattcgcggcggcgacggtaaaatgaaagatttgtctccgcgttggtacttttactatctcggcaccggtccggaagctggactgccctacggggcaaacaaggacgggatcatttgggtggctaccgaaggtgccctgaatactccaaaagatcatatcggcacccgtaaccctgctaataacgctgcgatcgttctgcaactgcctcagggtacaactctgccaaaaggcttctatgcagaagggtcgcgtggtggcagccaggcgagtagccgtagcagctcccgctctcgcaactcgtcccgtaactccactccgggctcttctcgcggcacgtccccggctcgtatggcaggtaacggtggtgacgctgctctggcgctgctactgctggacaggctgaaccagctggagtcgaagatgagtggtaaaggccaacagcagcagggccagaccgttaccaaaaagagcgcagctgaagcatctaaaaaaccgcgacagaaacgtaccgcgactaaagcgtacaatgtaacacaggccttcggtcgtcgaggtccggagcaaactcaaggaaactttggcgatcaggaattattgcgccaggggaccgactacaaacactggccgcaaattgcccagttcgccccatccgctagtgcattcttcggtatgagccgcatcggcatggaagtaacgccaagtggtacgtggctgacctacaccggtgctatcaagcttgatgacaaggacccgaactttaaagaccaggttattctgcttaacaaacatattgatgcctataaaactttcccgccgaccgaacccaaaaaggacaaaaagaaaaaagctgatgaaacccaggctctaccgcagcgtcagaaaaaacagcaaactgtgactctgctgccagctgcggacctggatgatttttccaagcagctgcaacagtctatgagctctgcggactctacgcaggcttaa

SEQ ID NO: 488 - DNA, 2016 bp, Artificial Sequence
  Description of Artificial Sequence: Synthetic polynucleotide
atgcaccatcatcaccatcatggtggttctggttcgccgatacttggttattggaagattaaaggactggttcagcccacacgcctcctgctagaatacttagaggaaaaatatgaagagcacctgtacgaacgtgatgagggggacaaatggcgaaacaagaaatttgaattgggcttagaatttccaaatttgccgtattatatcgatggcgacgtaaaactgacccaatcaatggccattattcgctacatcgcagataaacataacatgctgggtggctgccctaaagaacgggctgagatctccatgctggaaggtgcggtgctcgacattcgctacggcgtcagtagaattgcgtatagcaaggatttcgaaactttaaaagtggatttcctgagcaaacttccggagatgctgaaaatgtttgaggataggctttgtcataagacgtatctcaatggtgatcatgttacccacccggactttatgctgtacgacgcccttgatgtcgttctgtatatggatcccatgtgcctggacgccttcccgaaattagtgtgttttaaaaaacgtatcgaagcgattccacagatcgataaatacttgaagtcttctaaatatattgcttggcctctgcaaggctggcaggcaacgttcggtgggggagatcatccgccaaaatcagatctggtgccgcgtgggagccctggcatacaccgcgacggtggttctggtgagaacctgtactttcaaagctcagataatgggcctcaaaaccagcgcaacgctccacgtataaccttcggtggcccgtctgactccacaggcagcaaccagaatggtgagcgtagtggagccaggtctaagcagcgccgtccccagggtctgccgaacaacacggcgagctggtttactgcgcttacccaacacggtaaagaagacttaaaattcccgcgtggccagggcgtcccgatcaacactaactcttccccggatgatcagattggttattaccgcagagcaactcgtcggattcgcggcggcgacggtaaaatgaaagatttgtctccgcgttgggccttttactatctcggcaccggtccggaagctggactgccctacggggcaaacaaggacgggatcatttgggtggctaccgaaggtgccctgaatactccaaaagatcatatcggcacccgtaaccctgctaataacgctgcgatcgttctgcaactgcctcagggtacaactctgccaaaaggcttctatgcagaagggtcgcgtggtggcagccaggcgagtagccgtagcagctcccgctctcgcaactcgtcccgtaactccactccgggctcttctcgcggcacgtccccggctcgtatggcaggtaacggtggtgacgctgctctggcgctgctactgctggacaggctgaaccagctggagtcgaagatgagtggtaaaggccaacagcagcagggccagaccgttaccaaaaagagcgcagctgaagcatctaaaaaaccgcgacagaaacgtaccgcgactaaagcgtacaatgtaacacaggccttcggtcgtcgaggtccggagcaaactcaaggaaactttggcgatcaggaattaatccgccaggggaccgactacaaacactggccgcaaattgcccagttcgccccatccgctagtgcattcttcggtatgagccgcatcggcatggaagtaacgccaagtggtacgtggctgacctacaccggtgctatcaagcttgatgacaaggacccgaactttaaagaccaggttattctgcttaacaaacatattgatgcctataaaactttcccgccgaccgaacccaaaaaggacaaaaagaaaaaagctgatgaaacccaggctctaccgcagcgtcagaaaaaacagcaaactgtgactctgctgccagctgcggacctggatgatttttccaagcagctgcaacagtctatgagctctgcggactctacgcaggcttaa

SEQ ID NO: 489 - DNA, 2016 bp, Artificial Sequence
  Description of Artificial Sequence: Synthetic polynucleotide
atgcaccatcatcaccatcatggtggttctggttcgccgatacttggttattggaagattaaaggactggttcagcccacacgcctcctgctagaatacttagaggaaaaatatgaagagcacctgtacgaacgtgatgagggggacaaatggcgaaacaagaaatttgaattgggcttagaatttccaaatttgccgtattatatcgatggcgacgtaaaactgacccaatcaatggccattattcgctacatcgcagataaacataacatgctgggtggctgccctaaagaacgggctgagatctccatgctggaaggtgcggtgctcgacattcgctacggcgtcagtagaattgcgtatagcaaggatttcgaaactttaaaagtggatttcctgagcaaacttccggagatgctgaaaatgtttgaggataggctttgtcataagacgtatctcaatggtgatcatgttacccacccggactttatgctgtacgacgcccttgatgtcgttctgtatatggatcccatgtgcctggacgccttcccgaaattagtgtgttttaaaaaacgtatcgaagcgattccacagatcgataaatacttgaagtcttctaaatatattgcttggcctctgcaaggctggcaggcaacgttcggtgggggagatcatccgccaaaatcagatctggtgccgcgtgggagccctggcatacaccgcgacggtggttctggtgagaacctgtactttcaaagctcagataatgggcctcaaaaccagcgcaacgctccacgtataaccttcggtggcccgtctgactccacaggcagcaaccagaatggtgagcgtagtggagccaggtctaagcagcgccgtccccagggtctgccgaacaacacggcgagctggtttactgcgcttacccaacacggtaaagaagacttaaaattcccgcgtggccagggcgtcccgatcaacactaactcttccccggatgatcagattggttattaccgcagagcaactcgtcggattcgcggcggcgacggtaaaatgaaagatttgtctccgcgttggtacttttactatctcggcaccggtccggaagctggactgccctacggggcaaacaaggacgggatcatttgggtggctaccgaaggtgccctgaatactccaaaagatcatatcggcacccgtaaccctgctaataactcggcgatcgttctgcaactgcctcagggtacaactctgccaaaaggcttctatgcagaagggtcgcgtggtggcagccaggcgagtagccgtagcagctcccgctctcgcaactcgtcccgtaactccactccgggctcttctcgcggcacgtccccggctcgtatggcaggtaacggtggtgacgctgctctggcgctgctactgctggacaggctgaaccagctggagtcgaagatgagtggtaaaggccaacagcagcagggccagaccgttaccaaaaagagcgcagctgaagcatctaaaaaaccgcgacagaaacgtaccgcgactaaagcgtacaatgtaacacaggccttcggtcgtcgaggtccggagcaaactcaaggaaactttggcgatcaggaattaatccgccaggggaccgactacaaacactggccgcaaattgcccagttcgccccatccgctagtgcattcttcggtatgagccgcatcggcatggaagtaacgccaagtggtacgtggctgacctacaccggtgctatcaagcttgatgacaaggacccgaactttaaagaccaggttattctgcttaacaaacatattgatgcctataaaactttcccgccgaccgaacccaaaaaggacaaaaagaaaaaagctgatgaaacccaggctctaccgcagcgtcagaaaaaacagcaaactgtgactctgctgccagctgcggacctggatgatttttccaagcagctgcaacagtctatgagctctgcggactctacgcaggcttaa

SEQ ID NO: 490 - DNA, 2016 bp, Artificial Sequence
  Description of Artificial Sequence: Synthetic polynucleotide
atgcaccatcatcaccatcatggtggttctggttcgccgatacttggttattggaagattaaaggactggttcagcccacacgcctcctgctagaatacttagaggaaaaatatgaagagcacctgtacgaacgtgatgagggggacaaatggcgaaacaagaaatttgaattgggcttagaatttccaaatttgccgtattatatcgatggcgacgtaaaactgacccaatcaatggccattattcgctacatcgcagataaacataacatgctgggtggctgccctaaagaacgggctgagatctccatgctggaaggtgcggtgctcgacattcgctacggcgtcagtagaattgcgtatagcaaggatttcgaaactttaaaagtggatttcctgagcaaacttccggagatgctgaaaatgtttgaggataggctttgtcataagacgtatctcaatggtgatcatgttacccacccggactttatgctgtacgacgcccttgatgtcgttctgtatatggatcccatgtgcctggacgccttcccgaaattagtgtgttttaaaaaacgtatcgaagcgattccacagatcgataaatacttgaagtcttctaaatatattgcttggcctctgcaaggctggcaggcaacgttcggtgggggagatcatccgccaaaatcagatctggtgccgcgtgggagccctggcatacaccgcgacggtggttctggtgagaacctgtactttcaaagctcagataatgggcctcaaaaccagcgcaacgctccacgtataaccttcggtggcccgtctgactccacaggcagcaaccagaatggtgagcgtagtggagccaggtctaagcagcgccgtccccagggtctgccgaacaacacggcgagctggtttactgcgcttacccaacacggtaaagaagacttaaaattcccgcgtggccagggcgtcccgatcaacactaactcttccccggatgatcagattggttattaccgcagagcaactcgtcggattcgcggcggcgacggtaaaatgaaagatttgtctccgcgttggtacttttactatctcggcaccggtccggaagctggactgccctacggggcaaacaaggacgggatcatttgggtggctaccgaaggtgccctgaatactccaaaagatcatatcggcacccgtaaccctgctaataacgctgcgatcgttctgcaactgcctaaaggtacaactctgccaaaaggcttctatgcagaagggtcgcgtggtggcagccaggcgagtagccgtagcagctcccgctctcgcaactcgtcccgtaactccactccgggctcttctcgcggcacgtccccggctcgtatggcaggtaacggtggtgacgctgctctggcgctgctactgctggacaggctgaaccagctggagtcgaagatgagtggtaaaggccaacagcagcagggccagaccgttaccaaaaagagcgcagctgaagcatctaaaaaaccgcgacagaaacgtaccgcgactaaagcgtacaatgtaacacaggccttcggtcgtcgaggtccggagcaaactcaaggaaactttggcgatcaggaattaatccgccaggggaccgactacaaacactggccgcaaattgcccagttcgccccatccgctagtgcattcttcggtatgagccgcatcggcatggaagtaacgccaagtggtacgtggctgacctacaccggtgctatcaagcttgatgacaaggacccgaactttaaagaccaggttattctgcttaacaaacatattgatgcctataaaactttcccgccgaccgaacccaaaaaggacaaaaagaaaaaagctgatgaaacccaggctctaccgcagcgtcagaaaaaacagcaaactgtgactctgctgccagctgcggacctggatgatttttccaagcagctgcaacagtctatgagctctgcggactctacgcaggcttaa

SEQ ID NO: 491 - DNA, 2016 bp, Artificial Sequence
  Description of Artificial Sequence: Synthetic polynucleotide
atgcaccatcatcaccatcatggtggttctggttcgccgatacttggttattggaagattaaaggactggttcagcccacacgcctcctgctagaatacttagaggaaaaatatgaagagcacctgtacgaacgtgatgagggggacaaatggcgaaacaagaaatttgaattgggcttagaatttccaaatttgccgtattatatcgatggcgacgtaaaactgacccaatcaatggccattattcgctacatcgcagataaacataacatgctgggtggctgccctaaagaacgggctgagatctccatgctggaaggtgcggtgctcgacattcgctacggcgtcagtagaattgcgtatagcaaggatttcgaaactttaaaagtggatttcctgagcaaacttccggagatgctgaaaatgtttgaggataggctttgtcataagacgtatctcaatggtgatcatgttacccacccggactttatgctgtacgacgcccttgatgtcgttctgtatatggatcccatgtgcctggacgccttcccgaaattagtgtgttttaaaaaacgtatcgaagcgattccacagatcgataaatacttgaagtcttctaaatatattgcttggcctctgcaaggctggcaggcaacgttcggtgggggagatcatccgccaaaatcagatctggtgccgcgtgggagccctggcatacaccgcgacggtggttctggtgagaacctgtactttcaaagctcagataatgggcctcaaaaccagcgcaacgctccacgtataaccttcggtggcccgtctgactccacaggcagcaaccagaatggtgagcgtagtggagccaggtctaagcagcgccgtccccagggtctgccgaacaacacggcgagctggtttactgcgcttacccaacacggtaaagaagacttaaaattcccgcgtggccagggcgtcccgatcaacactaactcttccccggatgatcagattggttattaccgcagagcaactcgtcggattcgcggcggcgacggtaaaatgaaagatttgtctccgcgttggtacttttactatctcggcaccggtccggaagctggactgccctacggggcaaacaaggacgggatcacctgggtggctaccgaaggtgccctgaatactccaaaagatcatatcggcacccgtaaccctgctaataacgctgcgatcgttctgcaactgcctcagggtacaactctgccaaaaggcttctatgcagaagggtcgcgtggtggcagccaggcgagtagccgtagcagctcccgctctcgcaactcgtcccgtaactccactccgggctcttctcgcggcacgtccccggctcgtatggcaggtaacggtggtgacgctgctctggcgctgctactgctggacaggctgaaccagctggagtcgaagatgagtggtaaaggccaacagcagcagggccagaccgttaccaaaaagagcgcagctgaagcatctaaaaaaccgcgacagaaacgtaccgcgactaaagcgtacaatgtaacacaggccttcggtcgtcgaggtccggagcaaactcaaggaaactttggcgatcaggaattaatccgccaggggaccgactacaaacactggccgcaaattgcccagttcgccccatccgctagtgcattcttcggtatgagccgcatcggcatggaagtaacgccaagtggtacgtggctgacctacaccggtgctatcaagcttgatgacaaggacccgaactttaaagaccaggttattctgcttaacaaacatattgatgcctataaaactttcccgccgaccgaacccaaaaaggacaaaaagaaaaaagctgatgaaacccaggctctaccgcagcgtcagaaaaaacagcaaactgtgactctgctgccagctgcggacctggatgatttttccaagcagctgcaacagtctatgagctctgcggactctacgcaggcttaa

SEQ ID NO: 492 - DNA, 2016 bp, Artificial Sequence
  Description of Artificial Sequence: Synthetic polynucleotide
atgcaccatcatcaccatcatggtggttctggttcgccgatacttggttattggaagattaaaggactggttcagcccacacgcctcctgctagaatacttagaggaaaaatatgaagagcacctgtacgaacgtgatgagggggacaaatggcgaaacaagaaatttgaattgggcttagaatttccaaatttgccgtattatatcgatggcgacgtaaaactgacccaatcaatggccattattcgctacatcgcagataaacataacatgctgggtggctgccctaaagaacgggctgagatctccatgctggaaggtgcggtgctcgacattcgctacggcgtcagtagaattgcgtatagcaaggatttcgaaactttaaaagtggatttcctgagcaaacttccggagatgctgaaaatgtttgaggataggctttgtcataagacgtatctcaatggtgatcatgttacccacccggactttatgctgtacgacgcccttgatgtcgttctgtatatggatcccatgtgcctggacgccttcccgaaattagtgtgttttaaaaaacgtatcgaagcgattccacagatcgataaatacttgaagtcttctaaatatattgcttggcctctgcaaggctggcaggcaacgttcggtgggggagatcatccgccaaaatcagatctggtgccgcgtgggagccctggcatacaccgcgacggtggttctggtgagaacctgtactttcaaagctcagataatgggcctcaaaaccagcgcaacgctccacgtataaccttcggtggcccgtctgactccacaggcagcaaccagaatggtgagcgtagtggagccaggtctaagcagcgccgtccccagggtctgccgaacaacacggcgagctggtttactgcgcttacccaacacggtaaagaagacttaaaattcccgcgtggccagggcgtcccgatcaacactaactcttccccggatgatcagattggttattaccgcagagcaactcgtcggattcgcggcggcgacggtaaaatgaaagatttgtctccgcgttggtacttttactatctcggcaccggtccggaagctggactgccctacggggcaaacaaggacgggatcatttgggtggctaccgaaggtgccctgaatactccaaaagatcatatcggcacccgtaaccctgctaataacgctgcgtgggttctgcaactgcctcagggtacaactctgccaaaaggcttctatgcagaagggtcgcgtggtggcagccaggcgagtagccgtagcagctcccgctctcgcaactcgtcccgtaactccactccgggctcttctcgcggcacgtccccggctcgtatggcaggtaacggtggtgacgctgctctggcgctgctactgctggacaggctgaaccagctggagtcgaagatgagtggtaaaggccaacagcagcagggccagaccgttaccaaaaagagcgcagctgaagcatctaaaaaaccgcgacagaaacgtaccgcgactaaagcgtacaatgtaacacaggccttcggtcgtcgaggtccggagcaaactcaaggaaactttggcgatcaggaattaatccgccaggggaccgactacaaacactggccgcaaattgcccagttcgccccatccgctagtgcattcttcggtatgagccgcatcggcatggaagtaacgccaagtggtacgtggctgacctacaccggtgctatcaagcttgatgacaaggacccgaactttaaagaccaggttattctgcttaacaaacatattgatgcctataaaactttcccgccgaccgaacccaaaaaggacaaaaagaaaaaagctgatgaaacccaggctctaccgcagcgtcagaaaaaacagcaaactgtgactctgctgccagctgcggacctggatgatttttccaagcagctgcaacagtctatgagctctgcggactctacgcaggcttaa

SEQ ID NO: 493 - DNA, 2016 bp, Artificial Sequence
  Description of Artificial Sequence: Synthetic polynucleotide
atgcaccatcatcaccatcatggtggttctggttcgccgatacttggttattggaagattaaaggactggttcagcccacacgcctcctgctagaatacttagaggaaaaatatgaagagcacctgtacgaacgtgatgagggggacaaatggcgaaacaagaaatttgaattgggcttagaatttccaaatttgccgtattatatcgatggcgacgtaaaactgacccaatcaatggccattattcgctacatcgcagataaacataacatgctgggtggctgccctaaagaacgggctgagatctccatgctggaaggtgcggtgctcgacattcgctacggcgtcagtagaattgcgtatagcaaggatttcgaaactttaaaagtggatttcctgagcaaacttccggagatgctgaaaatgtttgaggataggctttgtcataagacgtatctcaatggtgatcatgttacccacccggactttatgctgtacgacgcccttgatgtcgttctgtatatggatcccatgtgcctggacgccttcccgaaattagtgtgttttaaaaaacgtatcgaagcgattccacagatcgataaatacttgaagtcttctaaatatattgcttggcctctgcaaggctggcaggcaacgttcggtgggggagatcatccgccaaaatcagatctggtgccgcgtgggagccctggcatacaccgcgacggtggttctggtgagaacctgtactttcaaagctcagataatgggcctcaaaaccagcgcaacgctccacgtataaccttcggtggcccgtctgactccacaggcagcaaccagaatggtgagcgtagtggagccaggtctaagcagcgccgtccccagggtctgccgaacaacacggcgagctggtttactgcgcttacccaacacggtaaagaagacttaaaattcccgcgtggccagggcgtcccgatcaacactaactcttccccggatgatcagattggttattaccgcagagcaactcgtcggattcgcggcggcgacggtaaaatgaaagatttgtctccgcgttggtacttttactatctcggcaccggtccggaagctggactgccctacggggcaaacaaggacgggatcatttgggtggctaccgaaggtgccctgaatactccaaaagatcatatcggcacccgtaaccctgctaataacgctgcgatcgttctgcaactgcctcagggtacaactctgccaaaaggcttctattgcgaagggtcgcgtggtggcagccaggcgagtagccgtagcagctcccgctctcgcaactcgtcccgtaactccactccgggctcttctcgcggcacgtccccggctcgtatggcaggtaacggtggtgacgctgctctggcgctgctactgctggacaggctgaaccagctggagtcgaagatgagtggtaaaggccaacagcagcagggccagaccgttaccaaaaagagcgcagctgaagcatctaaaaaaccgcgacagaaacgtaccgcgactaaagcgtacaatgtaacacaggccttcggtcgtcgaggtccggagcaaactcaaggaaactttggcgatcaggaattaatccgccaggggaccgactacaaacactggccgcaaattgcccagttcgccccatccgctagtgcattcttcggtatgagccgcatcggcatggaagtaacgccaagtggtacgtggctgacctacaccggtgctatcaagcttgatgacaaggacccgaactttaaagaccaggttattctgcttaacaaacatattgatgcctataaaactttcccgccgaccgaacccaaaaaggacaaaaagaaaaaagctgatgaaacccaggctctaccgcagcgtcagaaaaaacagcaaactgtgactctgctgccagctgcggacctggatgatttttccaagcagctgcaacagtctatgagctctgcggactctacgcaggcttaa

SEQ ID NO: 494 - DNA, 2016 bp, Artificial Sequence
  Description of Artificial Sequence: Synthetic polynucleotide
atgcaccatcatcaccatcatggtggttctggttcgccgatacttggttattggaagattaaaggactggttcagcccacacgcctcctgctagaatacttagaggaaaaatatgaagagcacctgtacgaacgtgatgagggggacaaatggcgaaacaagaaatttgaattgggcttagaatttccaaatttgccgtattatatcgatggcgacgtaaaactgacccaatcaatggccattattcgctacatcgcagataaacataacatgctgggtggctgccctaaagaacgggctgagatctccatgctggaaggtgcggtgctcgacattcgctacggcgtcagtagaattgcgtatagcaaggatttcgaaactttaaaagtggatttcctgagcaaacttccggagatgctgaaaatgtttgaggataggctttgtcataagacgtatctcaatggtgatcatgttacccacccggactttatgctgtacgacgcccttgatgtcgttctgtatatggatcccatgtgcctggacgccttcccgaaattagtgtgttttaaaaaacgtatcgaagcgattccacagatcgataaatacttgaagtcttctaaatatattgcttggcctctgcaaggctggcaggcaacgttcggtgggggagatcatccgccaaaatcagatctggtgccgcgtgggagccctggcatacaccgcgacggtggttctggtgagaacctgtactttcaaagctcagataatgggcctcaaaaccagcgcaacgctccacgtataaccttcggtggcccgtctgactccacaggcagcaaccagaatggtgagcgtagtggagccaggtctaagcagcgccgtccccagggtctgccgaacaacacggcgagctggtttactgcgcttacccaacacggtaaagaagacttaaaattcccgcgtggccagggcgtcccgatcaacactaactcttccccggatgatcagattggttattaccgcagagcaactcgtcggattcgcggcggcgacggtaaaatgaaagatttgtctccgcgttggtacttttactatctcggcaccggtccggaagctggactgccctacggggcacaaaaggacgggatcatttgggtggctaccgaaggtgccctgaatactccaaaagatcatatcggcacccgtaaccctgctaataacgctgcgatcgttctgcaactgcctcagggtacaactctgccaaaaggcttctatgcagaagggtcgcgtggtggcagccaggcgagtagccgtagcagctcccgctctcgcaactcgtcccgtaactccactccgggctcttctcgcggcacgtccccggctcgtatggcaggtaacggtggtgacgctgctctggcgctgctactgctggacaggctgaaccagctggagtcgaagatgagtggtaaaggccaacagcagcagggccagaccgttaccaaaaagagcgcagctgaagcatctaaaaaaccgcgacagaaacgtaccgcgactaaagcgtacaatgtaacacaggccttcggtcgtcgaggtccggagcaaactcaaggaaactttggcgatcaggaattaatccgccaggggaccgactacaaacactggccgcaaattgcccagttcgccccatccgctagtgcattcttcggtatgagccgcatcggcatggaagtaacgccaagtggtacgtggctgacctacaccggtgctatcaagcttgatgacaaggacccgaactttaaagaccaggttattctgcttaacaaacatattgatgcctataaaactttcccgccgaccgaacccaaaaaggacaaaaagaaaaaagctgatgaaacccaggctctaccgcagcgtcagaaaaaacagcaaactgtgactctgctgccagctgcggacctggatgatttttccaagcagctgcaacagtctatgagctctgcggactctacgcaggcttaa

SEQ ID NO: 495 - DNA, 2016 bp, Artificial Sequence
  Description of Artificial Sequence: Synthetic polynucleotide
atgcaccatcatcaccatcatggtggttctggttcgccgatacttggttattggaagattaaaggactggttcagcccacacgcctcctgctagaatacttagaggaaaaatatgaagagcacctgtacgaacgtgatgagggggacaaatggcgaaacaagaaatttgaattgggcttagaatttccaaatttgccgtattatatcgatggcgacgtaaaactgacccaatcaatggccattattcgctacatcgcagataaacataacatgctgggtggctgccctaaagaacgggctgagatctccatgctggaaggtgcggtgctcgacattcgctacggcgtcagtagaattgcgtatagcaaggatttcgaaactttaaaagtggatttcctgagcaaacttccggagatgctgaaaatgtttgaggataggctttgtcataagacgtatctcaatggtgatcatgttacccacccggactttatgctgtacgacgcccttgatgtcgttctgtatatggatcccatgtgcctggacgccttcccgaaattagtgtgttttaaaaaacgtatcgaagcgattccacagatcgataaatacttgaagtcttctaaatatattgcttggcctctgcaaggctggcaggcaacgttcggtgggggagatcatccgccaaaatcagatctggtgccgcgtgggagccctggcatacaccgcgacggtggttctggtgagaacctgtactttcaaagctcagataatgggcctcaaaaccagcgcaacgctccacgtataaccttcggtggcccgtctgactccacaggcagcaaccagaatggtgagcgtagtggagccaggtctaagcagcgccgtccccagggtctgccgaacaacacggcgagctggtttactgcgcttacccaacacggtaaagaagacttaaaattcccgcgtggccagggcgtcccgatcaacactaactcttccccggatgatcagattggttattaccgcagagcaactcgtcggattcgcggcggcgacggtaaaatgaaagatttgtctccgcgttggtacttttactatctcggcaccggtccggaagctggactgccctacggggcaaacaaggacgggatcatttgggtggctaccgaaggtgccctgaatactccaaaagatcatatcggcacccgtaaccctgctaataacgctgcgatcgttctgcaactgcctcagggtacaactctgccaaaaggcttctatgcagaagggtcgcgtggtggcagccaggcgagtagccgtagcagctcccgctctcgcaactcgtcccgtaactccactccgggctcttctcgcggcacgtccccggctcgtatggcaggtaacggtggtgacgctgctctggcgctgctactgctggacaggctgaaccagctggagtcgaagatgagtggtaaaggccaacagcagcagggccagaccgttaccaaaaagagcgcagctgaagcatctaaaaaaccgcgacagaaacgtaccgcgactaaagcgtacaatgtaacacaggccttcggtcgtcgaggtccggagcaaactcaaggaaactttggcgatcaggaattaatccgccaggggaccgactacaaacactggccgcaaattgcccagttcgccccatccgctagtgcattcttcggtatgagccgcatcggcatggaagtaacgccaagtggtacgtggctgacctacaccggtgctatcaagcttgatgacaaggacccgaactttttggaccaggttattctgcttaacaaacatattgatgcctataaaactttcccgccgaccgaacccaaaaaggacaaaaagaaaaaagctgatgaaacccaggctctaccgcagcgtcagaaaaaacagcaaactgtgactctgctgccagctgcggacctggatgatttttccaagcagctgcaacagtctatgagctctgcggactctacgcaggcttaa

SEQ ID NO: 496 - DNA, 2016 bp, Artificial Sequence
  Description of Artificial Sequence: Synthetic polynucleotide
atgcaccatcatcaccatcatggtggttctggttcgccgatacttggttattggaagattaaaggactggttcagcccacacgcctcctgctagaatacttagaggaaaaatatgaagagcacctgtacgaacgtgatgagggggacaaatggcgaaacaagaaatttgaattgggcttagaatttccaaatttgccgtattatatcgatggcgacgtaaaactgacccaatcaatggccattattcgctacatcgcagataaacataacatgctgggtggctgccctaaagaacgggctgagatctccatgctggaaggtgcggtgctcgacattcgctacggcgtcagtagaattgcgtatagcaaggatttcgaaactttaaaagtggatttcctgagcaaacttccggagatgctgaaaatgtttgaggataggctttgtcataagacgtatctcaatggtgatcatgttacccacccggactttatgctgtacgacgcccttgatgtcgttctgtatatggatcccatgtgcctggacgccttcccgaaattagtgtgttttaaaaaacgtatcgaagcgattccacagatcgataaatacttgaagtcttctaaatatattgcttggcctctgcaaggctggcaggcaacgttcggtgggggagatcatccgccaaaatcagatctggtgccgcgtgggagccctggcatacaccgcgacggtggttctggtgagaacctgtactttcaaagctcagataatgggcctcaaaaccagcgcaacgctccacgtataaccttcggtggcccgtctgactccacaggcagcaaccagaatggtgagcgtagtggagccaggtctaagcagcgccgtccccagggtctgccgaacaacacggcgagctggtttactgcgcttacccaacacggtaaagaagacttaaaattcccgcgtggccagggcgtcccgatcaacactaactcttccccggatgatcagattggttattaccgcagagcaactcgtcggattcgcggcggcgacggtaaaatgaaagatttgtctccgcgttggtacttttactatctcggcaccggtccggaagctggactgccctacggggcaaacaaggacgggatcatttgggtggctaccgaaggtgccctgaatactccaaaagatcatatcggcacccgtaaccctgctaataacgctgcgatcgttctgcaactgcctcagggtacaactctgccaaaaggcttctatgcagaagggtcgcgtggtggcagccaggcgagtagccgtagcagctcccgctctcgcaactcgtcccgtaactccactccgggctcttctcgcggcacgtccccggctcgtatggcaggtaacggtggtgacgctgctctggcgctgctactgctggacaggctgaaccagctggagtcgaagatgagtggtaaaggccaacagcagcagggccagaccgttaccaaaaagagcgcagctgaagcatctaaaaaaccgcgacagaaacgtaccgcgactaaagcgtacaatgtaacacaggccttcggtcgtcgaggtccggagcaaactcaaggaaactttggcgatcaggaattaatccgccaggggaccgactacaaacactggccgcaaattgcccagttcgccccatccgctagtgcattcttcggtatgagccgcatcggcatggaagtaacgccaagtggtacgtggctgacctacaccggtgctatcaagcttgatgacaaggacccgaactttcaagaccaggttattctgcttaacaaacatattgatgcctataaaactttcccgccgaccgaacccaaaaaggacaaaaagaaaaaagctgatgaaacccaggctctaccgcagcgtcagaaaaaacagcaaactgtgactctgctgccagctgcggacctggatgatttttccaagcagctgcaacagtctatgagctctgcggactctacgcaggcttaa

SEQ ID NO: 497 - DNA, 2016 bp, Artificial Sequence
  Description of Artificial Sequence: Synthetic polynucleotide
atgcaccatcatcaccatcatggtggttctggttcgccgatacttggttattggaagattaaaggactggttcagcccacacgcctcctgctagaatacttagaggaaaaatatgaagagcacctgtacgaacgtgatgagggggacaaatggcgaaacaagaaatttgaattgggcttagaatttccaaatttgccgtattatatcgatggcgacgtaaaactgacccaatcaatggccattattcgctacatcgcagataaacataacatgctgggtggctgccctaaagaacgggctgagatctccatgctggaaggtgcggtgctcgacattcgctacggcgtcagtagaattgcgtatagcaaggatttcgaaactttaaaagtggatttcctgagcaaacttccggagatgctgaaaatgtttgaggataggctttgtcataagacgtatctcaatggtgatcatgttacccacccggactttatgctgtacgacgcccttgatgtcgttctgtatatggatcccatgtgcctggacgccttcccgaaattagtgtgttttaaaaaacgtatcgaagcgattccacagatcgataaatacttgaagtcttctaaatatattgcttggcctctgcaaggctggcaggcaacgttcggtgggggagatcatccgccaaaatcagatctggtgccgcgtgggagccctggcatacaccgcgacggtggttctggtgagaacctgtactttcaaagctcagataatgggcctcaaaaccagcgcaacgctccacgtataaccttcggtggcccgtctgactccacaggcagcaaccagaatggtgagcgtagtggagccaggtctaagcagcgccgtccccagggtctgccgaacaacacggcgagctggtttactgcgcttacccaacacggtaaagaagacttaaaattcccgcgtggccagggcgtcccgatcaacactaactcttccccggatgatcagattggttattaccgcagagcaactcgtcggattcgcggcggcgacggtaaaatgaaagatttgtctccgcgttggtacttttactatctcggcaccggtccggaagctggactgccctacggggcaaacaaggacgggatcatttgggtggctaccgaaggtgccctgaatactccaaaagatcatatcggcacccgtaaccctgctaataacgctgcgatcgttctgcaactgcctcagggtacaactctgccaaaaggcttctatgcagaagggtcgcgtggtggcagccaggcgagtagccgtagcagctcccgctctcgcaactcgtcccgtaactccactccgggctcttctcgcggcacgtccccggctcgtatggcaggtaacggtggtgacgctgctctggcgctgctactgctggacaggctgaaccagctggagtcgaagatgagtggtaaaggccaacagcagcagggccagaccgttaccaaaaagagcgcagctgaagcatctaaaaaaccgcgacagaaacgtaccgcgactaaagcgtacaatgtaacacaggccttcggtcgtcgaggtccggagcaaactcaaggaaactttggcgatcaggaattaatccgccaggggaccgactacaaacactggccgcaaattgcccagttcgccccatccgctagtgcattcttcggtatgagccgcatcggcatggaagtaacgccaagtggtacgtggctgacctacaccggtgctatcaagcttgatgactcagacccgaactttaaagaccaggttattctgcttaacaaacatattgatgcctataaaactttcccgccgaccgaacccaaaaaggacaaaaagaaaaaagctgatgaaacccaggctctaccgcagcgtcagaaaaaacagcaaactgtgactctgctgccagctgcggacctggatgatttttccaagcagctgcaacagtctatgagctctgcggactctacgcaggcttaa

SEQ ID NO: 498 - DNA, 2016 bp, Artificial Sequence
  Description of Artificial Sequence: Synthetic polynucleotide
atgcaccatcatcaccatcatggtggttctggttcgccgatacttggttattggaagattaaaggactggttcagcccacacgcctcctgctagaatacttagaggaaaaatatgaagagcacctgtacgaacgtgatgagggggacaaatggcgaaacaagaaatttgaattgggcttagaatttccaaatttgccgtattatatcgatggcgacgtaaaactgacccaatcaatggccattattcgctacatcgcagataaacataacatgctgggtggctgccctaaagaacgggctgagatctccatgctggaaggtgcggtgctcgacattcgctacggcgtcagtagaattgcgtatagcaaggatttcgaaactttaaaagtggatttcctgagcaaacttccggagatgctgaaaatgtttgaggataggctttgtcataagacgtatctcaatggtgatcatgttacccacccggactttatgctgtacgacgcccttgatgtcgttctgtatatggatcccatgtgcctggacgccttcccgaaattagtgtgttttaaaaaacgtatcgaagcgattccacagatcgataaatacttgaagtcttctaaatatattgcttggcctctgcaaggctggcaggcaacgttcggtgggggagatcatccgccaaaatcagatctggtgccgcgtgggagccctggcatacaccgcgacggtggttctggtgagaacctgtactttcaaagctcagataatgggcctcaaaaccagcgcaacgctccacgtataaccttcggtggcccgtctgactccacaggcagcaaccagaatggtgagcgtagtggagccaggtctaagcagcgccgtccccagggtctgccgaacaacacggcgagctggtttactgcgcttacccaacacggtaaagaagacttaaaattcccgcgtggccagggcgtcccgatcaacactaactcttccccggatgatcagattggttattaccgcagagcaactcgtcggattcgcggcggcgacggtaaaatgaaagatttgtctccgcgttggtacttttactatctcggcaccggtccggaagctggactgccctacggggcaaacaaggacgggatcatttgggtggctaccgaaggtgccctgaatactccaaaagatcatatcggcacccgtaaccctgctaataacgctgcgatcgttctgcaactgcctcagggtacaactctgccaaaaggcttctatgcagaagggtcgcgtggtggcagccaggcgagtagccgtagcagctcccgctctcgcaactcgtcccgtaactccactccgggctcttctcgcggcacgtccccggctcgtatggcaggtaacggtggtgacgctgctctggcgctgctactgctggacaggctgaaccagctggagtcgaagatgagtggtaaaggccaacagcagcagggccagaccgttaccaaaaagagcgcagctgaagcatctaaaaaaccgcgacagaaacgtaccgcgactaaagcgtacaatgtaacacaggccttcggtcgtcgaggtccggagcaaactcaaggaaactttggcgatcaggaattaatccgccaggggaccgactacaaatattggccgcaaattgcccagttcgccccatccgctagtgcattcttcggtatgagccgcatcggcatggaagtaacgccaagtggtacgtggctgacctacaccggtgctatcaagcttgatgacaaggacccgaactttaaagaccaggttattctgcttaacaaacatattgatgcctataaaactttcccgccgaccgaacccaaaaaggacaaaaagaaaaaagctgatgaaacccaggctctaccgcagcgtcagaaaaaacagcaaactgtgactctgctgccagctgcggacctggatgatttttccaagcagctgcaacagtctatgagctctgcggactctacgcaggcttaa

SEQ ID NO: 499 - DNA, 2016 bp, Artificial Sequence
  Description of Artificial Sequence: Synthetic polynucleotide
atgcaccatcatcaccatcatggtggttctggttcgccgatacttggttattggaagattaaaggactggttcagcccacacgcctcctgctagaatacttagaggaaaaatatgaagagcacctgtacgaacgtgatgagggggacaaatggcgaaacaagaaatttgaattgggcttagaatttccaaatttgccgtattatatcgatggcgacgtaaaactgacccaatcaatggccattattcgctacatcgcagataaacataacatgctgggtggctgccctaaagaacgggctgagatctccatgctggaaggtgcggtgctcgacattcgctacggcgtcagtagaattgcgtatagcaaggatttcgaaactttaaaagtggatttcctgagcaaacttccggagatgctgaaaatgtttgaggataggctttgtcataagacgtatctcaatggtgatcatgttacccacccggactttatgctgtacgacgcccttgatgtcgttctgtatatggatcccatgtgcctggacgccttcccgaaattagtgtgttttaaaaaacgtatcgaagcgattccacagatcgataaatacttgaagtcttctaaatatattgcttggcctctgcaaggctggcaggcaacgttcggtgggggagatcatccgccaaaatcagatctggtgccgcgtgggagccctggcatacaccgcgacggtggttctggtgagaacctgtactttcaaagctcagataatgggcctcaaaaccagcgcaacgctccacgtataaccttcggtggcccgtctgactccacaggcagcaaccagaatggtgagcgtagtggagccaggtctaagcagcgccgtccccagggtctgccgaacaacacggcgagctggtttactgcgcttacccaacacggtaaagaagacttaaaattcccgcgtggccagggcgtcccgatcaacactaactcttccccggatgatcagattggttattaccgcagagcaactcgtcggattcgcggcggcgacggtaaaatgaaagatttgtctccgcgttggtacttttactatctcggcaccggtccggaagctggactgccctacggggcagataaggacgggatcatttgggtggctaccgaaggtgccctgaatactccaaaagatcatatcggcacccgtaaccctgctaataacgctgcgatcgttctgcaactgcctcagggtacaactctgccaaaaggcttctatgcagaagggtcgcgtggtggcagccaggcgagtagccgtagcagctcccgctctcgcaactcgtcccgtaactccactccgggctcttctcgcggcacgtccccggctcgtatggcaggtaacggtggtgacgctgctctggcgctgctactgctggacaggctgaaccagctggagtcgaagatgagtggtaaaggccaacagcagcagggccagaccgttaccaaaaagagcgcagctgaagcatctaaaaaaccgcgacagaaacgtaccgcgactaaagcgtacaatgtaacacaggccttcggtcgtcgaggtccggagcaaactcaaggaaactttggcgatcaggaattaatccgccaggggaccgactacaaacactggccgcaaattgcccagttcgccccatccgctagtgcattcttcggtatgagccgcatcggcatggaagtaacgccaagtggtacgtggctgacctacaccggtgctatcaagcttgatgacaaggacccgaactttaaagaccaggttattctgcttaacaaacatattgatgcctataaaactttcccgccgaccgaacccaaaaaggacaaaaagaaaaaagctgatgaaacccaggctctaccgcagcgtcagaaaaaacagcaaactgtgactctgctgccagctgcggacctggatgatttttccaagcagctgcaacagtctatgagctctgcggactctacgcaggcttaa

SEQ ID NO: 500 - DNA, 2016 bp, Artificial Sequence
  Description of Artificial Sequence: Synthetic polynucleotide
atgcaccatcatcaccatcatggtggttctggttcgccgatacttggttattggaagattaaaggactggttcagcccacacgcctcctgctagaatacttagaggaaaaatatgaagagcacctgtacgaacgtgatgagggggacaaatggcgaaacaagaaatttgaattgggcttagaatttccaaatttgccgtattatatcgatggcgacgtaaaactgacccaatcaatggccattattcgctacatcgcagataaacataacatgctgggtggctgccctaaagaacgggctgagatctccatgctggaaggtgcggtgctcgacattcgctacggcgtcagtagaattgcgtatagcaaggatttcgaaactttaaaagtggatttcctgagcaaacttccggagatgctgaaaatgtttgaggataggctttgtcataagacgtatctcaatggtgatcatgttacccacccggactttatgctgtacgacgcccttgatgtcgttctgtatatggatcccatgtgcctggacgccttcccgaaattagtgtgttttaaaaaacgtatcgaagcgattccacagatcgataaatacttgaagtcttctaaatatattgcttggcctctgcaaggctggcaggcaacgttcggtgggggagatcatccgccaaaatcagatctggtgccgcgtgggagccctggcatacaccgcgacggtggttctggtgagaacctgtactttcaaagctcagataatgggcctcaaaaccagcgcaacgctccacgtataaccttcggtggcccgtctgactccacaggcagcaaccagaatggtgagcgtagtggagccaggtctaagcagcgccgtccccagggtctgccgaacaacacggcgagctggtttactgcgcttacccaacacggtaaagaagacttaaaattcccgcgtggccagggcgtcccgatcaacactaactcttccccgtcggatcagattggttattaccgcagagcaactcgtcggattcgcggcggcgacggtaaaatgaaagatttgtctccgcgttggtacttttactatctcggcaccggtccggaagctggactgccctacggggcaaacaaggacgggatcatttgggtggctaccgaaggtgccctgaatactccaaaagatcatatcggcacccgtaaccctgctaataacgctgcgatcgttctgcaactgcctcagggtacaactctgccaaaaggcttctatgcagaagggtcgcgtggtggcagccaggcgagtagccgtagcagctcccgctctcgcaactcgtcccgtaactccactccgggctcttctcgcggcacgtccccggctcgtatggcaggtaacggtggtgacgctgctctggcgctgctactgctggacaggctgaaccagctggagtcgaagatgagtggtaaaggccaacagcagcagggccagaccgttaccaaaaagagcgcagctgaagcatctaaaaaaccgcgacagaaacgtaccgcgactaaagcgtacaatgtaacacaggccttcggtcgtcgaggtccggagcaaactcaaggaaactttggcgatcaggaattaatccgccaggggaccgactacaaacactggccgcaaattgcccagttcgccccatccgctagtgcattcttcggtatgagccgcatcggcatggaagtaacgccaagtggtacgtggctgacctacaccggtgctatcaagcttgatgacaaggacccgaactttaaagaccaggttattctgcttaacaaacatattgatgcctataaaactttcccgccgaccgaacccaaaaaggacaaaaagaaaaaagctgatgaaacccaggctctaccgcagcgtcagaaaaaacagcaaactgtgactctgctgccagctgcggacctggatgatttttccaagcagctgcaacagtctatgagctctgcggactctacgcaggcttaa

SEQ ID NO: 501 - DNA, 2016 bp, Artificial Sequence
  Description of Artificial Sequence: Synthetic polynucleotide
atgcaccatcatcaccatcatggtggttctggttcgccgatacttggttattggaagattaaaggactggttcagcccacacgcctcctgctagaatacttagaggaaaaatatgaagagcacctgtacgaacgtgatgagggggacaaatggcgaaacaagaaatttgaattgggcttagaatttccaaatttgccgtattatatcgatggcgacgtaaaactgacccaatcaatggccattattcgctacatcgcagataaacataacatgctgggtggctgccctaaagaacgggctgagatctccatgctggaaggtgcggtgctcgacattcgctacggcgtcagtagaattgcgtatagcaaggatttcgaaactttaaaagtggatttcctgagcaaacttccggagatgctgaaaatgtttgaggataggctttgtcataagacgtatctcaatggtgatcatgttacccacccggactttatgctgtacgacgcccttgatgtcgttctgtatatggatcccatgtgcctggacgccttcccgaaattagtgtgttttaaaaaacgtatcgaagcgattccacagatcgataaatacttgaagtcttctaaatatattgcttggcctctgcaaggctggcaggcaacgttcggtgggggagatcatccgccaaaatcagatctggtgccgcgtgggagccctggcatacaccgcgacggtggttctggtgagaacctgtactttcaaagctcagataatgggcctcaaaaccagcgcaacgctccacgtataaccttcggtggcccgtctgactccacaggcagcaaccagaatggtgagcgtagtggagccaggtctaagcagcgccgtccccagggtctgccgaacaacacggcgagctggtttactgcgcttacccaacacggtaaagaagacttaaaattcccgcgtggccagggcgtcccgatcaacactaactcttccccggatgatcagattggttattaccgcagagcaactcgtcggattcgcggcggcgacggtaaaatgaaagatttgtctccgcgttggtacttttactatctcggcaccggtccggaagctggactgccctacggggcaaacaaggacgggatcatttgggtggctaccgaaggtgccctgaatactccaaaagatcatatcggcacccgtaaccctgctaatcaagctgcgatcgttctgcaactgcctcagggtacaactctgccaaaaggcttctatgcagaagggtcgcgtggtggcagccaggcgagtagccgtagcagctcccgctctcgcaactcgtcccgtaactccactccgggctcttctcgcggcacgtccccggctcgtatggcaggtaacggtggtgacgctgctctggcgctgctactgctggacaggctgaaccagctggagtcgaagatgagtggtaaaggccaacagcagcagggccagaccgttaccaaaaagagcgcagctgaagcatctaaaaaaccgcgacagaaacgtaccgcgactaaagcgtacaatgtaacacaggccttcggtcgtcgaggtccggagcaaactcaaggaaactttggcgatcaggaattaatccgccaggggaccgactacaaacactggccgcaaattgcccagttcgccccatccgctagtgcattcttcggtatgagccgcatcggcatggaagtaacgccaagtggtacgtggctgacctacaccggtgctatcaagcttgatgacaaggacccgaactttaaagaccaggttattctgcttaacaaacatattgatgcctataaaactttcccgccgaccgaacccaaaaaggacaaaaagaaaaaagctgatgaaacccaggctctaccgcagcgtcagaaaaaacagcaaactgtgactctgctgccagctgcggacctggatgatttttccaagcagctgcaacagtctatgagctctgcggactctacgcaggcttaa

SEQ ID NO: 502 - DNA, 2016 bp, Artificial Sequence
  Description of Artificial Sequence: Synthetic polynucleotide
atgcaccatcatcaccatcatggtggttctggttcgccgatacttggttattggaagattaaaggactggttcagcccacacgcctcctgctagaatacttagaggaaaaatatgaagagcacctgtacgaacgtgatgagggggacaaatggcgaaacaagaaatttgaattgggcttagaatttccaaatttgccgtattatatcgatggcgacgtaaaactgacccaatcaatggccattattcgctacatcgcagataaacataacatgctgggtggctgccctaaagaacgggctgagatctccatgctggaaggtgcggtgctcgacattcgctacggcgtcagtagaattgcgtatagcaaggatttcgaaactttaaaagtggatttcctgagcaaacttccggagatgctgaaaatgtttgaggataggctttgtcataagacgtatctcaatggtgatcatgttacccacccggactttatgctgtacgacgcccttgatgtcgttctgtatatggatcccatgtgcctggacgccttcccgaaattagtgtgttttaaaaaacgtatcgaagcgattccacagatcgataaatacttgaagtcttctaaatatattgcttggcctctgcaaggctggcaggcaacgttcggtgggggagatcatccgccaaaatcagatctggtgccgcgtgggagccctggcatacaccgcgacggtggttctggtgagaacctgtactttcaaagctcagataatgggcctcaaaaccagcgcaacgctccacgtataaccttcggtggcccgtctgactccacaggcagcaaccagaatggtgagcgtagtggagccaggtctaagcagcgccgtccccagggtctgccgaacaacacggcgagctggtttactgcgcttacccaacacggtaaagaagacttaaaattcccgcgtggccagggcgtcccgatcaacactaactcttccccggatgatcagattggttattaccgcagagcaactcgtcggattcgcggcggcgacggtaaaatgaaagatttgtctccgcgttggtacttttactatctcggcaccggtccggaagctggactgccctacggggcaaacaaggacgggatcatttgggtggctaccgaaggtgccctgacgactccaaaagatcatatcggcacccgtaaccctgctaataacgctgcgatcgttctgcaactgcctcagggtacaactctgccaaaaggcttctatgcagaagggtcgcgtggtggcagccaggcgagtagccgtagcagctcccgctctcgcaactcgtcccgtaactccactccgggctcttctcgcggcacgtccccggctcgtatggcaggtaacggtggtgacgctgctctggcgctgctactgctggacaggctgaaccagctggagtcgaagatgagtggtaaaggccaacagcagcagggccagaccgttaccaaaaagagcgcagctgaagcatctaaaaaaccgcgacagaaacgtaccgcgactaaagcgtacaatgtaacacaggccttcggtcgtcgaggtccggagcaaactcaaggaaactttggcgatcaggaattaatccgccaggggaccgactacaaacactggccgcaaattgcccagttcgccccatccgctagtgcattcttcggtatgagccgcatcggcatggaagtaacgccaagtggtacgtggctgacctacaccggtgctatcaagcttgatgacaaggacccgaactttaaagaccaggttattctgcttaacaaacatattgatgcctataaaactttcccgccgaccgaacccaaaaaggacaaaaagaaaaaagctgatgaaacccaggctctaccgcagcgtcagaaaaaacagcaaactgtgactctgctgccagctgcggacctggatgatttttccaagcagctgcaacagtctatgagctctgcggactctacgcaggcttaa

SEQ ID NO: 503 - DNA, 2016 bp, Artificial Sequence
  Description of Artificial Sequence: Synthetic polynucleotide
atgcaccatcatcaccatcatggtggttctggttcgccgatacttggttattggaagattaaaggactggttcagcccacacgcctcctgctagaatacttagaggaaaaatatgaagagcacctgtacgaacgtgatgagggggacaaatggcgaaacaagaaatttgaattgggcttagaatttccaaatttgccgtattatatcgatggcgacgtaaaactgacccaatcaatggccattattcgctacatcgcagataaacataacatgctgggtggctgccctaaagaacgggctgagatctccatgctggaaggtgcggtgctcgacattcgctacggcgtcagtagaattgcgtatagcaaggatttcgaaactttaaaagtggatttcctgagcaaacttccggagatgctgaaaatgtttgaggataggctttgtcataagacgtatctcaatggtgatcatgttacccacccggactttatgctgtacgacgcccttgatgtcgttctgtatatggatcccatgtgcctggacgccttcccgaaattagtgtgttttaaaaaacgtatcgaagcgattccacagatcgataaatacttgaagtcttctaaatatattgcttggcctctgcaaggctggcaggcaacgttcggtgggggagatcatccgccaaaatcagatctggtgccgcgtgggagccctggcatacaccgcgacggtggttctggtgagaacctgtactttcaaagctcagataatgggcctcaaaaccagcgcaacgctccacgtataaccttcggtggcccgtctgactccacaggcagcaaccagaatggtgagcgtagtggagccaggtctaagcagcgccgtccccagggtctgccgaacaacacggcgagctggtttactgcgcttacccaacacggtaaagaagacttaaaattcccgcgtggccagggcgtcccgatcaacactaactcttccccggatgatcagattggttattaccgcagatttactcgtcggattcgcggcggcgacggtaaaatgaaagatttgtctccgcgttggtacttttactatctcggcaccggtccggaagctggactgccctacggggcaaacaaggacgggatcatttgggtggctaccgaaggtgccctgaatactccaaaagatcatatcggcacccgtaaccctgctaataacgctgcgatcgttctgcaactgcctcagggtacaactctgccaaaaggcttctatgcagaagggtcgcgtggtggcagccaggcgagtagccgtagcagctcccgctctcgcaactcgtcccgtaactccactccgggctcttctcgcggcacgtccccggctcgtatggcaggtaacggtggtgacgctgctctggcgctgctactgctggacaggctgaaccagctggagtcgaagatgagtggtaaaggccaacagcagcagggccagaccgttaccaaaaagagcgcagctgaagcatctaaaaaaccgcgacagaaacgtaccgcgactaaagcgtacaatgtaacacaggccttcggtcgtcgaggtccggagcaaactcaaggaaactttggcgatcaggaattaatccgccaggggaccgactacaaacactggccgcaaattgcccagttcgccccatccgctagtgcattcttcggtatgagccgcatcggcatggaagtaacgccaagtggtacgtggctgacctacaccggtgctatcaagcttgatgacaaggacccgaactttaaagaccaggttattctgcttaacaaacatattgatgcctataaaactttcccgccgaccgaacccaaaaaggacaaaaagaaaaaagctgatgaaacccaggctctaccgcagcgtcagaaaaaacagcaaactgtgactctgctgccagctgcggacctggatgatttttccaagcagctgcaacagtctatgagctctgcggactctacgcaggcttaa

SEQ ID NO: 504 - DNA, 2016 bp, Artificial Sequence
  Description of Artificial Sequence: Synthetic polynucleotide
atgcaccatcatcaccatcatggtggttctggttcgccgatacttggttattggaagattaaaggactggttcagcccacacgcctcctgctagaatacttagaggaaaaatatgaagagcacctgtacgaacgtgatgagggggacaaatggcgaaacaagaaatttgaattgggcttagaatttccaaatttgccgtattatatcgatggcgacgtaaaactgacccaatcaatggccattattcgctacatcgcagataaacataacatgctgggtggctgccctaaagaacgggctgagatctccatgctggaaggtgcggtgctcgacattcgctacggcgtcagtagaattgcgtatagcaaggatttcgaaactttaaaagtggatttcctgagcaaacttccggagatgctgaaaatgtttgaggataggctttgtcataagacgtatctcaatggtgatcatgttacccacccggactttatgctgtacgacgcccttgatgtcgttctgtatatggatcccatgtgcctggacgccttcccgaaattagtgtgttttaaaaaacgtatcgaagcgattccacagatcgataaatacttgaagtcttctaaatatattgcttggcctctgcaaggctggcaggcaacgttcggtgggggagatcatccgccaaaatcagatctggtgccgcgtgggagccctggcatacaccgcgacggtggttctggtgagaacctgtactttcaaagctcagataatgggcctcaaaaccagcgcaacgctccacgtataaccttcggtggcccgtctgactccacaggcagcaaccagaatggtgagcgtagtggagccaggtctaagcagcgccgtccccagggtctgccgaacaacacggcgagctggtttactgcgcttacccaacacggtaaagaagacttaaaattcccgcgtggccagggcgtcccgatcaacactaactcttccccggatgatcagattggttattaccgcagagcaactcgtcggattcgcggcggcgacggtaaaatgaaagatttgtctccgcgttggtacttttactatctcggcaccggtccggaagctggactgccctacggggcaaacaaggacgggatcatttgggtggctaccgaaggtgccctgaatactccaaaagatcatatcggcacccgtaaccctgctaataacgctgcgatcgttctgcaactgcctcagggtacaactctgccaaaaggcttctatgcagaagggtcgcgtggtggcagccaggcgagtagccgtagcagctcccgctctcgcaactcgtcccgtaactccactccgggctcttctcgcggcacgtccccggctcgtatggcaggtaacggtggtgacgctgctctggcgctgctactgctggacaggctgaaccagctggagtcgaagatgagtggtaaaggccaacagcagcagggccagaccgttaccaaaaagagcgcagctgaagcatctaaaaaaccgcgacagaaacgtaccgcgactaaagcgtacaatgtaacacaggccttcggtcgtcgaggtccggagcaaactcaaggaaactttggcgatcaggaattaatccgccaggggaccgactacaaacactggccgcaacttgcccagttcgccccatccgctagtgcattcttcggtatgagccgcatcggcatggaagtaacgccaagtggtacgtggctgacctacaccggtgctatcaagcttgatgacaaggacccgaactttaaagaccaggttattctgcttaacaaacatattgatgcctataaaactttcccgccgaccgaacccaaaaaggacaaaaagaaaaaagctgatgaaacccaggctctaccgcagcgtcagaaaaaacagcaaactgtgactctgctgccagctgcggacctggatgatttttccaagcagctgcaacagtctatgagctctgcggactctacgcaggcttaa

SEQ ID NO: 505 - DNA, 2016 bp, Artificial Sequence
  Description of Artificial Sequence: Synthetic polynucleotide
atgcaccatcatcaccatcatggtggttctggttcgccgatacttggttattggaagattaaaggactggttcagcccacacgcctcctgctagaatacttagaggaaaaatatgaagagcacctgtacgaacgtgatgagggggacaaatggcgaaacaagaaatttgaattgggcttagaatttccaaatttgccgtattatatcgatggcgacgtaaaactgacccaatcaatggccattattcgctacatcgcagataaacataacatgctgggtggctgccctaaagaacgggctgagatctccatgctggaaggtgcggtgctcgacattcgctacggcgtcagtagaattgcgtatagcaaggatttcgaaactttaaaagtggatttcctgagcaaacttccggagatgctgaaaatgtttgaggataggctttgtcataagacgtatctcaatggtgatcatgttacccacccggactttatgctgtacgacgcccttgatgtcgttctgtatatggatcccatgtgcctggacgccttcccgaaattagtgtgttttaaaaaacgtatcgaagcgattccacagatcgataaatacttgaagtcttctaaatatattgcttggcctctgcaaggctggcaggcaacgttcggtgggggagatcatccgccaaaatcagatctggtgccgcgtgggagccctggcatacaccgcgacggtggttctggtgagaacctgtactttcaaagctcagataatgggcctcaaaaccagcgcaacgctccacgtataaccttcggtggcccgtctgactccacaggcagcaaccagaatggtgagcgtagtggagccaggtctaagcagcgccgtccccagggtctgccgaacaacacggcgagctggtttactgcgcttacccaacacggtaaagaagacttaaaattcccgcgtggccagggcgtcccgatcaacactaactcttccccggatgatcagattggttattaccgcagagcaactcgtcggattcgcggcggcgacggtaaaaagaaagatttgtctccgcgttggtacttttactatctcggcaccggtccggaagctggactgccctacggggcaaacaaggacgggatcatttgggtggctaccgaaggtgccctgaatactccaaaagatcatatcggcacccgtaaccctgctaataacgctgcgatcgttctgcaactgcctcagggtacaactctgccaaaaggcttctatgcagaagggtcgcgtggtggcagccaggcgagtagccgtagcagctcccgctctcgcaactcgtcccgtaactccactccgggctcttctcgcggcacgtccccggctcgtatggcaggtaacggtggtgacgctgctctggcgctgctactgctggacaggctgaaccagctggagtcgaagatgagtggtaaaggccaacagcagcagggccagaccgttaccaaaaagagcgcagctgaagcatctaaaaaaccgcgacagaaacgtaccgcgactaaagcgtacaatgtaacacaggccttcggtcgtcgaggtccggagcaaactcaaggaaactttggcgatcaggaattaatccgccaggggaccgactacaaacactggccgcaaattgcccagttcgccccatccgctagtgcattcttcggtatgagccgcatcggcatggaagtaacgccaagtggtacgtggctgacctacaccggtgctatcaagcttgatgacaaggacccgaactttaaagaccaggttattctgcttaacaaacatattgatgcctataaaactttcccgccgaccgaacccaaaaaggacaaaaagaaaaaagctgatgaaacccaggctctaccgcagcgtcagaaaaaacagcaaactgtgactctgctgccagctgcggacctggatgatttttccaagcagctgcaacagtctatgagctctgcggactctacgcaggcttaa

SEQ ID NO: 506 - DNA, 2016 bp, Artificial Sequence
  Description of Artificial Sequence: Synthetic polynucleotide
atgcaccatcatcaccatcatggtggttctggttcgccgatacttggttattggaagattaaaggactggttcagcccacacgcctcctgctagaatacttagaggaaaaatatgaagagcacctgtacgaacgtgatgagggggacaaatggcgaaacaagaaatttgaattgggcttagaatttccaaatttgccgtattatatcgatggcgacgtaaaactgacccaatcaatggccattattcgctacatcgcagataaacataacatgctgggtggctgccctaaagaacgggctgagatctccatgctggaaggtgcggtgctcgacattcgctacggcgtcagtagaattgcgtatagcaaggatttcgaaactttaaaagtggatttcctgagcaaacttccggagatgctgaaaatgtttgaggataggctttgtcataagacgtatctcaatggtgatcatgttacccacccggactttatgctgtacgacgcccttgatgtcgttctgtatatggatcccatgtgcctggacgccttcccgaaattagtgtgttttaaaaaacgtatcgaagcgattccacagatcgataaatacttgaagtcttctaaatatattgcttggcctctgcaaggctggcaggcaacgttcggtgggggagatcatccgccaaaatcagatctggtgccgcgtgggagccctggcatacaccgcgacggtggttctggtgagaacctgtactttcaaagctcagataatgggcctcaaaaccagcgcaacgctccacgtataaccttcggtggcccgtctgactccacaggcagcaaccagaatggtgagcgtagtggagccaggtctaagcagcgccgtccccagggtctgccgaacaacacggcgagctggtttactgcgcttacccaacacggtaaagaagacttaaaattcccgcgtggccagggcgtcccgatcaacactaactcttccccggatgatcagattggttattaccgcagagcaactcgtcggattcgcggcggcgacggtaaaatgaaagatttgtctccgcgttggtacttttactatctcggcaccggtccggaagctggactgccctacggggcaaacaaggacgggatcatttgggtggctaccgaaggtgccctgaatactccaaaagatcatatcggcacccgtaaccctgctaataacgctgcgatcgttctgcaactgcctcagggtacaactctgccaaaaggcttctatgcagaagggtcgcgtggtggcagccaggcgagtagccgtagcagctcccgctctcgcaactcgtcccgtaactccactccgggctcttctcgcggcacgtccccggctcgtatggcaggtaacggtggtgacgctgctctggcgctgctactgctggacaggctgaaccagctggagtcgaagatgagtggtaaaggccaacagcagcagggccagaccgttaccaaaaagagcgcagctgaagcatctaaaaaaccgcgacagaaacgtaccgcgactaaagcgtacaatgtaacacaggccttcggtcgtcgaggtccggagcaaactcaaggaaactttggcgatcaggaattaatccgcgaagggaccgactacaaacactggccgcaaattgcccagttcgccccatccgctagtgcattcttcggtatgagccgcatcggcatggaagtaacgccaagtggtacgtggctgacctacaccggtgctatcaagcttgatgacaaggacccgaactttaaagaccaggttattctgcttaacaaacatattgatgcctataaaactttcccgccgaccgaacccaaaaaggacaaaaagaaaaaagctgatgaaacccaggctctaccgcagcgtcagaaaaaacagcaaactgtgactctgctgccagctgcggacctggatgatttttccaagcagctgcaacagtctatgagctctgcggactctacgcaggcttaa

SEQ ID NO: 507 - DNA, 2016 bp, Artificial Sequence
  Description of Artificial Sequence: Synthetic polynucleotide
atgcaccatcatcaccatcatggtggttctggttcgccgatacttggttattggaagattaaaggactggttcagcccacacgcctcctgctagaatacttagaggaaaaatatgaagagcacctgtacgaacgtgatgagggggacaaatggcgaaacaagaaatttgaattgggcttagaatttccaaatttgccgtattatatcgatggcgacgtaaaactgacccaatcaatggccattattcgctacatcgcagataaacataacatgctgggtggctgccctaaagaacgggctgagatctccatgctggaaggtgcggtgctcgacattcgctacggcgtcagtagaattgcgtatagcaaggatttcgaaactttaaaagtggatttcctgagcaaacttccggagatgctgaaaatgtttgaggataggctttgtcataagacgtatctcaatggtgatcatgttacccacccggactttatgctgtacgacgcccttgatgtcgttctgtatatggatcccatgtgcctggacgccttcccgaaattagtgtgttttaaaaaacgtatcgaagcgattccacagatcgataaatacttgaagtcttctaaatatattgcttggcctctgcaaggctggcaggcaacgttcggtgggggagatcatccgccaaaatcagatctggtgccgcgtgggagccctggcatacaccgcgacggtggttctggtgagaacctgtactttcaaagctcagataatgggcctcaaaaccagcgcaacgctccacgtataaccttcggtggcccgtctgactccacaggcagcaaccagaatggtgagcgtagtggagccaggtctaagcagcgccgtccccagggtctgccgaacaacacggcgagctggtttactgcgcttacccaacacggtaaagaagacttaaaattcccgcgtggccagggcgtcccgatcaacactaactcttccccggatgatcagattggttattaccgcagagcaactcgtcggattcgcggcggcgacggtaaaatgaaagatttgaaaccgcgttggtacttttactatctcggcaccggtccggaagctggactgccctacggggcaaacaaggacgggatcatttgggtggctaccgaaggtgccctgaatactccaaaagatcatatcggcacccgtaaccctgctaataacgctgcgatcgttctgcaactgcctcagggtacaactctgccaaaaggcttctatgcagaagggtcgcgtggtggcagccaggcgagtagccgtagcagctcccgctctcgcaactcgtcccgtaactccactccgggctcttctcgcggcacgtccccggctcgtatggcaggtaacggtggtgacgctgctctggcgctgctactgctggacaggctgaaccagctggagtcgaagatgagtggtaaaggccaacagcagcagggccagaccgttaccaaaaagagcgcagctgaagcatctaaaaaaccgcgacagaaacgtaccgcgactaaagcgtacaatgtaacacaggccttcggtcgtcgaggtccggagcaaactcaaggaaactttggcgatcaggaattaatccgccaggggaccgactacaaacactggccgcaaattgcccagttcgccccatccgctagtgcattcttcggtatgagccgcatcggcatggaagtaacgccaagtggtacgtggctgacctacaccggtgctatcaagcttgatgacaaggacccgaactttaaagaccaggttattctgcttaacaaacatattgatgcctataaaactttcccgccgaccgaacccaaaaaggacaaaaagaaaaaagctgatgaaacccaggctctaccgcagcgtcagaaaaaacagcaaactgtgactctgctgccagctgcggacctggatgatttttccaagcagctgcaacagtctatgagctctgcggactctacgcaggcttaa

SEQ ID NO: 508 - DNA, 2016 bp, Artificial Sequence
  Description of Artificial Sequence: Synthetic polynucleotide
atgcaccatcatcaccatcatggtggttctggttcgccgatacttggttattggaagattaaaggactggttcagcccacacgcctcctgctagaatacttagaggaaaaatatgaagagcacctgtacgaacgtgatgagggggacaaatggcgaaacaagaaatttgaattgggcttagaatttccaaatttgccgtattatatcgatggcgacgtaaaactgacccaatcaatggccattattcgctacatcgcagataaacataacatgctgggtggctgccctaaagaacgggctgagatctccatgctggaaggtgcggtgctcgacattcgctacggcgtcagtagaattgcgtatagcaaggatttcgaaactttaaaagtggatttcctgagcaaacttccggagatgctgaaaatgtttgaggataggctttgtcataagacgtatctcaatggtgatcatgttacccacccggactttatgctgtacgacgcccttgatgtcgttctgtatatggatcccatgtgcctggacgccttcccgaaattagtgtgttttaaaaaacgtatcgaagcgattccacagatcgataaatacttgaagtcttctaaatatattgcttggcctctgcaaggctggcaggcaacgttcggtgggggagatcatccgccaaaatcagatctggtgccgcgtgggagccctggcatacaccgcgacggtggttctggtgagaacctgtactttcaaagctcagataatgggcctcaaaaccagcgcaacgctccacgtataaccttcggtggcccgtctgactccacaggcagcaaccagaatggtgagcgtagtggagccaggtctaagcagcgccgtccccagggtctgccgaacaacacggcgagctggtttactccacttgtccaatttggtaaagaagacttaaaattcccgccgggccagggcgtcccgatcaacactaactcttccccggatgatcagattggttattaccgcagagcaactcgtcggattcgcggcggcgacggtaaaatgaaagatttgcctccgaagtggtacttttactatctcggcaccggtccgcatgctgatctgccctacgggcaaaagaaggacggggttttttgggtggctcggcccggtgccctgaatactccaaaagatcatatcggcacccgtaaccctgctaataacgctgcgatcccgctgcaactgcctccgggtacaaaactgccaaaaggcttctatgcagaagggtcgcgtggtggcagccaggcgagtagccgtagcagctcccgctctcgcaactcgtcccgtaactccactccgggctcttctcgcggcacgtccccggctcgtatggcaggtaacggtggtgacgctgctctggcgctgctactgctggacaggctgaaccagctggagtcgaagatgagtggtaaaggccaacagcagcagggccagaccgttaccaaaaagagcgcagctgaagcatctaaaaaaccgcgacagaaacgtaccgcgactaaagcgtacaatgtaacacaggccttcggtcgtcgaggtccggagcaaactcaaggaaactttggcgatcaggaattaatccgccaggggaccgactacaaacactggccgcaaattgcccagttcgccccatccgctagtgcattcttcggtatgagccgcatcggcatggaagtaacgccaagtggtacgtggctgacctacaccggtgctatcaagcttgatgacaaggacccgaactttaaagaccaggttattctgcttaacaaacatattgatgcctataaaactttcccgccgaccgaacccaaaaaggacaaaaagaaaaaagctgatgaaacccaggctctaccgcagcgtcagaaaaaacagcaaactgtgactctgctgccagctgcggacctggatgatttttccaagcagctgcaacagtctatgagctctgcggactctacgcaggcttaa

SEQ ID NO: 509 - DNA, 2016 bp, Artificial Sequence
  Description of Artificial Sequence: Synthetic polynucleotide
atgcaccatcatcaccatcatggtggttctggttcgccgatacttggttattggaagattaaaggactggttcagcccacacgcctcctgctagaatacttagaggaaaaatatgaagagcacctgtacgaacgtgatgagggggacaaatggcgaaacaagaaatttgaattgggcttagaatttccaaatttgccgtattatatcgatggcgacgtaaaactgacccaatcaatggccattattcgctacatcgcagataaacataacatgctgggtggctgccctaaagaacgggctgagatctccatgctggaaggtgcggtgctcgacattcgctacggcgtcagtagaattgcgtatagcaaggatttcgaaactttaaaagtggatttcctgagcaaacttccggagatgctgaaaatgtttgaggataggctttgtcataagacgtatctcaatggtgatcatgttacccacccggactttatgctgtacgacgcccttgatgtcgttctgtatatggatcccatgtgcctggacgccttcccgaaattagtgtgttttaaaaaacgtatcgaagcgattccacagatcgataaatacttgaagtcttctaaatatattgcttggcctctgcaaggctggcaggcaacgttcggtgggggagatcatccgccaaaatcagatctggtgccgcgtgggagccctggcatacaccgcgacggtggttctggtgagaacctgtactttcaaagctcagataatgggcctcaaaaccagcgcaacgctccacgtataaccttcggtggcccgtctgactccacaggcagcaaccagaatggtgagcgtagtggagccaggtctaagcagcgccgtccccagggtctgccgaacaacacggcgagctggtttactgcgcttacccaacacggtaaagaagacttaaaattcccgcgtggccagggcgtcccgatcaacactaactcttccccggatgatcagattggttattaccgcagagcaactcgtcggattcgcggcggcgacggtaaaatgaaagatttgtctccgcgttggtacttttactatctcggcaccggtccggaagctggactgccctacggggcaaacaaggacgggatcatttgggtggctaccgaaggtgccctgaatactccaaaagatcatatcggcacccgtaaccctgctaataacgctgcgatcgttctgcaactgcctcagggtacaactctgccaaaaggcttctatgcagaagggtcgcgtggtggcagccaggcgagtagccgtagcagctcccgctctcgcaactcgtcccgtaactccactccgggctcttctcgcggcacgtccccggctcgtatggcaggtaacggtggtgacgctgctctggcgctgctactgctggacaggctgaaccagctggagtcgaagatgagtggtaaaggccaacagcagcagggccagaccgttaccaaaaagagcgcagctgaagcatctaaaaaaccgcgacagaaacgtaccgcgactaaagcgtttaatgtaacacaggccttcggtcgtcgaggtccggagcaaactcaaggaaactttggcgatcaggaattaatccgccaggggaccgactacaaacactggccgcaaattgcccagttcgccccatccgctagtgcattcttcggtatgagccgcatcggcatggaagtaacgccaagtggtacgtggctgacctacaccggtgctatcaagcttgatgacaaggacccgaactttaaagaccaggttattctgcttaacaaacatattgatgcctataaaactttcccgccgaccgaacccaaaaaggacaaaaagaaaaaagctgatgaaacccaggctctaccgcagcgtcagaaaaaacagcaaactgtgactctgctgccagctgcggacctggatgatttttccaagcagctgcaacagtctatgagctctgcggactctacgcaggcttaa

SEQ ID NO: 510 - DNA, 2016 bp, Artificial Sequence
  Description of Artificial Sequence: Synthetic polynucleotide
atgcaccatcatcaccatcatggtggttctggttcgccgatacttggttattggaagattaaaggactggttcagcccacacgcctcctgctagaatacttagaggaaaaatatgaagagcacctgtacgaacgtgatgagggggacaaatggcgaaacaagaaatttgaattgggcttagaatttccaaatttgccgtattatatcgatggcgacgtaaaactgacccaatcaatggccattattcgctacatcgcagataaacataacatgctgggtggctgccctaaagaacgggctgagatctccatgctggaaggtgcggtgctcgacattcgctacggcgtcagtagaattgcgtatagcaaggatttcgaaactttaaaagtggatttcctgagcaaacttccggagatgctgaaaatgtttgaggataggctttgtcataagacgtatctcaatggtgatcatgttacccacccggactttatgctgtacgacgcccttgatgtcgttctgtatatggatcccatgtgcctggacgccttcccgaaattagtgtgttttaaaaaacgtatcgaagcgattccacagatcgataaatacttgaagtcttctaaatatattgcttggcctctgcaaggctggcaggcaacgttcggtgggggagatcatccgccaaaatcagatctggtgccgcgtgggagccctggcatacaccgcgacggtggttctggtgagaacctgtactttcaaagctcagataatgggcctcaaaaccagcgcaacgctccacgtataaccttcggtggcccgtctgactccacaggcagcaaccagaatggtgagcgtagtggagccaggtctaagcagcgccgtccccagggtctgccgaacaacacggcgagctggtttactgcgcttacccaacacggtaaagaagacttaaaattcccgcgtggccagggcgtcccgatcaacactaactcttccccggatgatcagattggttattaccgcagagcaactcgtcggattcgcggcggcgacggtaaaatgaaagatttgtctccgcgttggtacttttactatctcggcaccggtccggaagctggactgccctacggggcaaacaaggacgggatcatttgggtggctaccgaaggtgccctgaatactccaaaagatcatatcggcacccgtaaccctgctaataacgctgcgatcgttctgcaactgcctcagggtacaactctgccaaaaggcttctatgcagaagggtcgcgtggtggcagccaggcgagtagccgtagcagctcccgctctcgcaactcgtcccgtaactccactccgggctcttctcgcggcacgtccccggctcgtatggcaggtaacggtggtgacgctgctctggcgctgctactgctggacaggctgaaccagctggagtcgaagatgagtggtaaaggccaacagcagcagggccagaccgttaccaaaaagagcgcagctgaagcatctaaaaaaccgcgacagaaacgtaccgcgactaaagcgtacaatgtaacacaggccttcggtcgtcgaggtccggagcaaactcaaggaaactttggcgatcaggaattaatccgccaggggaccgactacaaacactggccgcaaattgcccagttcgccccatccgctagtgcattcttctttatgagccgcatcggcatggaagtaacgccaagtggtacgtggctgacctacaccggtgctatcaagcttgatgacaaggacccgaactttaaagaccaggttattctgcttaacaaacatattgatgcctataaaactttcccgccgaccgaacccaaaaaggacaaaaagaaaaaagctgatgaaacccaggctctaccgcagcgtcagaaaaaacagcaaactgtgactctgctgccagctgcggacctggatgatttttccaagcagctgcaacagtctatgagctctgcggactctacgcaggcttaa

SEQ ID NO: 511 - DNA, 2016 bp, Artificial Sequence
  Description of Artificial Sequence: Synthetic polynucleotide
atgcaccatcatcaccatcatggtggttctggttcgccgatacttggttattggaagattaaaggactggttcagcccacacgcctcctgctagaatacttagaggaaaaatatgaagagcacctgtacgaacgtgatgagggggacaaatggcgaaacaagaaatttgaattgggcttagaatttccaaatttgccgtattatatcgatggcgacgtaaaactgacccaatcaatggccattattcgctacatcgcagataaacataacatgctgggtggctgccctaaagaacgggctgagatctccatgctggaaggtgcggtgctcgacattcgctacggcgtcagtagaattgcgtatagcaaggatttcgaaactttaaaagtggatttcctgagcaaacttccggagatgctgaaaatgtttgaggataggctttgtcataagacgtatctcaatggtgatcatgttacccacccggactttatgctgtacgacgcccttgatgtcgttctgtatatggatcccatgtgcctggacgccttcccgaaattagtgtgttttaaaaaacgtatcgaagcgattccacagatcgataaatacttgaagtcttctaaatatattgcttggcctctgcaaggctggcaggcaacgttcggtgggggagatcatccgccaaaatcagatctggtgccgcgtgggagccctggcatacaccgcgacggtggttctggtgagaacctgtactttcaaagctcagataatgggcctcaaaaccagcgcaacgctccacgtataaccttcggtggcccgtctgactccacaggcagcaaccagaatggtgagcgtagtggagccaggtctaagcagcgccgtccccagggtctgccgaacaacacggcgagctggtttactgcgcttacccaacacggtaaagaagacttaaaattcccgcgtggccagggcgtcccgatcaacactaactcttccccggatgatcagattggttattaccgcagagcaactcgtcggattcgcggcggcgacggtaaaatgaaagatttgtctccgcgttggtacttttactatctcggcaccggtccggaagctggactgccctacggggcaaacaaggacgggatcatttgggtggctaccgaaggtgccctgaatactccaaaagatcatatcggcacccgtaaccctgctaataacgctgcgatcgttctgcaactgcctcagggtacaactctgccaaaaggcttctatgcagaagggtcgcgtggtggcagccaggcgagtagccgtagcagctcccgctctcgcaactcgtcccgtaactccactccgggctcttctcgcggcacgtccccggctcgtatggcaggtaacggtggtgacgctgctctggcgctgctactgctggacaggctgaaccagctggagtcgaagatgagtggtaaaggccaacagcagcagggccagaccgttaccaaaaagagcgcagctgaagcatctaaaaaaccgcgacagaaacgtaccgcgactaaagcgtacaatgtaacacaggccttcggtcgtcgaggtccggagcaaactcaaggaaactttggcgatcaggaattaatccgccaggggaccgactacaaacactggccgcaaattgcccagttcgccccatccgctagtgcattcttcggtatgagccgcatcggcatggaaaatacgccaagtggtacgtggctgacctacaccggtgctatcaagcttgatgacaaggacccgaactttaaagaccaggttattctgcttaacaaacatattgatgcctataaaactttcccgccgaccgaacccaaaaaggacaaaaagaaaaaagctgatgaaacccaggctctaccgcagcgtcagaaaaaacagcaaactgtgactctgctgccagctgcggacctggatgatttttccaagcagctgcaacagtctatgagctctgcggactctacgcaggcttaa

SEQ ID NO: 512 - DNA, 2016 bp, Artificial Sequence
  Description of Artificial Sequence: Synthetic polynucleotide
atgcaccatcatcaccatcatggtggttctggttcgccgatacttggttattggaagattaaaggactggttcagcccacacgcctcctgctagaatacttagaggaaaaatatgaagagcacctgtacgaacgtgatgagggggacaaatggcgaaacaagaaatttgaattgggcttagaatttccaaatttgccgtattatatcgatggcgacgtaaaactgacccaatcaatggccattattcgctacatcgcagataaacataacatgctgggtggctgccctaaagaacgggctgagatctccatgctggaaggtgcggtgctcgacattcgctacggcgtcagtagaattgcgtatagcaaggatttcgaaactttaaaagtggatttcctgagcaaacttccggagatgctgaaaatgtttgaggataggctttgtcataagacgtatctcaatggtgatcatgttacccacccggactttatgctgtacgacgcccttgatgtcgttctgtatatggatcccatgtgcctggacgccttcccgaaattagtgtgttttaaaaaacgtatcgaagcgattccacagatcgataaatacttgaagtcttctaaatatattgcttggcctctgcaaggctggcaggcaacgttcggtgggggagatcatccgccaaaatcagatctggtgccgcgtgggagccctggcatacaccgcgacggtggttctggtgagaacctgtactttcaaagctcagataatgggcctcaaaaccagcgcaacgctccacgtataaccttcggtggcccgtctgactccacaggcagcaaccagaatggtgagcgtagtggagccaggtctaagcagcgccgtccccagggtctgccgaacaacacggcgagctggtttactgcgcttacccaacacggtaaagaagacttaaaattcccgcgtggccagggcgtcccgatcaacactaactcttccccggatgatcagattggttattaccgcagagcaactcgtcggattcgcggcggcgacggtaaaatgaaagatttgtctccgcgttggtacttttactatctcggcaccggtccggaagctggactgccctacggggcaaacaaggacgggatcatttgggtggctaccgaaggtgccctgaatactccaaaagatcatatcggcacccgtaaccctgctaataacgctgcgatcgttctgcaactgcctcagggtacaactctgccaaaaggcttctatgcagaagggtcgcgtggtggcagccaggcgagtagccgtagcagctcccgctctcgcaactcgtcccgtaactccactccgggctcttctcgcggcacgtccccggctcgtatggcaggtaacggtggtgacgctgctctggcgctgctactgctggacaggctgaaccagctggagtcgaagatgagtggtaaaggccaacagcagcagggccagaccgttaccaaaaagagcgcagctgaagcatctaaaaaaccgcgacagaaacgtaccgcgactaaagcgtacaatgtaacacaggccttcggtcgtcgaggtccggagcaaactcaaggaaactttggcgatcaggaattaatccgccaggggaccgactacaaacactggccgcaaattgcccagttcgccccatccgctagtgcattcttcggtatgagccgcatcggcatggaaccaacgccaagtggtacgtggctgacctacaccggtgctatcaagcttgatgacaaggacccgaactttaaagaccaggttattctgcttaacaaacatattgatgcctataaaactttcccgccgaccgaacccaaaaaggacaaaaagaaaaaagctgatgaaacccaggctctaccgcagcgtcagaaaaaacagcaaactgtgactctgctgccagctgcggacctggatgatttttccaagcagctgcaacagtctatgagctctgcggactctacgcaggcttaa

SEQ ID NO: 513 - DNA, 2016 bp, Artificial Sequence
  Description of Artificial Sequence: Synthetic polynucleotide
atgcaccatcatcaccatcatggtggttctggttcgccgatacttggttattggaagattaaaggactggttcagcccacacgcctcctgctagaatacttagaggaaaaatatgaagagcacctgtacgaacgtgatgagggggacaaatggcgaaacaagaaatttgaattgggcttagaatttccaaatttgccgtattatatcgatggcgacgtaaaactgacccaatcaatggccattattcgctacatcgcagataaacataacatgctgggtggctgccctaaagaacgggctgagatctccatgctggaaggtgcggtgctcgacattcgctacggcgtcagtagaattgcgtatagcaaggatttcgaaactttaaaagtggatttcctgagcaaacttccggagatgctgaaaatgtttgaggataggctttgtcataagacgtatctcaatggtgatcatgttacccacccggactttatgctgtacgacgcccttgatgtcgttctgtatatggatcccatgtgcctggacgccttcccgaaattagtgtgttttaaaaaacgtatcgaagcgattccacagatcgataaatacttgaagtcttctaaatatattgcttggcctctgcaaggctggcaggcaacgttcggtgggggagatcatccgccaaaatcagatctggtgccgcgtgggagccctggcatacaccgcgacggtggttctggtgagaacctgtactttcaaagctcagataatgggcctcaaaaccagcgcaacgctccacgtataaccttcggtggcccgtctgactccacaggcagcaaccagaatggtgagcgtagtggagccaggtctaagcagcgccgtccccagggtctgccgaacaacacggcgagctggtttactgcgcttacccaacacggtaaagaagacttaaaattcccgcgtggccagggcgtcccgatcaacactaactcttccccggatgatcagattggttattaccgcagagcaactcgtcggattcgcggcggcgacggtaaaatgaaagatttgtctccgcgttggtacttttactatctcggcaccggtccggaagctggactgccctacggggcaaacaaggacgggatcatttgggtggctaccgaaggtgccctgaatactccaaaagatcatatcggcacccgtaaccctgctaataacgctgcgatcgttacgcaactgcctcagggtacaactctgccaaaaggcttctatgcagaagggtcgcgtggtggcagccaggcgagtagccgtagcagctcccgctctcgcaactcgtcccgtaactccactccgggctcttctcgcggcacgtccccggctcgtatggcaggtaacggtggtgacgctgctctggcgctgctactgctggacaggctgaaccagctggagtcgaagatgagtggtaaaggccaacagcagcagggccagaccgttaccaaaaagagcgcagctgaagcatctaaaaaaccgcgacagaaacgtaccgcgactaaagcgtacaatgtaacacaggccttcggtcgtcgaggtccggagcaaactcaaggaaactttggcgatcaggaattaatccgccaggggaccgactacaaacactggccgcaaattgcccagttcgccccatccgctagtgcattcttcggtatgagccgcatcggcatggaagtaacgccaagtggtacgtggctgacctacaccggtgctatcaagcttgatgacaaggacccgaactttaaagaccaggttattctgcttaacaaacatattgatgcctataaaactttcccgccgaccgaacccaaaaaggacaaaaagaaaaaagctgatgaaacccaggctctaccgcagcgtcagaaaaaacagcaaactgtgactctgctgccagctgcggacctggatgatttttccaagcagctgcaacagtctatgagctctgcggactctacgcaggcttaa

SEQ ID NO: 514 - DNA, 2016 bp, Artificial Sequence
  Description of Artificial Sequence: Synthetic polynucleotide
atgcaccatcatcaccatcatggtggttctggttcgccgatacttggttattggaagattaaaggactggttcagcccacacgcctcctgctagaatacttagaggaaaaatatgaagagcacctgtacgaacgtgatgagggggacaaatggcgaaacaagaaatttgaattgggcttagaatttccaaatttgccgtattatatcgatggcgacgtaaaactgacccaatcaatggccattattcgctacatcgcagataaacataacatgctgggtggctgccctaaagaacgggctgagatctccatgctggaaggtgcggtgctcgacattcgctacggcgtcagtagaattgcgtatagcaaggatttcgaaactttaaaagtggatttcctgagcaaacttccggagatgctgaaaatgtttgaggataggctttgtcataagacgtatctcaatggtgatcatgttacccacccggactttatgctgtacgacgcccttgatgtcgttctgtatatggatcccatgtgcctggacgccttcccgaaattagtgtgttttaaaaaacgtatcgaagcgattccacagatcgataaatacttgaagtcttctaaatatattgcttggcctctgcaaggctggcaggcaacgttcggtgggggagatcatccgccaaaatcagatctggtgccgcgtgggagccctggcatacaccgcgacggtggttctggtgagaacctgtactttcaaagctcagataatgggcctcaaaaccagcgcaacgctccacgtataaccttcggtggcccgtctgactccacaggcagcaaccagaatggtgagcgtagtggagccaggtctaagcagcgccgtccccagggtctgccgaacaacacggcgagctggtttactgcgcttacccaacacggtaaagaagacttaaaattcccgcgtggccagggcgtcccgatcaacactaactcttccccggatgatcagattggttattaccgcagagcaactcgtcggattcgcggcggcgacggtaaaatgaaagatttgtctccgcgttggtacttttactatctcggcaccggtccggaagctggactgccctacggggcaaacaaggacgggatcatttgggtggctaccgaaggtgccctgaatactccaaaagatcatatcggcacccgtaaccctgctaataacgctgcgatcgttctgcaactgcctcagggtacaactctgccaaaaggcttctatgcagaagggtcgcgtggtggcagccaggcgagtagccgtagcagctcccgctctcgcaactcgtcccgtaactccactccgggctcttctcgcggcacgtccccggctcgtatggcaggtaacggtggtgacgctgctctggcgctgctactgctggacaggctgaaccagctggagtcgaagatgagtggtaaaggccaacagcagcagggccagaccgttaccaaaaagagcgcagctgaagcatctaaaaaaccgcgacagaaacgtaccgcgactaaagcgtacaatgtaacacaggccttcggtcgtcgaggtccggagcaaactcaaggaaactttggcgatcaggaattaatccgccaggggaccgactacaaaggatggccgcaaattgcccagttcgccccatccgctagtgcattcttcggtatgagccgcatcggcatggaagtaacgccaagtggtacgtggctgacctacaccggtgctatcaagcttgatgacaaggacccgaactttaaagaccaggttattctgcttaacaaacatattgatgcctataaaactttcccgccgaccgaacccaaaaaggacaaaaagaaaaaagctgatgaaacccaggctctaccgcagcgtcagaaaaaacagcaaactgtgactctgctgccagctgcggacctggatgatttttccaagcagctgcaacagtctatgagctctgcggactctacgcaggcttaa

SEQ ID NO: 515 - DNA, 2016 bp, Artificial Sequence
  Description of Artificial Sequence: Synthetic polynucleotide
atgcaccatcatcaccatcatggtggttctggttcgccgatacttggttattggaagattaaaggactggttcagcccacacgcctcctgctagaatacttagaggaaaaatatgaagagcacctgtacgaacgtgatgagggggacaaatggcgaaacaagaaatttgaattgggcttagaatttccaaatttgccgtattatatcgatggcgacgtaaaactgacccaatcaatggccattattcgctacatcgcagataaacataacatgctgggtggctgccctaaagaacgggctgagatctccatgctggaaggtgcggtgctcgacattcgctacggcgtcagtagaattgcgtatagcaaggatttcgaaactttaaaagtggatttcctgagcaaacttccggagatgctgaaaatgtttgaggataggctttgtcataagacgtatctcaatggtgatcatgttacccacccggactttatgctgtacgacgcccttgatgtcgttctgtatatggatcccatgtgcctggacgccttcccgaaattagtgtgttttaaaaaacgtatcgaagcgattccacagatcgataaatacttgaagtcttctaaatatattgcttggcctctgcaaggctggcaggcaacgttcggtgggggagatcatccgccaaaatcagatctggtgccgcgtgggagccctggcatacaccgcgacggtggttctggtgagaacctgtactttcaaagctcagataatgggcctcaaaaccagcgcaacgctccacgtataaccttcggtggcccgtctgactccacaggcagcaaccagaatggtgagcgtagtggagccaggtctaagcagcgccgtccccagggtctgccgaacaacacggcgagctggtttactggccttacccaaaatggtaaagaagacttaaaattcccgcccggccagggcgtcccgatcaacactaactcttccccggatgatcagattggttattaccgcagagcaactcgtcggattcgcggcggcgacggtaaaatgaaagatttgccaccgcgttggtacttttactatctcggcaccggtccgcacgctgatctgccctacgggcaaaagcatgacggggtggtttgggtggctaaacctggtgccctgaatactccaaaagatcatatcggcacccgtaaccctgctaataacgctgcgatcccgctgcaactgcctcccggtacaaaactgccaaaaggcttctatgcagaagggtcgcgtggtggcagccaggcgagtagccgtagcagctcccgctctcgcaactcgtcccgtaactccactccgggctcttctcgcggcacgtccccggctcgtatggcaggtaacggtggtgacgctgctctggcgctgctactgctggacaggctgaaccagctggagtcgaagatgagtggtaaaggccaacagcagcagggccagaccgttaccaaaaagagcgcagctgaagcatctaaaaaaccgcgacagaaacgtaccgcgactaaagcgtacaatgtaacacaggccttcggtcgtcgaggtccggagcaaactcaaggaaactttggcgatcaggaattaatccgccaggggaccgactacaaacactggccgcaaattgcccagttcgccccatccgctagtgcattcttcggtatgagccgcatcggcatggaagtaacgccaagtggtacgtggctgacctacaccggtgctatcaagcttgatgacaaggacccgaactttaaagaccaggttattctgcttaacaaacatattgatgcctataaaactttcccgccgaccgaacccaaaaaggacaaaaagaaaaaagctgatgaaacccaggctctaccgcagcgtcagaaaaaacagcaaactgtgactctgctgccagctgcggacctggatgatttttccaagcagctgcaacagtctatgagctctgcggactctacgcaggcttaa

SEQ ID NO: 516 - DNA, 2016 bp, Artificial Sequence
  Description of Artificial Sequence: Synthetic polynucleotide
atgcaccatcatcaccatcatggtggttctggttcgccgatacttggttattggaagattaaaggactggttcagcccacacgcctcctgctagaatacttagaggaaaaatatgaagagcacctgtacgaacgtgatgagggggacaaatggcgaaacaagaaatttgaattgggcttagaatttccaaatttgccgtattatatcgatggcgacgtaaaactgacccaatcaatggccattattcgctacatcgcagataaacataacatgctgggtggctgccctaaagaacgggctgagatctccatgctggaaggtgcggtgctcgacattcgctacggcgtcagtagaattgcgtatagcaaggatttcgaaactttaaaagtggatttcctgagcaaacttccggagatgctgaaaatgtttgaggataggctttgtcataagacgtatctcaatggtgatcatgttacccacccggactttatgctgtacgacgcccttgatgtcgttctgtatatggatcccatgtgcctggacgccttcccgaaattagtgtgttttaaaaaacgtatcgaagcgattccacagatcgataaatacttgaagtcttctaaatatattgcttggcctctgcaaggctggcaggcaacgttcggtgggggagatcatccgccaaaatcagatctggtgccgcgtgggagccctggcatacaccgcgacggtggttctggtgagaacctgtactttcaaagctcagataatgggcctcaaaaccagcgcaacgctccacgtataaccttcggtggcccgtctgactccacaggcagcaaccagaatggtgagcgtagtggagccaggtctaagcagcgccgtccccagggtctgccgaacaacacggcgagctggtttactgcgcttacccaacacggtaaagaagacttaaaattcccgcgtggccagggcgtcccgatcaacactaactcttccccggatgatcagattggttattaccgcagagcaactcgtcggattcgcggcggcgacggtaaaatgaaagatttgtctccgcgttggtacttttactatctcggcaccggtccggaagctggactgccctacggggcaaacaaggacgggatcttttgggtggctaccgaaggtgccctgaatactccaaaagatcatatcggcacccgtaaccctgctaataacgctgcgatcgttctgcaactgcctcagggtacaactctgccaaaaggcttctatgcagaagggtcgcgtggtggcagccaggcgagtagccgtagcagctcccgctctcgcaactcgtcccgtaactccactccgggctcttctcgcggcacgtccccggctcgtatggcaggtaacggtggtgacgctgctctggcgctgctactgctggacaggctgaaccagctggagtcgaagatgagtggtaaaggccaacagcagcagggccagaccgttaccaaaaagagcgcagctgaagcatctaaaaaaccgcgacagaaacgtaccgcgactaaagcgtacaatgtaacacaggccttcggtcgtcgaggtccggagcaaactcaaggaaactttggcgatcaggaattaatccgccaggggaccgactacaaacactggccgcaaattgcccagttcgccccatccgctagtgcattcttcggtatgagccgcatcggcatggaagtaacgccaagtggtacgtggctgacctacaccggtgctatcaagcttgatgacaaggacccgaactttaaagaccaggttattctgcttaacaaacatattgatgcctataaaactttcccgccgaccgaacccaaaaaggacaaaaagaaaaaagctgatgaaacccaggctctaccgcagcgtcagaaaaaacagcaaactgtgactctgctgccagctgcggacctggatgatttttccaagcagctgcaacagtctatgagctctgcggactctacgcaggcttaa

SEQ ID NO: 517 - DNA, 2016 bp, Artificial Sequence
  Description of Artificial Sequence: Synthetic polynucleotide
atgcaccatcatcaccatcatggtggttctggttcgccgatacttggttattggaagattaaaggactggttcagcccacacgcctcctgctagaatacttagaggaaaaatatgaagagcacctgtacgaacgtgatgagggggacaaatggcgaaacaagaaatttgaattgggcttagaatttccaaatttgccgtattatatcgatggcgacgtaaaactgacccaatcaatggccattattcgctacatcgcagataaacataacatgctgggtggctgccctaaagaacgggctgagatctccatgctggaaggtgcggtgctcgacattcgctacggcgtcagtagaattgcgtatagcaaggatttcgaaactttaaaagtggatttcctgagcaaacttccggagatgctgaaaatgtttgaggataggctttgtcataagacgtatctcaatggtgatcatgttacccacccggactttatgctgtacgacgcccttgatgtcgttctgtatatggatcccatgtgcctggacgccttcccgaaattagtgtgttttaaaaaacgtatcgaagcgattccacagatcgataaatacttgaagtcttctaaatatattgcttggcctctgcaaggctggcaggcaacgttcggtgggggagatcatccgccaaaatcagatctggtgccgcgtgggagccctggcatacaccgcgacggtggttctggtgagaacctgtactttcaaagctcagataatgggcctcaaaaccagcgcaacgctccacgtataaccttcggtggcccgtctgactccacaggcagcaaccagaatggtgagcgtagtggagccaggtctaagcagcgccgtccccagggtctgccgaacaacacggcgagctggtttactgcgcttacccaacacggtaaagaagacttaaaattcccgcgtggccagggcgtcccgatcaacactaactcttccccggatgatcagattggttattaccgcagagcaactcgtcggattcgcggcggcgacggtaaaatgaaagatttgtctccgcgttggtacttttactatctcggcaccggtccggaagctggactgccctacggggcaaacaaggacgggatcatttgggtggctaccgaaggtgccctgaatactccaaaagatcatatcggcacccgtaaccctgctaataacgctgcgatcgttctgcaactgcctcagggtacaactctgccaaaaggcttctatgcagaagggtcgcgtggtggcagccaggcgagtagccgtagcagctcccgctctcgcaactcgtcccgtaactccactccgggctcttctcgcggcacgtccccggctcgtatggcaggtaacggtggtgacgctgctctggcgctgctactgctggacaggctgaaccagctggagtcgaagatgagtggtaaaggccaacagcagcagggccagaccgttaccaaaaagagcgcagctgaagcatctaaaaaaccgcgacagaaacgtaccgcgactaaaggatacaatgtaacacaggccttcggtcgtcgaggtccggagcaaactcaaggaaactttggcgatcaggatttaaataaattggggaccgactacaaacactggccgcaaattgcccagttcgccccatccgctagtgcattcttcggtatgagccgcatcggcaccgaagaaacgccaagtggtacgtggctgacctacaccggtgctatcaagcttgataagaaggacccgaactttaaagaccaggttattctgcttaacaaacatattgatgcctataaaactttcccgccgaccgaacccaaaaaggacaaaaagaaaaaagctgatgaaacccaggctctaccgcagcgtcagaaaaaacagcaaactgtgactctgctgccagctgcggacctggatgatttttccaagcagctgcaacagtctatgagctctgcggactctacgcaggcttaa

SEQ ID NO: 518 - DNA, 2016 bp, Artificial Sequence
  Description of Artificial Sequence: Synthetic polynucleotide
atgcaccatcatcaccatcatggtggttctggttcgccgatacttggttattggaagattaaaggactggttcagcccacacgcctcctgctagaatacttagaggaaaaatatgaagagcacctgtacgaacgtgatgagggggacaaatggcgaaacaagaaatttgaattgggcttagaatttccaaatttgccgtattatatcgatggcgacgtaaaactgacccaatcaatggccattattcgctacatcgcagataaacataacatgctgggtggctgccctaaagaacgggctgagatctccatgctggaaggtgcggtgctcgacattcgctacggcgtcagtagaattgcgtatagcaaggatttcgaaactttaaaagtggatttcctgagcaaacttccggagatgctgaaaatgtttgaggataggctttgtcataagacgtatctcaatggtgatcatgttacccacccggactttatgctgtacgacgcccttgatgtcgttctgtatatggatcccatgtgcctggacgccttcccgaaattagtgtgttttaaaaaacgtatcgaagcgattccacagatcgataaatacttgaagtcttctaaatatattgcttggcctctgcaaggctggcaggcaacgttcggtgggggagatcatccgccaaaatcagatctggtgccgcgtgggagccctggcatacaccgcgacggtggttctggtgagaacctgtactttcaaagctcagataatgggcctcaaaaccagcgcaacgctccacgtataaccttcggtggcccgtctgactccacaggcagcaaccagaatggtgagcgtagtggagccaggtctaagcagcgccgtccccagggtctgccgaacaacacggcgagctggtttactgcgcttacccaacacggtaaagaagacttaaaattcccgcgtggccagggcgtcccgatcaacactaactcttccccggatgatcagattggttattaccgcagagcaactcgtcggattcgcggcggcgacggtaaaatgaaagatttgtctccgcgttggtacttttactatctcggcaccggtccggaagctggactgccctacggggcaaacaaggacgggatcatttgggtggctaccgaaggtgccctgaatactccaaaagatcatatcggcaatcgtaaccctgctaataacgctgcgatcgttctgcaactgcctcagggtacaactctgccaaaaggcttctatgcagaagggtcgcgtggtggcagccaggcgagtagccgtagcagctcccgctctcgcaactcgtcccgtaactccactccgggctcttctcgcggcacgtccccggctcgtatggcaggtaacggtggtgacgctgctctggcgctgctactgctggacaggctgaaccagctggagtcgaagatgagtggtaaaggccaacagcagcagggccagaccgttaccaaaaagagcgcagctgaagcatctaaaaaaccgcgacagaaacgtaccgcgactaaagcgtacaatgtaacacaggccttcggtcgtcgaggtccggagcaaactcaaggaaactttggcgatcaggaattaatccgccaggggaccgactacaaacactggccgcaaattgcccagttcgccccatccgctagtgcattcttcggtatgagccgcatcggcatggaagtaacgccaagtggtacgtggctgacctacaccggtgctatcaagcttgatgacaaggacccgaactttaaagaccaggttattctgcttaacaaacatattgatgcctataaaactttcccgccgaccgaacccaaaaaggacaaaaagaaaaaagctgatgaaacccaggctctaccgcagcgtcagaaaaaacagcaaactgtgactctgctgccagctgcggacctggatgatttttccaagcagctgcaacagtctatgagctctgcggactctacgcaggcttaa

SEQ ID NO: 519 - DNA, 2016 bp, Artificial Sequence
  Description of Artificial Sequence: Synthetic polynucleotide
atgcaccatcatcaccatcatggtggttctggttcgccgatacttggttattggaagattaaaggactggttcagcccacacgcctcctgctagaatacttagaggaaaaatatgaagagcacctgtacgaacgtgatgagggggacaaatggcgaaacaagaaatttgaattgggcttagaatttccaaatttgccgtattatatcgatggcgacgtaaaactgacccaatcaatggccattattcgctacatcgcagataaacataacatgctgggtggctgccctaaagaacgggctgagatctccatgctggaaggtgcggtgctcgacattcgctacggcgtcagtagaattgcgtatagcaaggatttcgaaactttaaaagtggatttcctgagcaaacttccggagatgctgaaaatgtttgaggataggctttgtcataagacgtatctcaatggtgatcatgttacccacccggactttatgctgtacgacgcccttgatgtcgttctgtatatggatcccatgtgcctggacgccttcccgaaattagtgtgttttaaaaaacgtatcgaagcgattccacagatcgataaatacttgaagtcttctaaatatattgcttggcctctgcaaggctggcaggcaacgttcggtgggggagatcatccgccaaaatcagatctggtgccgcgtgggagccctggcatacaccgcgacggtggttctggtgagaacctgtactttcaaagctcagataatgggcctcaaaaccagcgcaacgctccacgtataaccttcggtggcccgtctgactccacaggcagcaaccagaatggtgagcgtagtggagccaggtctaagcagcgccgtccccagggtctgccgaacaacacggcgagctggtttactgcgcttacccaacacggtaaagaagacttaaaattcccgcgtggccagggcgtcccgatcaacactaactcttccccggatgatcagattggttattaccgcagagcaactcgtcggattcgcggcggcgacggtaaaatgaaagatttgtctccgcgttggtacttttactatctcggcaccggtccggaagctggactgccctacggggcaaacaaggacgggatcatttgggtggctaccgaaggtgccctgaatactccaaaagatcatatcggcacccgtaaccctgctaataacgctgcgatcgttctgcaactgcctcagggtacaactctgccaaaaggcttctatgcagaagggtcgcgtggtggcagccaggcgagtagccgtagcagctcccgctctcgcaactcgtcccgtaactccactccgggctcttctcgcggcacgtccccggctcgtatggcaggtaacggtggtgacgctgctctggcgctgctactgctggacaggctgaaccagctggagtcgaagatgagtggtaaaggccaacagcagcagggccagaccgttaccaaaaagagcgcagctgaagcatctaaaaaaccgcgacagaaacgtaccgcgactaaagcgtacaatgtaacacaggccttcggtcgtcgaggtccggaggatactcaaggaaactttggcgatcaggaattaatccgccaggggaccgactacaaacactggccgcaaattgcccagttcgccccatccgctagtgcattcttcggtatgagccgcatcggcatggaagtaacgccaagtggtacgtggctgacctacaccggtgctatcaagcttgatgacaaggacccgaactttaaagaccaggttattctgcttaacaaacatattgatgcctataaaactttcccgccgaccgaacccaaaaaggacaaaaagaaaaaagctgatgaaacccaggctctaccgcagcgtcagaaaaaacagcaaactgtgactctgctgccagctgcggacctggatgatttttccaagcagctgcaacagtctatgagctctgcggactctacgcaggcttaa

SEQ ID NO: 520 - DNA, 2016 bp, Artificial Sequence
  Description of Artificial Sequence: Synthetic polynucleotide
atgcaccatcatcaccatcatggtggttctggttcgccgatacttggttattggaagattaaaggactggttcagcccacacgcctcctgctagaatacttagaggaaaaatatgaagagcacctgtacgaacgtgatgagggggacaaatggcgaaacaagaaatttgaattgggcttagaatttccaaatttgccgtattatatcgatggcgacgtaaaactgacccaatcaatggccattattcgctacatcgcagataaacataacatgctgggtggctgccctaaagaacgggctgagatctccatgctggaaggtgcggtgctcgacattcgctacggcgtcagtagaattgcgtatagcaaggatttcgaaactttaaaagtggatttcctgagcaaacttccggagatgctgaaaatgtttgaggataggctttgtcataagacgtatctcaatggtgatcatgttacccacccggactttatgctgtacgacgcccttgatgtcgttctgtatatggatcccatgtgcctggacgccttcccgaaattagtgtgttttaaaaaacgtatcgaagcgattccacagatcgataaatacttgaagtcttctaaatatattgcttggcctctgcaaggctggcaggcaacgttcggtgggggagatcatccgccaaaatcagatctggtgccgcgtgggagccctggcatacaccgcgacggtggttctggtgagaacctgtactttcaaagctcagataatgggcctcaaaaccagcgcaacgctccacgtataaccttcggtggcccgtctgactccacaggcagcaaccagaatggtgagcgtagtggagccaggtctaagcagcgccgtccccagggtctgccgaacaacacggcgagctggtttactgcgcttacccaacacggtaaagaagacttaaaattcccgcgtggccagggcgtcccgatcaacactaactcttccccggatgatcagattggttattaccgcagagcaactcgtcggattcgcggcggcgacggtaaaatgaaagatttgtctccgcgttggtacttttactatctcggcaccggtccggaagctggactgccctacggggcaaacaaggacgggatcatttgggtggctaccgaaggtgccctgaatactccaaaagatcatatcggcacccgtaaccctgctaataacgctgcgatcgttctgcaactgcctcagggtacaactctgccaaaaggcttctatgcagaagggtcgcgtggtggcagccaggcgagtagccgtagcagctcccgctctcgcaactcgtcccgtaactccactccgggctcttctcgcggcacgtccccggctcgtatggcaggtaacggtggtgacgctgctctggcgctgctactgctggacaggctgaaccagctggagtcgaagatgagtggtaaaggccaacagcagcagggccagaccgttaccaaaaagagcgcagctgaagcatctaaaaaaccgcgacagaaacgtaccgcgactaaagcgtacaatgtaacacaggccttcggtcgtcgaggtccggagcaaactcaaggaaactttggcgatcaggaattaatccgccaggggaccgactacaaacactggccgcaaattgcccagttcgccccatccgctagtgcattcttcggtatgagccgcatcggcatggaagtaacgccaagtggtacgtggctgacctacaccggtgctatcaagcttgatgacaaggacccgaactttaaagaccaggttaaactgcttaacaaacatattgatgcctataaaactttcccgccgaccgaacccaaaaaggacaaaaagaaaaaagctgatgaaacccaggctctaccgcagcgtcagaaaaaacagcaaactgtgactctgctgccagctgcggacctggatgatttttccaagcagctgcaacagtctatgagctctgcggactctacgcaggcttaa

SEQ ID NO: 521 - DNA, 2016 bp, Artificial Sequence
  Description of Artificial Sequence: Synthetic polynucleotide
atgcaccatcatcaccatcatggtggttctggttcgccgatacttggttattggaagattaaaggactggttcagcccacacgcctcctgctagaatacttagaggaaaaatatgaagagcacctgtacgaacgtgatgagggggacaaatggcgaaacaagaaatttgaattgggcttagaatttccaaatttgccgtattatatcgatggcgacgtaaaactgacccaatcaatggccattattcgctacatcgcagataaacataacatgctgggtggctgccctaaagaacgggctgagatctccatgctggaaggtgcggtgctcgacattcgctacggcgtcagtagaattgcgtatagcaaggatttcgaaactttaaaagtggatttcctgagcaaacttccggagatgctgaaaatgtttgaggataggctttgtcataagacgtatctcaatggtgatcatgttacccacccggactttatgctgtacgacgcccttgatgtcgttctgtatatggatcccatgtgcctggacgccttcccgaaattagtgtgttttaaaaaacgtatcgaagcgattccacagatcgataaatacttgaagtcttctaaatatattgcttggcctctgcaaggctggcaggcaacgttcggtgggggagatcatccgccaaaatcagatctggtgccgcgtgggagccctggcatacaccgcgacggtggttctggtgagaacctgtactttcaaagctcagataatgggcctcaaaaccagcgcaacgctccacgtataaccttcggtggcccgtctgactccacaggcagcaaccagaatggtgagcgtagtggagccaggtctaagcagcgccgtccccagggtctgccgaacaacacggcgagctggtttactgcgcttacccaacacggtaaagaagacttaaaattcccgcgtggccagggcgtcccgatcaacactaactcttccccggatgatcagattggttattaccgcagagcaactcgtcggattcgcggcggcgacggtaaaatgaaagatttgtctccggtttggtacttttactatctcggcaccggtccggaagctggactgccctacggggcaaacaaggacgggatcatttgggtggctaccgaaggtgccctgaatactccaaaagatcatatcggcacccgtaaccctgctaataacgctgcgatcgttctgcaactgcctcagggtacaactctgccaaaaggcttctatgcagaagggtcgcgtggtggcagccaggcgagtagccgtagcagctcccgctctcgcaactcgtcccgtaactccactccgggctcttctcgcggcacgtccccggctcgtatggcaggtaacggtggtgacgctgctctggcgctgctactgctggacaggctgaaccagctggagtcgaagatgagtggtaaaggccaacagcagcagggccagaccgttaccaaaaagagcgcagctgaagcatctaaaaaaccgcgacagaaacgtaccgcgactaaagcgtacaatgtaacacaggccttcggtcgtcgaggtccggagcaaactcaaggaaactttggcgatcaggaattaatccgccaggggaccgactacaaacactggccgcaaattgcccagttcgccccatccgctagtgcattcttcggtatgagccgcatcggcatggaagtaacgccaagtggtacgtggctgacctacaccggtgctatcaagcttgatgacaaggacccgaactttaaagaccaggttattctgcttaacaaacatattgatgcctataaaactttcccgccgaccgaacccaaaaaggacaaaaagaaaaaagctgatgaaacccaggctctaccgcagcgtcagaaaaaacagcaaactgtgactctgctgccagctgcggacctggatgatttttccaagcagctgcaacagtctatgagctctgcggactctacgcaggcttaa

SEQ ID NO: 522 - DNA, 2016 bp, Artificial Sequence
  Description of Artificial Sequence: Synthetic polynucleotide
atgcaccatcatcaccatcatggtggttctggttcgccgatacttggttattggaagattaaaggactggttcagcccacacgcctcctgctagaatacttagaggaaaaatatgaagagcacctgtacgaacgtgatgagggggacaaatggcgaaacaagaaatttgaattgggcttagaatttccaaatttgccgtattatatcgatggcgacgtaaaactgacccaatcaatggccattattcgctacatcgcagataaacataacatgctgggtggctgccctaaagaacgggctgagatctccatgctggaaggtgcggtgctcgacattcgctacggcgtcagtagaattgcgtatagcaaggatttcgaaactttaaaagtggatttcctgagcaaacttccggagatgctgaaaatgtttgaggataggctttgtcataagacgtatctcaatggtgatcatgttacccacccggactttatgctgtacgacgcccttgatgtcgttctgtatatggatcccatgtgcctggacgccttcccgaaattagtgtgttttaaaaaacgtatcgaagcgattccacagatcgataaatacttgaagtcttctaaatatattgcttggcctctgcaaggctggcaggcaacgttcggtgggggagatcatccgccaaaatcagatctggtgccgcgtgggagccctggcatacaccgcgacggtggttctggtgagaacctgtactttcaaagctcagataatgggcctcaaaaccagcgcaacgctccacgtataaccttcggtggcccgtctgactccacaggcagcaaccagaatggtgagcgtagtggagccaggtctaagcagcgccgtccccagggtctgccgaacaacacggcgagctggtttactgcgcttacccaacacggtaaagaagacttaaaattcccgcgtggccagggcgtcccgatcaacactaactcttccccggatgatcagattggttattaccgcagagcaactcgtcggattcgcggcggcgacggtaaaatgaaagatttgtctccgcgttggtacttttactatctcggcaccggtccggaagctggactgccctacggggcaaacaaggacgggatcatttgggtggctaccgaaggtgccctgaatactccaaaagatcatatcggcacccgtaaccctgctaataacgctgcgatcgttctgcaactgcctcagggtacaactctgccaaaaggcttctatgcagaagggtcgcgtggtggcagccaggcgagtagccgtagcagctcccgctctcgcaactcgtcccgtaactccactccgggctcttctcgcggcacgtccccggctcgtatggcaggtaacggtggtgacgctgctctggcgctgctactgctggacaggctgaaccagctggagtcgaagatgagtggtaaaggccaacagcagcagggccagaccgttaccaaaaagagcgcagctgaaatgtctaaaaaaccgcgatggaaacgtacccccactaaaggctacaatgtaacacaggccttcggtcctcgaggtccgaaagatactcaaggaaactttggcgatgcggaattaatcaagcaggggaccgactacaaacactggccgcaaattgcccagttcgtgccatccgctgcggcattcttctttatgagccgcatcggcatgaaagaaacgccagatggtgtgtggctgacctacaccggtacgatcaagcttgataaagatgacccgaactttgatgaccaggttaaactgcttaacaaacatattgatgcctataaaactttcccgccgaccgaacccaaaaaggacaaaaagaaaaaagctgatgaaacccaggctctaccgcagcgtcagaaaaaacagcaaactgtgactctgctgccagctgcggacctggatgatttttccaagcagctgcaacagtctatgagctctgcggactctacgcaggcttaa

SEQ ID NO: 523 - DNA, 2016 bp, Artificial Sequence
  Description of Artificial Sequence: Synthetic polynucleotide
atgcaccatcatcaccatcatggtggttctggttcgccgatacttggttattggaagattaaaggactggttcagcccacacgcctcctgctagaatacttagaggaaaaatatgaagagcacctgtacgaacgtgatgagggggacaaatggcgaaacaagaaatttgaattgggcttagaatttccaaatttgccgtattatatcgatggcgacgtaaaactgacccaatcaatggccattattcgctacatcgcagataaacataacatgctgggtggctgccctaaagaacgggctgagatctccatgctggaaggtgcggtgctcgacattcgctacggcgtcagtagaattgcgtatagcaaggatttcgaaactttaaaagtggatttcctgagcaaacttccggagatgctgaaaatgtttgaggataggctttgtcataagacgtatctcaatggtgatcatgttacccacccggactttatgctgtacgacgcccttgatgtcgttctgtatatggatcccatgtgcctggacgccttcccgaaattagtgtgttttaaaaaacgtatcgaagcgattccacagatcgataaatacttgaagtcttctaaatatattgcttggcctctgcaaggctggcaggcaacgttcggtgggggagatcatccgccaaaatcagatctggtgccgcgtgggagccctggcatacaccgcgacggtggttctggtgagaacctgtactttcaaagctcagataatgggcctcaaaaccagcgcaacgctccacgtataaccttcggtggcccgtctgactccacaggcagcaaccagaatggtgagcgtagtggagccaggtctaagcagcgccgtccccagggtctgccgaacaacacggcgagctggtttactgcgcttacccaacacggtaaagaagacttaaaattcccgcgtggccagggcgtcccgatcaacactaactcttccccggatgatcagattggttattaccgcagaatgactcgtcggattcgcggcggcgacggtaaaatgaaagatttgtctccgcgttggtacttttactatctcggcaccggtccggaagctggactgccctacggggcaaacaaggacgggatcatttgggtggctaccgaaggtgccctgaatactccaaaagatcatatcggcacccgtaaccctgctaataacgctgcgatcgttctgcaactgcctcagggtacaactctgccaaaaggcttctatgcagaagggtcgcgtggtggcagccaggcgagtagccgtagcagctcccgctctcgcaactcgtcccgtaactccactccgggctcttctcgcggcacgtccccggctcgtatggcaggtaacggtggtgacgctgctctggcgctgctactgctggacaggctgaaccagctggagtcgaagatgagtggtaaaggccaacagcagcagggccagaccgttaccaaaaagagcgcagctgaagcatctaaaaaaccgcgacagaaacgtaccgcgactaaagcgtacaatgtaacacaggccttcggtcgtcgaggtccggagcaaactcaaggaaactttggcgatcaggaattaatccgccaggggaccgactacaaacactggccgcaaattgcccagttcgccccatccgctagtgcattcttcggtatgagccgcatcggcatggaagtaacgccaagtggtacgtggctgacctacaccggtgctatcaagcttgatgacaaggacccgaactttaaagaccaggttattctgcttaacaaacatattgatgcctataaaactttcccgccgaccgaacccaaaaaggacaaaaagaaaaaagctgatgaaacccaggctctaccgcagcgtcagaaaaaacagcaaactgtgactctgctgccagctgcggacctggatgatttttccaagcagctgcaacagtctatgagctctgcggactctacgcaggcttaa

SEQ ID NO: 524 - DNA, 2016 bp, Artificial Sequence
  Description of Artificial Sequence: Synthetic polynucleotide
atgcaccatcatcaccatcatggtggttctggttcgccgatacttggttattggaagattaaaggactggttcagcccacacgcctcctgctagaatacttagaggaaaaatatgaagagcacctgtacgaacgtgatgagggggacaaatggcgaaacaagaaatttgaattgggcttagaatttccaaatttgccgtattatatcgatggcgacgtaaaactgacccaatcaatggccattattcgctacatcgcagataaacataacatgctgggtggctgccctaaagaacgggctgagatctccatgctggaaggtgcggtgctcgacattcgctacggcgtcagtagaattgcgtatagcaaggatttcgaaactttaaaagtggatttcctgagcaaacttccggagatgctgaaaatgtttgaggataggctttgtcataagacgtatctcaatggtgatcatgttacccacccggactttatgctgtacgacgcccttgatgtcgttctgtatatggatcccatgtgcctggacgccttcccgaaattagtgtgttttaaaaaacgtatcgaagcgattccacagatcgataaatacttgaagtcttctaaatatattgcttggcctctgcaaggctggcaggcaacgttcggtgggggagatcatccgccaaaatcagatctggtgccgcgtgggagccctggcatacaccgcgacggtggttctggtgagaacctgtactttcaaagctcagataatgggcctcaaaaccagcgcaacgctccacgtataaccttcggtggcccgtctgactccacaggcagcaaccagaatggtgagcgtagtggagccaggtctaagcagcgccgtccccagggtctgccgaacaacacggcgagctggtttactgcgcttacccaacacggtaaagaagacttaaaattcccgcgtggccagggcgtcccgatcaacactaactcttccccggatgatcagattggttattaccgcagagcaactcgtcggattcgcggcggcgacggtaaaatgaaagatttgtctccgcgttggtacttttactatctcggcaccggtccggaagctgccctgccctacggggcaaacaaggacgggatcatttgggtggctaccgaaggtgccctgaatactccaaaagatcatatcggcacccgtaaccctgctaataacgctgcgatcgttctgcaactgcctcagggtacaactctgccaaaaggcttctatgcagaagggtcgcgtggtggcagccaggcgagtagccgtagcagctcccgctctcgcaactcgtcccgtaactccactccgggctcttctcgcggcacgtccccggctcgtatggcaggtaacggtggtgacgctgctctggcgctgctactgctggacaggctgaaccagctggagtcgaagatgagtggtaaaggccaacagcagcagggccagaccgttaccaaaaagagcgcagctgaagcatctaaaaaaccgcgacagaaacgtaccgcgactaaagcgtacaatgtaacacaggccttcggtcgtcgaggtccggagcaaactcaaggaaactttggcgatcaggaattaatccgccaggggaccgactacaaacactggccgcaaattgcccagttcgccccatccgctagtgcattcttcggtatgagccgcatcggcatggaagtaacgccaagtggtacgtggctgacctacaccggtgctatcaagcttgatgacaaggacccgaactttaaagaccaggttattctgcttaacaaacatattgatgcctataaaactttcccgccgaccgaacccaaaaaggacaaaaagaaaaaagctgatgaaacccaggctctaccgcagcgtcagaaaaaacagcaaactgtgactctgctgccagctgcggacctggatgatttttccaagcagctgcaacagtctatgagctctgcggactctacgcaggcttaa

SEQ ID NO: 525 - DNA, 2016 bp, Artificial Sequence
  Description of Artificial Sequence: Synthetic polynucleotide
atgcaccatcatcaccatcatggtggttctggttcgccgatacttggttattggaagattaaaggactggttcagcccacacgcctcctgctagaatacttagaggaaaaatatgaagagcacctgtacgaacgtgatgagggggacaaatggcgaaacaagaaatttgaattgggcttagaatttccaaatttgccgtattatatcgatggcgacgtaaaactgacccaatcaatggccattattcgctacatcgcagataaacataacatgctgggtggctgccctaaagaacgggctgagatctccatgctggaaggtgcggtgctcgacattcgctacggcgtcagtagaattgcgtatagcaaggatttcgaaactttaaaagtggatttcctgagcaaacttccggagatgctgaaaatgtttgaggataggctttgtcataagacgtatctcaatggtgatcatgttacccacccggactttatgctgtacgacgcccttgatgtcgttctgtatatggatcccatgtgcctggacgccttcccgaaattagtgtgttttaaaaaacgtatcgaagcgattccacagatcgataaatacttgaagtcttctaaatatattgcttggcctctgcaaggctggcaggcaacgttcggtgggggagatcatccgccaaaatcagatctggtgccgcgtgggagccctggcatacaccgcgacggtggttctggtgagaacctgtactttcaaagctcagataatgggcctcaaaaccagcgcaacgctccacgtataaccttcggtggcccgtctgactccacaggcagcaaccagaatggtgagcgtagtggagccaggtctaagcagcgccgtccccagggtctgccgaacaacacggcgagctggtttactgcgcttacccaacacggtaaagaagacttaaaattcccgcgtggccagggcgtcccgatcaacactaactcttccccggatgatcagattggttattaccgcagagcaactcgtcggattcgcggcggcgacggtaaaatgaaagatttgtctccgcgttggtacttttactatctcggcaccggtccggaagctggactgccctacggggcaaacaaggacgggatcatttgggtggctattgaaggtgccctgaatactccaaaagatcatatcggcacccgtaaccctgctaataacgctgcgatcgttctgcaactgcctcagggtacaactctgccaaaaggcttctatgcagaagggtcgcgtggtggcagccaggcgagtagccgtagcagctcccgctctcgcaactcgtcccgtaactccactccgggctcttctcgcggcacgtccccggctcgtatggcaggtaacggtggtgacgctgctctggcgctgctactgctggacaggctgaaccagctggagtcgaagatgagtggtaaaggccaacagcagcagggccagaccgttaccaaaaagagcgcagctgaagcatctaaaaaaccgcgacagaaacgtaccgcgactaaagcgtacaatgtaacacaggccttcggtcgtcgaggtccggagcaaactcaaggaaactttggcgatcaggaattaatccgccaggggaccgactacaaacactggccgcaaattgcccagttcgccccatccgctagtgcattcttcggtatgagccgcatcggcatggaagtaacgccaagtggtacgtggctgacctacaccggtgctatcaagcttgatgacaaggacccgaactttaaagaccaggttattctgcttaacaaacatattgatgcctataaaactttcccgccgaccgaacccaaaaaggacaaaaagaaaaaagctgatgaaacccaggctctaccgcagcgtcagaaaaaacagcaaactgtgactctgctgccagctgcggacctggatgatttttccaagcagctgcaacagtctatgagctctgcggactctacgcaggcttaa

SEQ ID NO: 526 - DNA, 2016 bp, Artificial Sequence
  Description of Artificial Sequence: Synthetic polynucleotide
atgcaccatcatcaccatcatggtggttctggttcgccgatacttggttattggaagattaaaggactggttcagcccacacgcctcctgctagaatacttagaggaaaaatatgaagagcacctgtacgaacgtgatgagggggacaaatggcgaaacaagaaatttgaattgggcttagaatttccaaatttgccgtattatatcgatggcgacgtaaaactgacccaatcaatggccattattcgctacatcgcagataaacataacatgctgggtggctgccctaaagaacgggctgagatctccatgctggaaggtgcggtgctcgacattcgctacggcgtcagtagaattgcgtatagcaaggatttcgaaactttaaaagtggatttcctgagcaaacttccggagatgctgaaaatgtttgaggataggctttgtcataagacgtatctcaatggtgatcatgttacccacccggactttatgctgtacgacgcccttgatgtcgttctgtatatggatcccatgtgcctggacgccttcccgaaattagtgtgttttaaaaaacgtatcgaagcgattccacagatcgataaatacttgaagtcttctaaatatattgcttggcctctgcaaggctggcaggcaacgttcggtgggggagatcatccgccaaaatcagatctggtgccgcgtgggagccctggcatacaccgcgacggtggttctggtgagaacctgtactttcaaagctcagataatgggcctcaaaaccagcgcaacgctccacgtataaccttcggtggcccgtctgactccacaggcagcaaccagaatggtgagcgtagtggagccaggtctaagcagcgccgtccccagggtctgccgaacaacacggcgagctggtttactgcgcttacccaacacggtaaagaagacttaaaattcccgaaaggccagggcgtcccgatcaacactaactctaagccggatgatcagattggttattaccgcagacaagttcgtcggtatcgcggcggcgacggtcaaatgaaagatttggatccgcgttggtacttttactatctcggcaccggtccggaagctggactgccctacggggcaaacaaggacgggatcatttgggtggctaccgaaggtgccctgaatactccaaaagatcatatcggcacccgtaaccctgctaataacgctgcgatcgttctgcaactgcctcagggtacaactctgccaaaaggcttctatgcagaagggtcgcgtggtggcagccaggcgagtagccgtagcagctcccgctctcgcaactcgtcccgtaactccactccgggctcttctcgcggcacgtccccggctcgtatggcaggtaacggtggtgacgctgctctggcgctgctactgctggacaggctgaaccagctggagtcgaagatgagtggtaaaggccaacagcagcagggccagaccgttaccaaaaagagcgcagctgaagcatctaaaaaaccgcgacagaaacgtaccgcgactaaagcgtacaatgtaacacaggccttcggtcgtcgaggtccggagcaaactcaaggaaactttggcgatcaggaattaatccgccaggggaccgactacaaacactggccgcaaattgcccagttcgccccatccgctagtgcattcttcggtatgagccgcatcggcatggaagtaacgccaagtggtacgtggctgacctacaccggtgctatcaagcttgatgacaaggacccgaactttaaagaccaggttattctgcttaacaaacatattgatgcctataaaactttcccgccgaccgaacccaaaaaggacaaaaagaaaaaagctgatgaaacccaggctctaccgcagcgtcagaaaaaacagcaaactgtgactctgctgccagctgcggacctggatgatttttccaagcagctgcaacagtctatgagctctgcggactctacgcaggcttaa

SEQ ID NO: 527 - DNA, 2016 bp, Artificial Sequence
  Description of Artificial Sequence: Synthetic polynucleotide
atgcaccatcatcaccatcatggtggttctggttcgccgatacttggttattggaagattaaaggactggttcagcccacacgcctcctgctagaatacttagaggaaaaatatgaagagcacctgtacgaacgtgatgagggggacaaatggcgaaacaagaaatttgaattgggcttagaatttccaaatttgccgtattatatcgatggcgacgtaaaactgacccaatcaatggccattattcgctacatcgcagataaacataacatgctgggtggctgccctaaagaacgggctgagatctccatgctggaaggtgcggtgctcgacattcgctacggcgtcagtagaattgcgtatagcaaggatttcgaaactttaaaagtggatttcctgagcaaacttccggagatgctgaaaatgtttgaggataggctttgtcataagacgtatctcaatggtgatcatgttacccacccggactttatgctgtacgacgcccttgatgtcgttctgtatatggatcccatgtgcctggacgccttcccgaaattagtgtgttttaaaaaacgtatcgaagcgattccacagatcgataaatacttgaagtcttctaaatatattgcttggcctctgcaaggctggcaggcaacgttcggtgggggagatcatccgccaaaatcagatctggtgccgcgtgggagccctggcatacaccgcgacggtggttctggtgagaacctgtactttcaaagctcagataatgggcctcaaaaccagcgcaacgctccacgtataaccttcggtggcccgtctgactccacaggcagcaaccagaatggtgagcgtagtggagccaggtctaagcagcgccgtccccagggtctgccgaacaacacggcgagctggtttactgcgcttacccaacacggtaaagaagacttaaaattcccgcgtggccagggcgtcccgatcaacactaactcttccccggatgatcagattggttattaccgcagagcaactcgtcggattcgcggcggcgacggtaaaatgaaagatttgtctccgcgttggttcttttactatctcggcaccggtccggaagctggactgccctacggggcaaacaaggacgggatcatttgggtggctaccgaaggtgccctgaatactccaaaagatcatatcggcacccgtaaccctgctaataacgctgcgatcgttctgcaactgcctcagggtacaactctgccaaaaggcttctatgcagaagggtcgcgtggtggcagccaggcgagtagccgtagcagctcccgctctcgcaactcgtcccgtaactccactccgggctcttctcgcggcacgtccccggctcgtatggcaggtaacggtggtgacgctgctctggcgctgctactgctggacaggctgaaccagctggagtcgaagatgagtggtaaaggccaacagcagcagggccagaccgttaccaaaaagagcgcagctgaagcatctaaaaaaccgcgacagaaacgtaccgcgactaaagcgtacaatgtaacacaggccttcggtcgtcgaggtccggagcaaactcaaggaaactttggcgatcaggaattaatccgccaggggaccgactacaaacactggccgcaaattgcccagttcgccccatccgctagtgcattcttcggtatgagccgcatcggcatggaagtaacgccaagtggtacgtggctgacctacaccggtgctatcaagcttgatgacaaggacccgaactttaaagaccaggttattctgcttaacaaacatattgatgcctataaaactttcccgccgaccgaacccaaaaaggacaaaaagaaaaaagctgatgaaacccaggctctaccgcagcgtcagaaaaaacagcaaactgtgactctgctgccagctgcggacctggatgatttttccaagcagctgcaacagtctatgagctctgcggactctacgcaggcttaa

SEQ ID NO: 528 - DNA, 2016 bp, Artificial Sequence
  Description of Artificial Sequence: Synthetic polynucleotide
atgcaccatcatcaccatcatggtggttctggttcgccgatacttggttattggaagattaaaggactggttcagcccacacgcctcctgctagaatacttagaggaaaaatatgaagagcacctgtacgaacgtgatgagggggacaaatggcgaaacaagaaatttgaattgggcttagaatttccaaatttgccgtattatatcgatggcgacgtaaaactgacccaatcaatggccattattcgctacatcgcagataaacataacatgctgggtggctgccctaaagaacgggctgagatctccatgctggaaggtgcggtgctcgacattcgctacggcgtcagtagaattgcgtatagcaaggatttcgaaactttaaaagtggatttcctgagcaaacttccggagatgctgaaaatgtttgaggataggctttgtcataagacgtatctcaatggtgatcatgttacccacccggactttatgctgtacgacgcccttgatgtcgttctgtatatggatcccatgtgcctggacgccttcccgaaattagtgtgttttaaaaaacgtatcgaagcgattccacagatcgataaatacttgaagtcttctaaatatattgcttggcctctgcaaggctggcaggcaacgttcggtgggggagatcatccgccaaaatcagatctggtgccgcgtgggagccctggcatacaccgcgacggtggttctggtgagaacctgtactttcaaagctcagataatgggcctcaaaaccagcgcaacgctccacgtataaccttcggtggcccgtctgactccacaggcagcaaccagaatggtgagcgtagtggagccaggtctaagcagcgccgtccccagggtctgccgaacaacacggcgagctggtttactgcgcttacccaacacggtaaagaagacttaaaattcccgcgtggccagggcgtcccgatcaacactaactcttccccggatgatcagattggttattaccgcagagcaactcgtcggattcgcggcggcgacggtaaaatgaaagatttgtctccgcgttggtacttttactatctcggcaccggtccggaagctggactgccctacggggcaaacaaggacgggatcatttgggtggctaccgaaggtgccctgaatactccaaaagatcatatcggcacccgtaaccctgctaataacgctgcgatcgttctgcaactgcctcagggtacaactctgccaaaaggcttctatgcagaagggtcgcgtggtggcagccaggcgagtagccgtagcagctcccgctctcgcaactcgtcccgtaactccactccgggctcttctcgcggcacgtccccggctcgtatggcaggtaacggtggtgacgctgctctggcgctgctactgctggacaggctgaaccagctggagtcgaagatgagtggtaaaggccaacagcagcagggccagaccgttaccaaaaagagcgcagctgaagcatctaaaaaaccgcgacagaaacgtaccgcgactaaagcgtacaatgtaacacaggccttcggtcgtcgaggtccggagcaaactcaaggaaactttggcgatcaggaattaatccgccaggggaccgactacaaacactggccgcaaattgcccagttcgccccatccgctagtgcattcttcggtatgagccgcatcggcatggaagtaacgccaagtggtacgtggctgacctacaccggtgctatcaagcttgataaaaaggacccgaactttaaagaccaggttattctgcttaacaaacatattgatgcctataaaactttcccgccgaccgaacccaaaaaggacaaaaagaaaaaagctgatgaaacccaggctctaccgcagcgtcagaaaaaacagcaaactgtgactctgctgccagctgcggacctggatgatttttccaagcagctgcaacagtctatgagctctgcggactctacgcaggcttaa

SEQ ID NO: 529 - DNA, 2016 bp, Artificial Sequence
  Description of Artificial Sequence: Synthetic polynucleotide
atgcaccatcatcaccatcatggtggttctggttcgccgatacttggttattggaagattaaaggactggttcagcccacacgcctcctgctagaatacttagaggaaaaatatgaagagcacctgtacgaacgtgatgagggggacaaatggcgaaacaagaaatttgaattgggcttagaatttccaaatttgccgtattatatcgatggcgacgtaaaactgacccaatcaatggccattattcgctacatcgcagataaacataacatgctgggtggctgccctaaagaacgggctgagatctccatgctggaaggtgcggtgctcgacattcgctacggcgtcagtagaattgcgtatagcaaggatttcgaaactttaaaagtggatttcctgagcaaacttccggagatgctgaaaatgtttgaggataggctttgtcataagacgtatctcaatggtgatcatgttacccacccggactttatgctgtacgacgcccttgatgtcgttctgtatatggatcccatgtgcctggacgccttcccgaaattagtgtgttttaaaaaacgtatcgaagcgattccacagatcgataaatacttgaagtcttctaaatatattgcttggcctctgcaaggctggcaggcaacgttcggtgggggagatcatccgccaaaatcagatctggtgccgcgtgggagccctggcatacaccgcgacggtggttctggtgagaacctgtactttcaaagctcagataatgggcctcaaaaccagcgcaacgctccacgtataaccttcggtggcccgtctgactccacaggcagcaaccagaatggtgagcgtagtggagccaggtctaagcagcgccgtccccagggtctgccgaacaacacggcgagctggtttactgcgcttacccaacacggtaaagaagacttaaaattcccgcgtggccagggcgtcccgatcaacactaactcttccccggatgatcagattggttattaccgcagagcaactcgtcggattcgcggcggcgacggtcagatgaaagatttgtctccgcgttggtacttttactatctcggcaccggtccggaagctggactgccctacggggcaaacaaggacgggatcatttgggtggctaccgaaggtgccctgaatactccaaaagatcatatcggcacccgtaaccctgctaataacgctgcgatcgttctgcaactgcctcagggtacaactctgccaaaaggcttctatgcagaagggtcgcgtggtggcagccaggcgagtagccgtagcagctcccgctctcgcaactcgtcccgtaactccactccgggctcttctcgcggcacgtccccggctcgtatggcaggtaacggtggtgacgctgctctggcgctgctactgctggacaggctgaaccagctggagtcgaagatgagtggtaaaggccaacagcagcagggccagaccgttaccaaaaagagcgcagctgaagcatctaaaaaaccgcgacagaaacgtaccgcgactaaagcgtacaatgtaacacaggccttcggtcgtcgaggtccggagcaaactcaaggaaactttggcgatcaggaattaatccgccaggggaccgactacaaacactggccgcaaattgcccagttcgccccatccgctagtgcattcttcggtatgagccgcatcggcatggaagtaacgccaagtggtacgtggctgacctacaccggtgctatcaagcttgatgacaaggacccgaactttaaagaccaggttattctgcttaacaaacatattgatgcctataaaactttcccgccgaccgaacccaaaaaggacaaaaagaaaaaagctgatgaaacccaggctctaccgcagcgtcagaaaaaacagcaaactgtgactctgctgccagctgcggacctggatgatttttccaagcagctgcaacagtctatgagctctgcggactctacgcaggcttaa

SEQ ID NO: 530 - DNA, 2016 bp, Artificial Sequence
  Description of Artificial Sequence: Synthetic polynucleotide
atgcaccatcatcaccatcatggtggttctggttcgccgatacttggttattggaagattaaaggactggttcagcccacacgcctcctgctagaatacttagaggaaaaatatgaagagcacctgtacgaacgtgatgagggggacaaatggcgaaacaagaaatttgaattgggcttagaatttccaaatttgccgtattatatcgatggcgacgtaaaactgacccaatcaatggccattattcgctacatcgcagataaacataacatgctgggtggctgccctaaagaacgggctgagatctccatgctggaaggtgcggtgctcgacattcgctacggcgtcagtagaattgcgtatagcaaggatttcgaaactttaaaagtggatttcctgagcaaacttccggagatgctgaaaatgtttgaggataggctttgtcataagacgtatctcaatggtgatcatgttacccacccggactttatgctgtacgacgcccttgatgtcgttctgtatatggatcccatgtgcctggacgccttcccgaaattagtgtgttttaaaaaacgtatcgaagcgattccacagatcgataaatacttgaagtcttctaaatatattgcttggcctctgcaaggctggcaggcaacgttcggtgggggagatcatccgccaaaatcagatctggtgccgcgtgggagccctggcatacaccgcgacggtggttctggtgagaacctgtactttcaaagctcagataatgggcctcaaaaccagcgcaacgctccacgtataaccttcggtggcccgtctgactccacaggcagcaaccagaatggtgagcgtagtggagccaggtctaagcagcgccgtccccagggtctgccgaacaacacggcgagctggtttactgcgcttacccaacacggtaaagaagacttaaaattcccgcgtggccagggcgtcccgatcaacactaactcttccccggatgatcagattggttattaccgcagagcaactcgtcggattcgcggcggcgacggtaaaatgaaagatttgtctccgcgttggtacttttactatctcggcaccggtccggaagctggactgccctacggggcaaacaaggacgggatcatttgggtggctaccgaaggtgccctgaatactccaaaagatcatatcggcacccgtaaccctgctaataacgctgcgatcgttctgcaactgcctgatggtacaactctgccaaaaggcttctatgcagaagggtcgcgtggtggcagccaggcgagtagccgtagcagctcccgctctcgcaactcgtcccgtaactccactccgggctcttctcgcggcacgtccccggctcgtatggcaggtaacggtggtgacgctgctctggcgctgctactgctggacaggctgaaccagctggagtcgaagatgagtggtaaaggccaacagcagcagggccagaccgttaccaaaaagagcgcagctgaagcatctaaaaaaccgcgacagaaacgtaccgcgactaaagcgtacaatgtaacacaggccttcggtcgtcgaggtccggagcaaactcaaggaaactttggcgatcaggaattaatccgccaggggaccgactacaaacactggccgcaaattgcccagttcgccccatccgctagtgcattcttcggtatgagccgcatcggcatggaagtaacgccaagtggtacgtggctgacctacaccggtgctatcaagcttgatgacaaggacccgaactttaaagaccaggttattctgcttaacaaacatattgatgcctataaaactttcccgccgaccgaacccaaaaaggacaaaaagaaaaaagctgatgaaacccaggctctaccgcagcgtcagaaaaaacagcaaactgtgactctgctgccagctgcggacctggatgatttttccaagcagctgcaacagtctatgagctctgcggactctacgcaggcttaa

SEQ ID NO: 531 - DNA, 2016 bp, Artificial Sequence
  Description of Artificial Sequence: Synthetic polynucleotide
atgcaccatcatcaccatcatggtggttctggttcgccgatacttggttattggaagattaaaggactggttcagcccacacgcctcctgctagaatacttagaggaaaaatatgaagagcacctgtacgaacgtgatgagggggacaaatggcgaaacaagaaatttgaattgggcttagaatttccaaatttgccgtattatatcgatggcgacgtaaaactgacccaatcaatggccattattcgctacatcgcagataaacataacatgctgggtggctgccctaaagaacgggctgagatctccatgctggaaggtgcggtgctcgacattcgctacggcgtcagtagaattgcgtatagcaaggatttcgaaactttaaaagtggatttcctgagcaaacttccggagatgctgaaaatgtttgaggataggctttgtcataagacgtatctcaatggtgatcatgttacccacccggactttatgctgtacgacgcccttgatgtcgttctgtatatggatcccatgtgcctggacgccttcccgaaattagtgtgttttaaaaaacgtatcgaagcgattccacagatcgataaatacttgaagtcttctaaatatattgcttggcctctgcaaggctggcaggcaacgttcggtgggggagatcatccgccaaaatcagatctggtgccgcgtgggagccctggcatacaccgcgacggtggttctggtgagaacctgtactttcaaagctcagataatgggcctcaaaaccagcgcaacgctccacgtataaccttcggtggcccgtctgactccacaggcagcaaccagaatggtgagcgtagtggagccaggtctaagcagcgccgtccccagggtctgccgaacaacacggcgagctggtttactgcgcttacccaacacggtaaagaagacttaaaattcccgcgtggccagggcgtcccgatcaacactaactcttccccggatgatcagattggttattaccgcagagcaactcgtcggattcgcggcggcgacggtaaaatgaaagatttgtctccgcgttggtacttttactatctcggcaccggtccggaagctggactgccctacggggcaaacaaggacgggatcatttgggtggctaccgaaggtgccctgaatactccaaaagatcatatcggcacccgtaaccctgctaataacgctgcgatcgttctgcaactgcctcagggtacaactctgccaaaaggcttctatgcagaagggtcgcgtggtggcagccaggcgagtagccgtagcagctcccgctctcgcaactcgtcccgtaactccactccgggctcttctcgcggcacgtccccggctcgtatggcaggtaacggtggtgacgctgctctggcgctgctactgctggacaggctgaaccagctggagtcgaagatgagtggtaaaggccaacagcagcagggccagaccgttaccaaaaagagcgcagctgaagcatctaaaaaaccgcgacagaaacgtaccgcgactaaagcgtacaatgtaacacaggccttcggtcgtcgaggtccggagcaaactcaaggaaactttggcgatcaggaattaatccgccaggggaccgactacaaacactggccgcaaattgcccagttcgccccatccgctagtgcattcttcggtatgagccgcatcggcatggaagtaacgccaagtggtgtgtggctgacctacaccggtgctatcaagcttgatgacaaggacccgaactttaaagaccaggttattctgcttaacaaacatattgatgcctataaaactttcccgccgaccgaacccaaaaaggacaaaaagaaaaaagctgatgaaacccaggctctaccgcagcgtcagaaaaaacagcaaactgtgactctgctgccagctgcggacctggatgatttttccaagcagctgcaacagtctatgagctctgcggactctacgcaggcttaa

SEQ ID NO: 532 - DNA, 2016 bp, Artificial Sequence
  Description of Artificial Sequence: Synthetic polynucleotide
atgcaccatcatcaccatcatggtggttctggttcgccgatacttggttattggaagattaaaggactggttcagcccacacgcctcctgctagaatacttagaggaaaaatatgaagagcacctgtacgaacgtgatgagggggacaaatggcgaaacaagaaatttgaattgggcttagaatttccaaatttgccgtattatatcgatggcgacgtaaaactgacccaatcaatggccattattcgctacatcgcagataaacataacatgctgggtggctgccctaaagaacgggctgagatctccatgctggaaggtgcggtgctcgacattcgctacggcgtcagtagaattgcgtatagcaaggatttcgaaactttaaaagtggatttcctgagcaaacttccggagatgctgaaaatgtttgaggataggctttgtcataagacgtatctcaatggtgatcatgttacccacccggactttatgctgtacgacgcccttgatgtcgttctgtatatggatcccatgtgcctggacgccttcccgaaattagtgtgttttaaaaaacgtatcgaagcgattccacagatcgataaatacttgaagtcttctaaatatattgcttggcctctgcaaggctggcaggcaacgttcggtgggggagatcatccgccaaaatcagatctggtgccgcgtgggagccctggcatacaccgcgacggtggttctggtgagaacctgtactttcaaagctcagataatgggcctcaaaaccagcgcaacgctccacgtataaccttcggtggcccgtctgactccacaggcagcaaccagaatggtgagcgtagtggagccaggtctaagcagcgccgtccccagggtctgccgaacaacacggcgagctggtttactgcgcttacccaacacggtaaagaagacttaaaattcccgcgtggccagggcgtcccgatcaacactaactcttccccggatgatcagattggttattaccgcagagcaactcgtcggattcgcggcggcgacggtaaaatgaaagatttgtctccgcgttggtacttttactatctcggcaccggtccggaagctggactgccctacggggcaaacaaggacgggatcatttgggtggctaccgaaggtgccctgaatactccaaaagatcatatcggcacccgtaaccctgctaataacgctgcgatcgttctgcaactgcctcagggtacaactctgccaaaaggcttctatgcagaagggtcgcgtggtggcagccaggcgagtagccgtagcagctcccgctctcgcaactcgtcccgtaactccactccgggctcttctcgcggcacgtccccggctcgtatggcaggtaacggtggtgacgctgctctggcgctgctactgctggacaggctgaaccagctggagtcgaagatgagtggtaaaggccaacagcagcagggccagaccgttaccaaaaagagcgcagctgaagcatctaaaaaaccgcgacagaaacgtaccgcgactaaagggtacaatgtaacacaggccttcggtcgtcgaggtccggagcaaactcaaggaaactttggcgatcaggaattaatccgccaggggaccgactacaaacactggccgcaaattgcccagttcgccccatccgctagtgcattcttcggtatgagccgcatcggcatggaagtaacgccaagtggtacgtggctgacctacaccggtgctatcaagcttgatgacaaggacccgaactttaaagaccaggttattctgcttaacaaacatattgatgcctataaaactttcccgccgaccgaacccaaaaaggacaaaaagaaaaaagctgatgaaacccaggctctaccgcagcgtcagaaaaaacagcaaactgtgactctgctgccagctgcggacctggatgatttttccaagcagctgcaacagtctatgagctctgcggactctacgcaggcttaa

SEQ ID NO: 533 - DNA, 2016 bp, Artificial Sequence
  Description of Artificial Sequence: Synthetic polynucleotide
atgcaccatcatcaccatcatggtggttctggttcgccgatacttggttattggaagattaaaggactggttcagcccacacgcctcctgctagaatacttagaggaaaaatatgaagagcacctgtacgaacgtgatgagggggacaaatggcgaaacaagaaatttgaattgggcttagaatttccaaatttgccgtattatatcgatggcgacgtaaaactgacccaatcaatggccattattcgctacatcgcagataaacataacatgctgggtggctgccctaaagaacgggctgagatctccatgctggaaggtgcggtgctcgacattcgctacggcgtcagtagaattgcgtatagcaaggatttcgaaactttaaaagtggatttcctgagcaaacttccggagatgctgaaaatgtttgaggataggctttgtcataagacgtatctcaatggtgatcatgttacccacccggactttatgctgtacgacgcccttgatgtcgttctgtatatggatcccatgtgcctggacgccttcccgaaattagtgtgttttaaaaaacgtatcgaagcgattccacagatcgataaatacttgaagtcttctaaatatattgcttggcctctgcaaggctggcaggcaacgttcggtgggggagatcatccgccaaaatcagatctggtgccgcgtgggagccctggcatacaccgcgacggtggttctggtgagaacctgtactttcaaagctcagataatgggcctcaaaaccagcgcaacgctccacgtataaccttcggtggcccgtctgactccacaggcagcaaccagaatggtgagcgtagtggagccaggtctaagcagcgccgtccccagggtctgccgaacaacacggcgagctggtttactgcgcttacccaacacggtaaagaagacttaaaattcccgcgtggccagggcgtcccgatcaacactaactcttccccggatgatcagattggttattaccgcagagcaactcgtcggattcgcggcggcgacggtaaaatgaaagatttgtctccgcgttggtacttttactatctcggcaccggtccggaagctggactgccctacggggcaaacaaggacgggatcatttgggtggctaccgatggtgccctgaatactccaaaagatcatatcggcacccgtaaccctgctaataacgctgcgatcgttctgcaactgcctcagggtacaactctgccaaaaggcttctatgcagaagggtcgcgtggtggcagccaggcgagtagccgtagcagctcccgctctcgcaactcgtcccgtaactccactccgggctcttctcgcggcacgtccccggctcgtatggcaggtaacggtggtgacgctgctctggcgctgctactgctggacaggctgaaccagctggagtcgaagatgagtggtaaaggccaacagcagcagggccagaccgttaccaaaaagagcgcagctgaagcatctaaaaaaccgcgacagaaacgtaccgcgactaaagcgtacaatgtaacacaggccttcggtcgtcgaggtccggagcaaactcaaggaaactttggcgatcaggaattaatccgccaggggaccgactacaaacactggccgcaaattgcccagttcgccccatccgctagtgcattcttcggtatgagccgcatcggcatggaagtaacgccaagtggtacgtggctgacctacaccggtgctatcaagcttgatgacaaggacccgaactttaaagaccaggttattctgcttaacaaacatattgatgcctataaaactttcccgccgaccgaacccaaaaaggacaaaaagaaaaaagctgatgaaacccaggctctaccgcagcgtcagaaaaaacagcaaactgtgactctgctgccagctgcggacctggatgatttttccaagcagctgcaacagtctatgagctctgcggactctacgcaggcttaa

SEQ ID NO: 534 - DNA, 2016 bp, Artificial Sequence
  Description of Artificial Sequence: Synthetic polynucleotide
atgcaccatcatcaccatcatggtggttctggttcgccgatacttggttattggaagattaaaggactggttcagcccacacgcctcctgctagaatacttagaggaaaaatatgaagagcacctgtacgaacgtgatgagggggacaaatggcgaaacaagaaatttgaattgggcttagaatttccaaatttgccgtattatatcgatggcgacgtaaaactgacccaatcaatggccattattcgctacatcgcagataaacataacatgctgggtggctgccctaaagaacgggctgagatctccatgctggaaggtgcggtgctcgacattcgctacggcgtcagtagaattgcgtatagcaaggatttcgaaactttaaaagtggatttcctgagcaaacttccggagatgctgaaaatgtttgaggataggctttgtcataagacgtatctcaatggtgatcatgttacccacccggactttatgctgtacgacgcccttgatgtcgttctgtatatggatcccatgtgcctggacgccttcccgaaattagtgtgttttaaaaaacgtatcgaagcgattccacagatcgataaatacttgaagtcttctaaatatattgcttggcctctgcaaggctggcaggcaacgttcggtgggggagatcatccgccaaaatcagatctggtgccgcgtgggagccctggcatacaccgcgacggtggttctggtgagaacctgtactttcaaagctcagataatgggcctcaaaaccagcgcaacgctccacgtataaccttcggtggcccgtctgactccacaggcagcaaccagaatggtgagcgtagtggagccaggtctaagcagcgccgtccccagggtctgccgaacaacacggcgagctggtttactgcgcttacccaacacggtaaagaagacttaaaattcccgcgtggccagggcgtcccgatcaacactaactcttccccggatgatcagattggttattaccgcagagcaactcgtcggattcgcggcggcgacggtaaaatgaaagatttgtctccgcgttggtacttttactatctcggcaccggtccggaagctggactgccctacggggcaaacaaggacgggatcatttgggtggctaccgaaggtgccctgaatactccaaaagatcatatcggcacccgtaaccctgctaataacgctgcgatcgttctgcaactgcctcagggtacaactctgccaaaaggcttctatgcagaagggtcgcgtggtggcagccaggcgagtagccgtagcagctcccgctctcgcaactcgtcccgtaactccactccgggctcttctcgcggcacgtccccggctcgtatggcaggtaacggtggtgacgctgctctggcgctgctactgctggacaggctgaaccagctggagtcgaagatgagtggtaaaggccaacagcagcagggccagaccgttaccaaaaagagcgcagctgaaatgtctaaaaaaccgcgatggaaacgtaccgcgactaaagagtacaatgtaacacaggccttcggtaaacgaggtccgaaggatactcaaggaaactttggcgatgccgaattaatcaagcaggggaccgactacaaacactggccgcaaattgcccagttcgtgccatccgctgcggcattcttctttatgagccgcatcggcatgaaagaaacgccagatggtgtgtggctgacctacaccggtacgatcaagcttgataaggatgacccgaactttgatgaccaggttaaactgcttaacaaacatattgatgcctataaaactttcccgccgaccgaacccaaaaaggacaaaaagaaaaaagctgatgaaacccaggctctaccgcagcgtcagaaaaaacagcaaactgtgactctgctgccagctgcggacctggatgatttttccaagcagctgcaacagtctatgagctctgcggactctacgcaggcttaa

SEQ ID NO: 535 - DNA, 2016 bp, Artificial Sequence
  Description of Artificial Sequence: Synthetic polynucleotide
atgcaccatcatcaccatcatggtggttctggttcgccgatacttggttattggaagattaaaggactggttcagcccacacgcctcctgctagaatacttagaggaaaaatatgaagagcacctgtacgaacgtgatgagggggacaaatggcgaaacaagaaatttgaattgggcttagaatttccaaatttgccgtattatatcgatggcgacgtaaaactgacccaatcaatggccattattcgctacatcgcagataaacataacatgctgggtggctgccctaaagaacgggctgagatctccatgctggaaggtgcggtgctcgacattcgctacggcgtcagtagaattgcgtatagcaaggatttcgaaactttaaaagtggatttcctgagcaaacttccggagatgctgaaaatgtttgaggataggctttgtcataagacgtatctcaatggtgatcatgttacccacccggactttatgctgtacgacgcccttgatgtcgttctgtatatggatcccatgtgcctggacgccttcccgaaattagtgtgttttaaaaaacgtatcgaagcgattccacagatcgataaatacttgaagtcttctaaatatattgcttggcctctgcaaggctggcaggcaacgttcggtgggggagatcatccgccaaaatcagatctggtgccgcgtgggagccctggcatacaccgcgacggtggttctggtgagaacctgtactttcaaagctcagataatgggcctcaaaaccagcgcaacgctccacgtataaccttcggtggcccgtctgactccacaggcagcaaccagaatggtgagcgtagtggagccaggtctaagcagcgccgtccccagggtctgccgaacaacacggcgagctggtttactgcgcttacccaacacggtaaagaagacttaaaattcccgcgtggccagggcgtcccgatcaacactaactcttccccggatgatcagattggttattaccgcagagcaactcgtcggattcgcggcggcgacggtaaaatgaaagatttgtctccgcgttggtacttttactatctcggcaccggtccggaagctggactgccctacggggcaaacaaggacgggatcatttgggtggctaccgaaggtgccctgaatactccaaaagatcatatcggcacccgtaaccctgctaataacgctgcgatcgttctgcaactgcctcagggtacaactctgccaaaaggcttctatgcagaagggtcgcgtggtggcagccaggcgagtagccgtagcagctcccgctctcgcaactcgtcccgtaactccactccgggctcttctcgcggcacgtccccggctcgtatggcaggtaacggtggtgacgctgctctggcgctgctactgctggacaggctgaaccagctggagtcgaagatgagtggtaaaggccaacagcagcagggccagaccgttaccaaaaagagcgcagctgaagcatctaaaaaaccgcgacagaaacgtaccgcgactaaagagtacaatgtaacacaggccttcggtcgtcgaggtccggagcaaactcaaggaaactttggcgatcaggatttaaataaactcgggaccgactacaaacactggccgcaaattgcccagttcgccccatccgctagtgcattcttcggtatgagccgcatcggcacggaagaaacgccaagtggtacgtggctgacctacaccggtgctatcaagcttgataaaaaggacccgaactttaaagaccaggttattctgcttaacaaacatattgatgcctataaaactttcccgccgaccgaacccaaaaaggacaaaaagaaaaaagctgatgaaacccaggctctaccgcagcgtcagaaaaaacagcaaactgtgactctgctgccagctgcggacctggatgatttttccaagcagctgcaacagtctatgagctctgcggactctacgcaggcttaa

SEQ ID NO: 536 - DNA, 2016 bp, Artificial Sequence
  Description of Artificial Sequence: Synthetic polynucleotide
atgcaccatcatcaccatcatggtggttctggttcgccgatacttggttattggaagattaaaggactggttcagcccacacgcctcctgctagaatacttagaggaaaaatatgaagagcacctgtacgaacgtgatgagggggacaaatggcgaaacaagaaatttgaattgggcttagaatttccaaatttgccgtattatatcgatggcgacgtaaaactgacccaatcaatggccattattcgctacatcgcagataaacataacatgctgggtggctgccctaaagaacgggctgagatctccatgctggaaggtgcggtgctcgacattcgctacggcgtcagtagaattgcgtatagcaaggatttcgaaactttaaaagtggatttcctgagcaaacttccggagatgctgaaaatgtttgaggataggctttgtcataagacgtatctcaatggtgatcatgttacccacccggactttatgctgtacgacgcccttgatgtcgttctgtatatggatcccatgtgcctggacgccttcccgaaattagtgtgttttaaaaaacgtatcgaagcgattccacagatcgataaatacttgaagtcttctaaatatattgcttggcctctgcaaggctggcaggcaacgttcggtgggggagatcatccgccaaaatcagatctggtgccgcgtgggagccctggcatacaccgcgacggtggttctggtgagaacctgtactttcaaagctcagataatgggcctcaaaaccagcgcaacgctccacgtataaccttcggtggcccgtctgactccacaggcagcaaccagaatggtgagcgtagtggagccaggtctaagcagcgccgtccccagggtctgccgaacaacacggcgagctggtttactgcgcttacccaacacggtaaagaagacttaaaattcccgcgtggccagggcgtcccgatcaacactaactcttccccggatgatcagattggttattaccgcagagcaactcgtcggattcgcggcggcgacggtaaaatgaaagatttgtctccgcgttggtacttttactatctcggcaccggtccggaagctggactgccctacggggcaaacaaggacgggatcatttgggtggctaccgaaggtgccctgaatactccaaaagatcatatcggcacccgtaaccctgctaataacgctgcgatcgttctgcaactgcctcagggtacaactctgccaaaaggcttctatgcagaagggtcgcgtggtggcagccaggcgagtagccgtagcagctcccgctctcgcaactcgtcccgtaactccactccgggctcttctcgcggcacgtccccggctcgtatggcaggtaacggtggtgacgctgctctggcgctgctactgctggacaggctgaaccagctggagtcgaagatgagtggtaaaggccaacagcagcagggccagaccgttaccaaaaagagcgcagctgaaatgtctaaaaaaccgcgatggaaacgtaccgcgactaaagagtacaatgtaacacaggccttcggtaaacgaggtccgaaagatactcaaggaaactttggcgatgccgaattaatcaaacaggggaccgactacaaacactggccgcaaattgcccagttcgtgccatccgctgccgcattcttctttatgagccgcatctcgatgaaggaaacgccagatggtgtctggctgacctacaccggtacgatcaagcttgataaagatgacccgaactttgatgaccaggttaaactgcttaacaaacatattgatgcctataaaactttcccgccgaccgaacccaaaaaggacaaaaagaaaaaagctgatgaaacccaggctctaccgcagcgtcagaaaaaacagcaaactgtgactctgctgccagctgcggacctggatgatttttccaagcagctgcaacagtctatgagctctgcggactctacgcaggcttaa

SEQ ID NO: 537 - DNA, 2016 bp, Artificial Sequence
  Description of Artificial Sequence: Synthetic polynucleotide
atgcaccatcatcaccatcatggtggttctggttcgccgatacttggttattggaagattaaaggactggttcagcccacacgcctcctgctagaatacttagaggaaaaatatgaagagcacctgtacgaacgtgatgagggggacaaatggcgaaacaagaaatttgaattgggcttagaatttccaaatttgccgtattatatcgatggcgacgtaaaactgacccaatcaatggccattattcgctacatcgcagataaacataacatgctgggtggctgccctaaagaacgggctgagatctccatgctggaaggtgcggtgctcgacattcgctacggcgtcagtagaattgcgtatagcaaggatttcgaaactttaaaagtggatttcctgagcaaacttccggagatgctgaaaatgtttgaggataggctttgtcataagacgtatctcaatggtgatcatgttacccacccggactttatgctgtacgacgcccttgatgtcgttctgtatatggatcccatgtgcctggacgccttcccgaaattagtgtgttttaaaaaacgtatcgaagcgattccacagatcgataaatacttgaagtcttctaaatatattgcttggcctctgcaaggctggcaggcaacgttcggtgggggagatcatccgccaaaatcagatctggtgccgcgtgggagccctggcatacaccgcgacggtggttctggtgagaacctgtactttcaaagctcagataatgggcctcaaaaccagcgcaacgctccacgtataaccttcggtggcccgtctgactccacaggcagcaaccagaatggtgagcgtagtggagccaggtctaagcagcgccgtccccagggtctgccgaacaacacggcgagctggtttactgcgcttacccaacacggtaaagaagacttaaaattcccgcgtggccagggcgtcccgatcaacactaactcttccccggatgatcagattggttgctaccgcagagcaactcgtcggattcgcggcggcgacggtaaaatgaaagatttgtctccgcgttggtacttttactatctcggcaccggtccggaagctggactgccctacggggcaaacaaggacgggatcatttgggtggctaccgaaggtgccctgaatactccaaaagatcatatcggcacccgtaaccctgctaataacgctgcgatcgttctgcaactgcctcagggtacaactctgccaaaaggcttctatgcagaagggtcgcgtggtggcagccaggcgagtagccgtagcagctcccgctctcgcaactcgtcccgtaactccactccgggctcttctcgcggcacgtccccggctcgtatggcaggtaacggtggtgacgctgctctggcgctgctactgctggacaggctgaaccagctggagtcgaagatgagtggtaaaggccaacagcagcagggccagaccgttaccaaaaagagcgcagctgaagcatctaaaaaaccgcgacagaaacgtaccgcgactaaagcgtacaatgtaacacaggccttcggtcgtcgaggtccggagcaaactcaaggaaactttggcgatcaggaattaatccgccaggggaccgactacaaacactggccgcaaattgcccagttcgccccatccgctagtgcattcttcggtatgagccgcatcggcatggaagtaacgccaagtggtacgtggctgacctacaccggtgctatcaagcttgatgacaaggacccgaactttaaagaccaggttattctgcttaacaaacatattgatgcctataaaactttcccgccgaccgaacccaaaaaggacaaaaagaaaaaagctgatgaaacccaggctctaccgcagcgtcagaaaaaacagcaaactgtgactctgctgccagctgcggacctggatgatttttccaagcagctgcaacagtctatgagctctgcggactctacgcaggcttaa

SEQ ID NO: 538 - DNA, 2016 bp, Artificial Sequence
  Description of Artificial Sequence: Synthetic polynucleotide
atgcaccatcatcaccatcatggtggttctggttcgccgatacttggttattggaagattaaaggactggttcagcccacacgcctcctgctagaatacttagaggaaaaatatgaagagcacctgtacgaacgtgatgagggggacaaatggcgaaacaagaaatttgaattgggcttagaatttccaaatttgccgtattatatcgatggcgacgtaaaactgacccaatcaatggccattattcgctacatcgcagataaacataacatgctgggtggctgccctaaagaacgggctgagatctccatgctggaaggtgcggtgctcgacattcgctacggcgtcagtagaattgcgtatagcaaggatttcgaaactttaaaagtggatttcctgagcaaacttccggagatgctgaaaatgtttgaggataggctttgtcataagacgtatctcaatggtgatcatgttacccacccggactttatgctgtacgacgcccttgatgtcgttctgtatatggatcccatgtgcctggacgccttcccgaaattagtgtgttttaaaaaacgtatcgaagcgattccacagatcgataaatacttgaagtcttctaaatatattgcttggcctctgcaaggctggcaggcaacgttcggtgggggagatcatccgccaaaatcagatctggtgccgcgtgggagccctggcatacaccgcgacggtggttctggtgagaacctgtactttcaaagctcagataatgggcctcaaaaccagcgcaacgctccacgtataaccttcggtggcccgtctgactccacaggcagcaaccagaatggtgagcgtagtggagccaggtctaagcagcgccgtccccagggtctgccgaacaacacggcgagctggtttactgcgcttacccaacacggtaaagaagacttaaaattcccgcgtggccagggcgtcccgatcaacactaactcttccccggatgatcagattggttattaccgcagagcaactcgtcggattcgcggcggcgacggtaaaatgaaagatttgtctccgcgttggtacttttactatctcggcaccggtccggaagctggactgccctacggggcaaacaaggacgggatcatttgggtggctaccgaaggtgccctgaatactccaaaagatcatatcggcacccgtaaccctgctaataacgctgcgatcgttctgcaactgcctcagggtacaactctgccaaaaggcttctatgcagaagggtcgcgtggtggcagccaggcgagtagccgtagcagctcccgctctcgcaactcgtcccgtaactccactccgggctcttctcgcggcacgtccccggctcgtatggcaggtaacggtggtgacgctgctctggcgctgctactgctggacaggctgaaccagctggagtcgaagatgagtggtaaaggccaacagcagcagggccagaccgttaccaaaaagagcgcagctgaagcatctaaaaaaccgcgacagaaacgtaccgcgactaaaggatacaatgtaacacaggccttcggtcgtcgaggtccggagcaaactcaaggaaactttggcgatcaggatttaatcaagttggggaccgactacaaacactggccgcaaattgcccagttcgccccatccgctagtgcattcttcggtatgagccgcatcggcacgcgggaaacgccaagtggtacgtggctgacctacaccggtgctatcaagcttgataaaaaggacccgaactttaaagaccaggttattctgcttaacaaacatattgatgcctataaaactttcccgccgaccgaacccaaaaaggacaaaaagaaaaaagctgatgaaacccaggctctaccgcagcgtcagaaaaaacagcaaactgtgactctgctgccagctgcggacctggatgatttttccaagcagctgcaacagtctatgagctctgcggactctacgcaggcttaa

SEQ ID NO: 539 - DNA, 2016 bp, Artificial Sequence
  Description of Artificial Sequence: Synthetic polynucleotide
atgcaccatcatcaccatcatggtggttctggttcgccgatacttggttattggaagattaaaggactggttcagcccacacgcctcctgctagaatacttagaggaaaaatatgaagagcacctgtacgaacgtgatgagggggacaaatggcgaaacaagaaatttgaattgggcttagaatttccaaatttgccgtattatatcgatggcgacgtaaaactgacccaatcaatggccattattcgctacatcgcagataaacataacatgctgggtggctgccctaaagaacgggctgagatctccatgctggaaggtgcggtgctcgacattcgctacggcgtcagtagaattgcgtatagcaaggatttcgaaactttaaaagtggatttcctgagcaaacttccggagatgctgaaaatgtttgaggataggctttgtcataagacgtatctcaatggtgatcatgttacccacccggactttatgctgtacgacgcccttgatgtcgttctgtatatggatcccatgtgcctggacgccttcccgaaattagtgtgttttaaaaaacgtatcgaagcgattccacagatcgataaatacttgaagtcttctaaatatattgcttggcctctgcaaggctggcaggcaacgttcggtgggggagatcatccgccaaaatcagatctggtgccgcgtgggagccctggcatacaccgcgacggtggttctggtgagaacctgtactttcaaagctcagataatgggcctcaaaaccagcgcaacgctccacgtataaccttcggtggcccgtctgactccacaggcagcaaccagaatggtgagcgtagtggagccaggtctaagcagcgccgtccccagggtctgccgaacaacacggcgagctggtttactccgcttacccaaaatggtaaagaagacttaaaattcccgcctggccagggcgtcccgatcaacactaactcttccccggatgatcagattggttattaccgcagagcaactcgtcggattcgcggcggcgacggtaaaatgaaagatttgccaccgaagtggtacttttactatctcggcaccggtccgcatgctgatctgccctacgggcaaaaacacgacggggttttttgggtggctcgtccaggtgccctgaatactccaaaagatcatatcggcacccgtaaccctgctaataacgctgcgatcccgctgcaactgcctccgggtacaaaactgccaaaaggcttctatgcagaagggtcgcgtggtggcagccaggcgagtagccgtagcagctcccgctctcgcaactcgtcccgtaactccactccgggctcttctcgcggcacgtccccggctcgtatggcaggtaacggtggtgacgctgctctggcgctgctactgctggacaggctgaaccagctggagtcgaagatgagtggtaaaggccaacagcagcagggccagaccgttaccaaaaagagcgcagctgaagcatctaaaaaaccgcgacagaaacgtaccgcgactaaagcgtacaatgtaacacaggccttcggtcgtcgaggtccggagcaaactcaaggaaactttggcgatcaggaattaatccgccaggggaccgactacaaacactggccgcaaattgcccagttcgccccatccgctagtgcattcttcggtatgagccgcatcggcatggaagtaacgccaagtggtacgtggctgacctacaccggtgctatcaagcttgatgacaaggacccgaactttaaagaccaggttattctgcttaacaaacatattgatgcctataaaactttcccgccgaccgaacccaaaaaggacaaaaagaaaaaagctgatgaaacccaggctctaccgcagcgtcagaaaaaacagcaaactgtgactctgctgccagctgcggacctggatgatttttccaagcagctgcaacagtctatgagctctgcggactctacgcaggcttaa

SEQ ID NO: 540 - DNA, 2016 bp, Artificial Sequence
  Description of Artificial Sequence: Synthetic polynucleotide
atgcaccatcatcaccatcatggtggttctggttcgccgatacttggttattggaagattaaaggactggttcagcccacacgcctcctgctagaatacttagaggaaaaatatgaagagcacctgtacgaacgtgatgagggggacaaatggcgaaacaagaaatttgaattgggcttagaatttccaaatttgccgtattatatcgatggcgacgtaaaactgacccaatcaatggccattattcgctacatcgcagataaacataacatgctgggtggctgccctaaagaacgggctgagatctccatgctggaaggtgcggtgctcgacattcgctacggcgtcagtagaattgcgtatagcaaggatttcgaaactttaaaagtggatttcctgagcaaacttccggagatgctgaaaatgtttgaggataggctttgtcataagacgtatctcaatggtgatcatgttacccacccggactttatgctgtacgacgcccttgatgtcgttctgtatatggatcccatgtgcctggacgccttcccgaaattagtgtgttttaaaaaacgtatcgaagcgattccacagatcgataaatacttgaagtcttctaaatatattgcttggcctctgcaaggctggcaggcaacgttcggtgggggagatcatccgccaaaatcagatctggtgccgcgtgggagccctggcatacaccgcgacggtggttctggtgagaacctgtactttcaaagctcagataatgggcctcaaaaccagcgcaacgctccacgtataaccttcggtggcccgtctgactccacaggcagcaaccagaatggtgagcgtagtggagccaggtctaagcagcgccgtccccagggtctgccgaacaacacggcgagctggtttactgcgcttacccaacacggtaaagaagacttaaaattcccgcgtggccagggcgtcccgatcaacactaactcttccccggatgatcagattggttattaccgcagagcaactcgtcggattcgcggcggcgacggtaaaatgaaagatttgtctccgcgttggtacttttactatctcggcaccggtccggaagctggactgccctacggggcaaacaaggacgggatcatttgggtggctgccgaaggtgccctgaatactccaaaagatcatatcggcacccgtaaccctgctaataacgctgcgatcgttctgcaactgcctcagggtacaactctgccaaaaggcttctatgcagaagggtcgcgtggtggcagccaggcgagtagccgtagcagctcccgctctcgcaactcgtcccgtaactccactccgggctcttctcgcggcacgtccccggctcgtatggcaggtaacggtggtgacgctgctctggcgctgctactgctggacaggctgaaccagctggagtcgaagatgagtggtaaaggccaacagcagcagggccagaccgttaccaaaaagagcgcagctgaagcatctaaaaaaccgcgacagaaacgtaccgcgactaaagcgtacaatgtaacacaggccttcggtcgtcgaggtccggagcaaactcaaggaaactttggcgatcaggaattaatccgccaggggaccgactacaaacactggccgcaaattgcccagttcgccccatccgctagtgcattcttcggtatgagccgcatcggcatggaagtaacgccaagtggtacgtggctgacctacaccggtgctatcaagcttgatgacaaggacccgaactttaaagaccaggttattctgcttaacaaacatattgatgcctataaaactttcccgccgaccgaacccaaaaaggacaaaaagaaaaaagctgatgaaacccaggctctaccgcagcgtcagaaaaaacagcaaactgtgactctgctgccagctgcggacctggatgatttttccaagcagctgcaacagtctatgagctctgcggactctacgcaggcttaa

SEQ ID NO: 541 - DNA, 2016 bp, Artificial Sequence
  Description of Artificial Sequence: Synthetic polynucleotide
atgcaccatcatcaccatcatggtggttctggttcgccgatacttggttattggaagattaaaggactggttcagcccacacgcctcctgctagaatacttagaggaaaaatatgaagagcacctgtacgaacgtgatgagggggacaaatggcgaaacaagaaatttgaattgggcttagaatttccaaatttgccgtattatatcgatggcgacgtaaaactgacccaatcaatggccattattcgctacatcgcagataaacataacatgctgggtggctgccctaaagaacgggctgagatctccatgctggaaggtgcggtgctcgacattcgctacggcgtcagtagaattgcgtatagcaaggatttcgaaactttaaaagtggatttcctgagcaaacttccggagatgctgaaaatgtttgaggataggctttgtcataagacgtatctcaatggtgatcatgttacccacccggactttatgctgtacgacgcccttgatgtcgttctgtatatggatcccatgtgcctggacgccttcccgaaattagtgtgttttaaaaaacgtatcgaagcgattccacagatcgataaatacttgaagtcttctaaatatattgcttggcctctgcaaggctggcaggcaacgttcggtgggggagatcatccgccaaaatcagatctggtgccgcgtgggagccctggcatacaccgcgacggtggttctggtgagaacctgtactttcaaagctcagataatgggcctcaaaaccagcgcaacgctccacgtataaccttcggtggcccgtctgactccacaggcagcaaccagaatggtgagcgtagtggagccaggtctaagcagcgccgtccccagggtctgccgaacaacacggcgagctggtttactgcgcttacccaacacggtaaagaagacttaaaattcccgcgtggccagggcgtcccgatcaacactaactcttccccggatgatcagattggttattaccgcagagcaatccgtcggattcgcggcggcgacggtaaaatgaaagatttgtctccgcgttggtacttttactatctcggcaccggtccggaagctggactgccctacggggcaaacaaggacgggatcatttgggtggctaccgaaggtgccctgaatactccaaaagatcatatcggcacccgtaaccctgctaataacgctgcgatcgttctgcaactgcctcagggtacaactctgccaaaaggcttctatgcagaagggtcgcgtggtggcagccaggcgagtagccgtagcagctcccgctctcgcaactcgtcccgtaactccactccgggctcttctcgcggcacgtccccggctcgtatggcaggtaacggtggtgacgctgctctggcgctgctactgctggacaggctgaaccagctggagtcgaagatgagtggtaaaggccaacagcagcagggccagaccgttaccaaaaagagcgcagctgaagcatctaaaaaaccgcgacagaaacgtaccgcgactaaagcgtacaatgtaacacaggccttcggtcgtcgaggtccggagcaaactcaaggaaactttggcgatcaggaattaatccgccaggggaccgactacaaacactggccgcaaattgcccagttcgccccatccgctagtgcattcttcggtatgagccgcatcggcatggaagtaacgccaagtggtacgtggctgacctacaccggtgctatcaagcttgatgacaaggacccgaactttaaagaccaggttattctgcttaacaaacatattgatgcctataaaactttcccgccgaccgaacccaaaaaggacaaaaagaaaaaagctgatgaaacccaggctctaccgcagcgtcagaaaaaacagcaaactgtgactctgctgccagctgcggacctggatgatttttccaagcagctgcaacagtctatgagctctgcggactctacgcaggcttaa

SEQ ID NO: 542 - DNA, 2016 bp, Artificial Sequence
  Description of Artificial Sequence: Synthetic polynucleotide
atgcaccatcatcaccatcatggtggttctggttcgccgatacttggttattggaagattaaaggactggttcagcccacacgcctcctgctagaatacttagaggaaaaatatgaagagcacctgtacgaacgtgatgagggggacaaatggcgaaacaagaaatttgaattgggcttagaatttccaaatttgccgtattatatcgatggcgacgtaaaactgacccaatcaatggccattattcgctacatcgcagataaacataacatgctgggtggctgccctaaagaacgggctgagatctccatgctggaaggtgcggtgctcgacattcgctacggcgtcagtagaattgcgtatagcaaggatttcgaaactttaaaagtggatttcctgagcaaacttccggagatgctgaaaatgtttgaggataggctttgtcataagacgtatctcaatggtgatcatgttacccacccggactttatgctgtacgacgcccttgatgtcgttctgtatatggatcccatgtgcctggacgccttcccgaaattagtgtgttttaaaaaacgtatcgaagcgattccacagatcgataaatacttgaagtcttctaaatatattgcttggcctctgcaaggctggcaggcaacgttcggtgggggagatcatccgccaaaatcagatctggtgccgcgtgggagccctggcatacaccgcgacggtggttctggtgagaacctgtactttcaaagctcagataatgggcctcaaaaccagcgcaacgctccacgtataaccttcggtggcccgtctgactccacaggcagcaaccagaatggtgagcgtagtggagccaggtctaagcagcgccgtccccagggtctgccgaacaacacggcgagctggtttactgcgcttacccaacacggtaaagaagacttaaaattcccgcgtggccagggcgtcccgatcaacactaactcttccccggatgatcagattggttattaccgcagagcaactcgtcggattcgcggcggcgacggtaaaatgaaagatttgtctccgcgttggtacttttactatctcggcaccggtccggaagctggactgccctacggggcaaacaaggacgggatcatttgggtggctgtagaaggtgccctgaatactccaaaagatcatatcggcacccgtaaccctgctaataacgctgcgatcgttctgcaactgcctcagggtacaactctgccaaaaggcttctatgcagaagggtcgcgtggtggcagccaggcgagtagccgtagcagctcccgctctcgcaactcgtcccgtaactccactccgggctcttctcgcggcacgtccccggctcgtatggcaggtaacggtggtgacgctgctctggcgctgctactgctggacaggctgaaccagctggagtcgaagatgagtggtaaaggccaacagcagcagggccagaccgttaccaaaaagagcgcagctgaagcatctaaaaaaccgcgacagaaacgtaccgcgactaaagcgtacaatgtaacacaggccttcggtcgtcgaggtccggagcaaactcaaggaaactttggcgatcaggaattaatccgccaggggaccgactacaaacactggccgcaaattgcccagttcgccccatccgctagtgcattcttcggtatgagccgcatcggcatggaagtaacgccaagtggtacgtggctgacctacaccggtgctatcaagcttgatgacaaggacccgaactttaaagaccaggttattctgcttaacaaacatattgatgcctataaaactttcccgccgaccgaacccaaaaaggacaaaaagaaaaaagctgatgaaacccaggctctaccgcagcgtcagaaaaaacagcaaactgtgactctgctgccagctgcggacctggatgatttttccaagcagctgcaacagtctatgagctctgcggactctacgcaggcttaa

SEQ ID NO: 543 - DNA, 2016 bp, Artificial Sequence
  Description of Artificial Sequence: Synthetic polynucleotide
atgcaccatcatcaccatcatggtggttctggttcgccgatacttggttattggaagattaaaggactggttcagcccacacgcctcctgctagaatacttagaggaaaaatatgaagagcacctgtacgaacgtgatgagggggacaaatggcgaaacaagaaatttgaattgggcttagaatttccaaatttgccgtattatatcgatggcgacgtaaaactgacccaatcaatggccattattcgctacatcgcagataaacataacatgctgggtggctgccctaaagaacgggctgagatctccatgctggaaggtgcggtgctcgacattcgctacggcgtcagtagaattgcgtatagcaaggatttcgaaactttaaaagtggatttcctgagcaaacttccggagatgctgaaaatgtttgaggataggctttgtcataagacgtatctcaatggtgatcatgttacccacccggactttatgctgtacgacgcccttgatgtcgttctgtatatggatcccatgtgcctggacgccttcccgaaattagtgtgttttaaaaaacgtatcgaagcgattccacagatcgataaatacttgaagtcttctaaatatattgcttggcctctgcaaggctggcaggcaacgttcggtgggggagatcatccgccaaaatcagatctggtgccgcgtgggagccctggcatacaccgcgacggtggttctggtgagaacctgtactttcaaagctcagataatgggcctcaaaaccagcgcaacgctccacgtataaccttcggtggcccgtctgactccacaggcagcaaccagaatggtgagcgtagtggagccaggtctaagcagcgccgtccccagggtctgccgaacaacacggcgagctggtttactgcgcttacccaacacggtaaagaagacttaaaattcccgcgtggccagggcgtcccgatcaacactaactcttccccggatgatcagattggttattaccgcagagcaactcgtcggattcgcggcggcgacggtaaaatgaaagatttgtctccgcgttggtacttttactatctcggcaccggtccggaagctggactgccctacggggcaaacaaggacgggatcatttgggtggctaccgaaggtgccctgaatactccaaaagatcatatcggcacccgtaaccctgctaataacgctgcgatcgttctgcaactgcctcagggtacaactctgccaaaaggcttctatgcagaagggtcgcgtggtggcagccaggcgagtagccgtagcagctcccgctctcgcaactcgtcccgtaactccactccgggctcttctcgcggcacgtccccggctcgtatggcaggtaacggtggtgacgctgctctggcgctgctactgctggacaggctgaaccagctggagtcgaagatgagtggtaaaggccaacagcagcagggccagaccgttaccaaaaagagcgcagctgaaatgtctaaaaaaccgcgacagaaacgtaccgcgactaaaggatttaatgtaacacaggccttcggtcctcgaggtccggagcaaactcaaggaaactttggcgatgcggaattaatcaaaaaagggaccgactacaaacactggccgcaaattgcccagttcgccccatccgctagtgcattcttcggtatgagccgcatctcatcaaaggaaacgccaagtggtacgtggctgacctacaccggtgctatcaagcttgataaagatgacccgaactttaaagaccaggttattctgcttaacaaacatattgatgcctataaaactttcccgccgaccgaacccaaaaaggacaaaaagaaaaaagctgatgaaacccaggctctaccgcagcgtcagaaaaaacagcaaactgtgactctgctgccagctgcggacctggatgatttttccaagcagctgcaacagtctatgagctctgcggactctacgcaggcttaa

SEQ ID NO: 544 - DNA, 2016 bp, Artificial Sequence
  Description of Artificial Sequence: Synthetic polynucleotide
atgcaccatcatcaccatcatggtggttctggttcgccgatacttggttattggaagattaaaggactggttcagcccacacgcctcctgctagaatacttagaggaaaaatatgaagagcacctgtacgaacgtgatgagggggacaaatggcgaaacaagaaatttgaattgggcttagaatttccaaatttgccgtattatatcgatggcgacgtaaaactgacccaatcaatggccattattcgctacatcgcagataaacataacatgctgggtggctgccctaaagaacgggctgagatctccatgctggaaggtgcggtgctcgacattcgctacggcgtcagtagaattgcgtatagcaaggatttcgaaactttaaaagtggatttcctgagcaaacttccggagatgctgaaaatgtttgaggataggctttgtcataagacgtatctcaatggtgatcatgttacccacccggactttatgctgtacgacgcccttgatgtcgttctgtatatggatcccatgtgcctggacgccttcccgaaattagtgtgttttaaaaaacgtatcgaagcgattccacagatcgataaatacttgaagtcttctaaatatattgcttggcctctgcaaggctggcaggcaacgttcggtgggggagatcatccgccaaaatcagatctggtgccgcgtgggagccctggcatacaccgcgacggtggttctggtgagaacctgtactttcaaagctcagataatgggcctcaaaaccagcgcaacgctccacgtataaccttcggtggcccgtctgactccacaggcagcaaccagaatggtgagcgtagtggagccaggtctaagcagcgccgtccccagggtctgccgaacaacacggcgagctggtttactgcgcttacccaacacggtaaagaagacttaaaattcccgcgtggccagggcgtcccgatcaacactaactcttccccggatgatcagattggttattaccgcagagcaactcgtcggattcgcggcggcgacggtaaaatgaaagatttgtctccgcgttggtacttttactatctcggcaccggtccggaagctggactgccctacggggcaaacaaggacgggatcatttgggtggctaccgaaggtgccctgaatactccaaaagatcatatcggcacccgtaaccctgctaataacgctgcgatcgttctgcaactgcctcagggtacaactctgccaaaaggcttctatgcagaagggtcgcgtggtggcagccaggcgagtagccgtagcagctcccgctctcgcaactcgtcccgtaactccactccgggctcttctcgcggcacgtccccggctcgtatggcaggtaacggtggtgacgctgctctggcgctgctactgctggacaggctgaaccagctggagtcgaagatgagtggtaaaggccaacagcagcagggccagaccgttaccaaaaagagcgcagctgaaatgtctaaaaaaccgcgacagaaacgtaccgcgactaaaggctgcaatgtaacacagtgtttcggtcctcgaggtccggagcaaactcaaggaaactttggcgatgccgaattaaataaaaaagggaccgactacaaacactggccgcaaattgcccagttcgccccatccgctagtgcattcttcggtatgagccgcatcagcagtaaggagcaaccaagtggtacgtggctgacctacaccggtgctatcaagcttgataaagatgacccgaactttaaagaccaggttattctgcttaacaaacatattgatgcctataaaactttcccgccgaccgaacccaaaaaggacaaaaagaaaaaagctgatgaaacccaggctctaccgcagcgtcagaaaaaacagcaaactgtgactctgctgccagctgcggacctggatgatttttccaagcagctgcaacagtctatgagctctgcggactctacgcaggcttaa

SEQ ID NO: 545 - DNA, 2016 bp, Artificial Sequence
  Description of Artificial Sequence: Synthetic polynucleotide
atgcaccatcatcaccatcatggtggttctggttcgccgatacttggttattggaagattaaaggactggttcagcccacacgcctcctgctagaatacttagaggaaaaatatgaagagcacctgtacgaacgtgatgagggggacaaatggcgaaacaagaaatttgaattgggcttagaatttccaaatttgccgtattatatcgatggcgacgtaaaactgacccaatcaatggccattattcgctacatcgcagataaacataacatgctgggtggctgccctaaagaacgggctgagatctccatgctggaaggtgcggtgctcgacattcgctacggcgtcagtagaattgcgtatagcaaggatttcgaaactttaaaagtggatttcctgagcaaacttccggagatgctgaaaatgtttgaggataggctttgtcataagacgtatctcaatggtgatcatgttacccacccggactttatgctgtacgacgcccttgatgtcgttctgtatatggatcccatgtgcctggacgccttcccgaaattagtgtgttttaaaaaacgtatcgaagcgattccacagatcgataaatacttgaagtcttctaaatatattgcttggcctctgcaaggctggcaggcaacgttcggtgggggagatcatccgccaaaatcagatctggtgccgcgtgggagccctggcatacaccgcgacggtggttctggtgagaacctgtactttcaaagctcagataatgggcctcaaaaccagcgcaacgctccacgtataaccttcggtggcccgtctgactccacaggcagcaaccagaatggtgagcgtagtggagccaggtctaagcagcgccgtccccagggtctgccgaacaacacggcgagctggtttactgcgcttacccaacacggtaaagaagacttaaaattcccgcgtggccagggcgtcccgatcaacactaactcttccccggatgatcagattggttattaccgcagagcaactcgtcggattcgcggcggcgacggtaaaatgaaagatttgtctccgcgttggtacttttactatctcggcaccggtccggaagctggactgccctacggggcaaacaaggacgggatcatttgggtggctaccgaaggtgccctgaatactccaaaagatcatatcggcacccgtaaccctgctaataacgctgcgatcgttctgcaactgcctcagggtacaactctgccaaaaggcttctatgcagaagggtcgcgtggtggcagccaggcgagtagccgtagcagctcccgctctcgcaactcgtcccgtaactccactccgggctcttctcgcggcacgtccccggctcgtatggcaggtaacggtggtgacgctgctctggcgctgctactgctggacaggctgaaccagctggagtcgaagatgagtggtaaaggccaacagcagcagggccagaccgttaccaaaaagagcgcagctgaagcatctaaaaaaccgcgacagaaacgtaccgcgactaaagcgtacaatgtaacacaggccttcggtcgtcgaggtccggagcaaactcaaggaaactttggcgatcaggaattaatccgccaggggaccgactacaaacactggccgcaaattgcccagttcgccccatccgctagtgcattcttcggtatgagccgcatcggccttgaagtaacgccaagtggtacgtggctgacctacaccggtgctatcaagcttgatgacaaggacccgaactttaaagaccaggttattctgcttaacaaacatattgatgcctataaaactttcccgccgaccgaacccaaaaaggacaaaaagaaaaaagctgatgaaacccaggctctaccgcagcgtcagaaaaaacagcaaactgtgactctgctgccagctgcggacctggatgatttttccaagcagctgcaacagtctatgagctctgcggactctacgcaggcttaa

SEQ ID NO: 546 - DNA, 2016 bp, Artificial Sequence
  Description of Artificial Sequence: Synthetic polynucleotide
atgcaccatcatcaccatcatggtggttctggttcgccgatacttggttattggaagattaaaggactggttcagcccacacgcctcctgctagaatacttagaggaaaaatatgaagagcacctgtacgaacgtgatgagggggacaaatggcgaaacaagaaatttgaattgggcttagaatttccaaatttgccgtattatatcgatggcgacgtaaaactgacccaatcaatggccattattcgctacatcgcagataaacataacatgctgggtggctgccctaaagaacgggctgagatctccatgctggaaggtgcggtgctcgacattcgctacggcgtcagtagaattgcgtatagcaaggatttcgaaactttaaaagtggatttcctgagcaaacttccggagatgctgaaaatgtttgaggataggctttgtcataagacgtatctcaatggtgatcatgttacccacccggactttatgctgtacgacgcccttgatgtcgttctgtatatggatcccatgtgcctggacgccttcccgaaattagtgtgttttaaaaaacgtatcgaagcgattccacagatcgataaatacttgaagtcttctaaatatattgcttggcctctgcaaggctggcaggcaacgttcggtgggggagatcatccgccaaaatcagatctggtgccgcgtgggagccctggcatacaccgcgacggtggttctggtgagaacctgtactttcaaagctcagataatgggcctcaaaaccagcgcaacgctccacgtataaccttcggtggcccgtctgactccacaggcagcaaccagaatggtgagcgtagtggagccaggtctaagcagcgccgtccccagggtctgccgaacaacacggcgagctggtttactgcgcttacccaacacggtaaagaagacttaaaattcccgcgtggccagggcgtcccgatcaacactaactcttccccggatgatcagattggttattaccgcagagcaactcgtcggattcgcggcggcgacggtaaaatgaaagatttgtctccgcgttggtacttttactatctcggcaccggtccggaagctggactgccctacggggcaaacaaggacgggatcatttgggtggctaccgaaggtgccctgaatactccaaaagatcatatcggcacccgtaaccctgctaataacgctgcgatcgttctgcaactgcctcagggtacaactctgccaaaaggcttctatgcagaagggtcgcgtggtggcagccaggcgagtagccgtagcagctcccgctctcgcaactcgtcccgtaactccactccgggctcttctcgcggcacgtccccggctcgtatggcaggtaacggtggtgacgctgctctggcgctgctactgctggacaggctgaaccagctggagtcgaagatgagtggtaaaggccaacagcagcagggccagaccgttaccaaaaagagcgcagctgaaatgtctaaaaaaccgcgacagaaacgtaccgcgactaaaggatacaatgtaacacagtgcttcggtccccgaggtccggagcaaactcaaggaaactttggcgatgccgatttaatcaagaaagggaccgactacaaacactggccgcaaattgcccagttcgccccatccgctagtgcattcttcggtatgagccgcatctcatcaaaggaaacgccaagtggtacgtggctgacctacaccggtgctatcaagcttgataaagatgacccgaactttaaagaccaggttattctgcttaacaaacatattgatgcctataaaactttcccgccgaccgaacccaaaaaggacaaaaagaaaaaagctgatgaaacccaggctctaccgcagcgtcagaaaaaacagcaaactgtgactctgctgccagctgcggacctggatgatttttccaagcagctgcaacagtctatgagctctgcggactctacgcaggcttaa

SEQ ID NO: 547 - DNA, 2016 bp, Artificial Sequence
  Description of Artificial Sequence: Synthetic polynucleotide
atgcaccatcatcaccatcatggtggttctggttcgccgatacttggttattggaagattaaaggactggttcagcccacacgcctcctgctagaatacttagaggaaaaatatgaagagcacctgtacgaacgtgatgagggggacaaatggcgaaacaagaaatttgaattgggcttagaatttccaaatttgccgtattatatcgatggcgacgtaaaactgacccaatcaatggccattattcgctacatcgcagataaacataacatgctgggtggctgccctaaagaacgggctgagatctccatgctggaaggtgcggtgctcgacattcgctacggcgtcagtagaattgcgtatagcaaggatttcgaaactttaaaagtggatttcctgagcaaacttccggagatgctgaaaatgtttgaggataggctttgtcataagacgtatctcaatggtgatcatgttacccacccggactttatgctgtacgacgcccttgatgtcgttctgtatatggatcccatgtgcctggacgccttcccgaaattagtgtgttttaaaaaacgtatcgaagcgattccacagatcgataaatacttgaagtcttctaaatatattgcttggcctctgcaaggctggcaggcaacgttcggtgggggagatcatccgccaaaatcagatctggtgccgcgtgggagccctggcatacaccgcgacggtggttctggtgagaacctgtactttcaaagctcagataatgggcctcaaaaccagcgcaacgctccacgtataaccttcggtggcccgtctgactccacaggcagcaaccagaatggtgagcgtagtggagccaggtctaagcagcgccgtccccagggtctgccgaacaacacggcgagctggtttactgcgcttacccaacacggtaaagaagacttaaaattcccgcgtggccagggcgtcccgatcaacactaactcttccccggatgatcagattggttattaccgcagagcaactcgtcggattcgcggcggcgacggtaaaatgaaagatttgtctccgcgttggtacttttactatctcggcaccggtccggaagctggactgccctacggggcaaacaaggacgggatcatttgggtggctaccgaaggtgccctgaatactccaaaagatcatatcggcacccgtaaccctgctaataacgctgcgaatgttctgcaactgcctcagggtacaactctgccaaaaggcttctatgcagaagggtcgcgtggtggcagccaggcgagtagccgtagcagctcccgctctcgcaactcgtcccgtaactccactccgggctcttctcgcggcacgtccccggctcgtatggcaggtaacggtggtgacgctgctctggcgctgctactgctggacaggctgaaccagctggagtcgaagatgagtggtaaaggccaacagcagcagggccagaccgttaccaaaaagagcgcagctgaagcatctaaaaaaccgcgacagaaacgtaccgcgactaaagcgtacaatgtaacacaggccttcggtcgtcgaggtccggagcaaactcaaggaaactttggcgatcaggaattaatccgccaggggaccgactacaaacactggccgcaaattgcccagttcgccccatccgctagtgcattcttcggtatgagccgcatcggcatggaagtaacgccaagtggtacgtggctgacctacaccggtgctatcaagcttgatgacaaggacccgaactttaaagaccaggttattctgcttaacaaacatattgatgcctataaaactttcccgccgaccgaacccaaaaaggacaaaaagaaaaaagctgatgaaacccaggctctaccgcagcgtcagaaaaaacagcaaactgtgactctgctgccagctgcggacctggatgatttttccaagcagctgcaacagtctatgagctctgcggactctacgcaggcttaa

SEQ ID NO: 548 - DNA, 2016 bp, Artificial Sequence
  Description of Artificial Sequence: Synthetic polynucleotide
atgcaccatcatcaccatcatggtggttctggttcgccgatacttggttattggaagattaaaggactggttcagcccacacgcctcctgctagaatacttagaggaaaaatatgaagagcacctgtacgaacgtgatgagggggacaaatggcgaaacaagaaatttgaattgggcttagaatttccaaatttgccgtattatatcgatggcgacgtaaaactgacccaatcaatggccattattcgctacatcgcagataaacataacatgctgggtggctgccctaaagaacgggctgagatctccatgctggaaggtgcggtgctcgacattcgctacggcgtcagtagaattgcgtatagcaaggatttcgaaactttaaaagtggatttcctgagcaaacttccggagatgctgaaaatgtttgaggataggctttgtcataagacgtatctcaatggtgatcatgttacccacccggactttatgctgtacgacgcccttgatgtcgttctgtatatggatcccatgtgcctggacgccttcccgaaattagtgtgttttaaaaaacgtatcgaagcgattccacagatcgataaatacttgaagtcttctaaatatattgcttggcctctgcaaggctggcaggcaacgttcggtgggggagatcatccgccaaaatcagatctggtgccgcgtgggagccctggcatacaccgcgacggtggttctggtgagaacctgtactttcaaagctcagataatgggcctcaaaaccagcgcaacgctccacgtataaccttcggtggcccgtctgactccacaggcagcaaccagaatggtgagcgtagtggagccaggtctaagcagcgccgtccccagggtctgccgaacaacacggcgagctggtttactgcgcttacccaacacggtaaagaagacttaaaattcccgcgtggccagggcgtcccgatcaacactaactcttccccggatgatcagattggttattaccgcagagcaactcgtcggattcgcggcggcgacggtaaaatgaaagatttgtctccgcgttggtacttttactatctcggcaccggtccggaagctggactgccctacggggcaaaccatgacgggatcatttgggtggctaccgaaggtgccctgaatactccaaaagatcatatcggcacccgtaaccctgctaataacgctgcgatcgttctgcaactgcctcagggtacaactctgccaaaaggcttctatgcagaagggtcgcgtggtggcagccaggcgagtagccgtagcagctcccgctctcgcaactcgtcccgtaactccactccgggctcttctcgcggcacgtccccggctcgtatggcaggtaacggtggtgacgctgctctggcgctgctactgctggacaggctgaaccagctggagtcgaagatgagtggtaaaggccaacagcagcagggccagaccgttaccaaaaagagcgcagctgaagcatctaaaaaaccgcgacagaaacgtaccgcgactaaagcgtacaatgtaacacaggccttcggtcgtcgaggtccggagcaaactcaaggaaactttggcgatcaggaattaatccgccaggggaccgactacaaacactggccgcaaattgcccagttcgccccatccgctagtgcattcttcggtatgagccgcatcggcatggaagtaacgccaagtggtacgtggctgacctacaccggtgctatcaagcttgatgacaaggacccgaactttaaagaccaggttattctgcttaacaaacatattgatgcctataaaactttcccgccgaccgaacccaaaaaggacaaaaagaaaaaagctgatgaaacccaggctctaccgcagcgtcagaaaaaacagcaaactgtgactctgctgccagctgcggacctggatgatttttccaagcagctgcaacagtctatgagctctgcggactctacgcaggcttaa

SEQ ID NO: 549 - DNA, 2016 bp, Artificial Sequence
  Description of Artificial Sequence: Synthetic polynucleotide
atgcaccatcatcaccatcatggtggttctggttcgccgatacttggttattggaagattaaaggactggttcagcccacacgcctcctgctagaatacttagaggaaaaatatgaagagcacctgtacgaacgtgatgagggggacaaatggcgaaacaagaaatttgaattgggcttagaatttccaaatttgccgtattatatcgatggcgacgtaaaactgacccaatcaatggccattattcgctacatcgcagataaacataacatgctgggtggctgccctaaagaacgggctgagatctccatgctggaaggtgcggtgctcgacattcgctacggcgtcagtagaattgcgtatagcaaggatttcgaaactttaaaagtggatttcctgagcaaacttccggagatgctgaaaatgtttgaggataggctttgtcataagacgtatctcaatggtgatcatgttacccacccggactttatgctgtacgacgcccttgatgtcgttctgtatatggatcccatgtgcctggacgccttcccgaaattagtgtgttttaaaaaacgtatcgaagcgattccacagatcgataaatacttgaagtcttctaaatatattgcttggcctctgcaaggctggcaggcaacgttcggtgggggagatcatccgccaaaatcagatctggtgccgcgtgggagccctggcatacaccgcgacggtggttctggtgagaacctgtactttcaaagctcagataatgggcctcaaaaccagcgcaacgctccacgtataaccttcggtggcccgtctgactccacaggcagcaaccagaatggtgagcgtagtggagccaggtctaagcagcgccgtccccagggtctgccgaacaacacggcgagctggtacactgcgcttacccaacacggtaaagaagacttaaaattcccgcgtggccagggcgtcccgatcaacactaactcttccccggatgatcagattggttattaccgcagagcaactcgtcggattcgcggcggcgacggtaaaatgaaagatttgtctccgcgttggtacttttactatctcggcaccggtccggaagctggactgccctacggggcaaacaaggacgggatcatttgggtggctaccgaaggtgccctgaatactccaaaagatcatatcggcacccgtaaccctgctaataacgctgcgatcgttctgcaactgcctcagggtacaactctgccaaaaggcttctatgcagaagggtcgcgtggtggcagccaggcgagtagccgtagcagctcccgctctcgcaactcgtcccgtaactccactccgggctcttctcgcggcacgtccccggctcgtatggcaggtaacggtggtgacgctgctctggcgctgctactgctggacaggctgaaccagctggagtcgaagatgagtggtaaaggccaacagcagcagggccagaccgttaccaaaaagagcgcagctgaagcatctaaaaaaccgcgacagaaacgtaccgcgactaaagcgtacaatgtaacacaggccttcggtcgtcgaggtccggagcaaactcaaggaaactttggcgatcaggaattaatccgccaggggaccgactacaaacactggccgcaaattgcccagttcgccccatccgctagtgcattcttcggtatgagccgcatcggcatggaagtaacgccaagtggtacgtggctgacctacaccggtgctatcaagcttgatgacaaggacccgaactttaaagaccaggttattctgcttaacaaacatattgatgcctataaaactttcccgccgaccgaacccaaaaaggacaaaaagaaaaaagctgatgaaacccaggctctaccgcagcgtcagaaaaaacagcaaactgtgactctgctgccagctgcggacctggatgatttttccaagcagctgcaacagtctatgagctctgcggactctacgcaggcttaa

SEQ ID NO: 550 - DNA, 2016 bp, Artificial Sequence
  Description of Artificial Sequence: Synthetic polynucleotide
atgcaccatcatcaccatcatggtggttctggttcgccgatacttggttattggaagattaaaggactggttcagcccacacgcctcctgctagaatacttagaggaaaaatatgaagagcacctgtacgaacgtgatgagggggacaaatggcgaaacaagaaatttgaattgggcttagaatttccaaatttgccgtattatatcgatggcgacgtaaaactgacccaatcaatggccattattcgctacatcgcagataaacataacatgctgggtggctgccctaaagaacgggctgagatctccatgctggaaggtgcggtgctcgacattcgctacggcgtcagtagaattgcgtatagcaaggatttcgaaactttaaaagtggatttcctgagcaaacttccggagatgctgaaaatgtttgaggataggctttgtcataagacgtatctcaatggtgatcatgttacccacccggactttatgctgtacgacgcccttgatgtcgttctgtatatggatcccatgtgcctggacgccttcccgaaattagtgtgttttaaaaaacgtatcgaagcgattccacagatcgataaatacttgaagtcttctaaatatattgcttggcctctgcaaggctggcaggcaacgttcggtgggggagatcatccgccaaaatcagatctggtgccgcgtgggagccctggcatacaccgcgacggtggttctggtgagaacctgtactttcaaagctcagataatgggcctcaaaaccagcgcaacgctccacgtataaccttcggtggcccgtctgactccacaggcagcaaccagaatggtgagcgtagtggagccaggtctaagcagcgccgtccccagggtctgccgaacaacacggcgagctggtttactgcgcttacccaacacggtaaagaagacttaaaattcccgcgtggccagggcgtcccgatcaacactaactcttccccggatgatcagattggttattaccgcagagcaactcgtcggattcgcggcggcgacggtaaaatgaaagatttgtctccgcgttggtacttttactatctcggcaccggtccggaagctggactgccctacggggcaaacaaggacgggatcatttgggtggctaccgaaggtgccctgaatactccaaaagatcatatcggcacccgtaaccctgctaataacgctgcgatcgttgtacaactgcctcagggtacaactctgccaaaaggcttctatgcagaagggtcgcgtggtggcagccaggcgagtagccgtagcagctcccgctctcgcaactcgtcccgtaactccactccgggctcttctcgcggcacgtccccggctcgtatggcaggtaacggtggtgacgctgctctggcgctgctactgctggacaggctgaaccagctggagtcgaagatgagtggtaaaggccaacagcagcagggccagaccgttaccaaaaagagcgcagctgaagcatctaaaaaaccgcgacagaaacgtaccgcgactaaagcgtacaatgtaacacaggccttcggtcgtcgaggtccggagcaaactcaaggaaactttggcgatcaggaattaatccgccaggggaccgactacaaacactggccgcaaattgcccagttcgccccatccgctagtgcattcttcggtatgagccgcatcggcatggaagtaacgccaagtggtacgtggctgacctacaccggtgctatcaagcttgatgacaaggacccgaactttaaagaccaggttattctgcttaacaaacatattgatgcctataaaactttcccgccgaccgaacccaaaaaggacaaaaagaaaaaagctgatgaaacccaggctctaccgcagcgtcagaaaaaacagcaaactgtgactctgctgccagctgcggacctggatgatttttccaagcagctgcaacagtctatgagctctgcggactctacgcaggcttaa

SEQ ID NO: 551 - DNA, 2016 bp, Artificial Sequence
  Description of Artificial Sequence: Synthetic polynucleotide
atgcaccatcatcaccatcatggtggttctggttcgccgatacttggttattggaagattaaaggactggttcagcccacacgcctcctgctagaatacttagaggaaaaatatgaagagcacctgtacgaacgtgatgagggggacaaatggcgaaacaagaaatttgaattgggcttagaatttccaaatttgccgtattatatcgatggcgacgtaaaactgacccaatcaatggccattattcgctacatcgcagataaacataacatgctgggtggctgccctaaagaacgggctgagatctccatgctggaaggtgcggtgctcgacattcgctacggcgtcagtagaattgcgtatagcaaggatttcgaaactttaaaagtggatttcctgagcaaacttccggagatgctgaaaatgtttgaggataggctttgtcataagacgtatctcaatggtgatcatgttacccacccggactttatgctgtacgacgcccttgatgtcgttctgtatatggatcccatgtgcctggacgccttcccgaaattagtgtgttttaaaaaacgtatcgaagcgattccacagatcgataaatacttgaagtcttctaaatatattgcttggcctctgcaaggctggcaggcaacgttcggtgggggagatcatccgccaaaatcagatctggtgccgcgtgggagccctggcatacaccgcgacggtggttctggtgagaacctgtactttcaaagctcagataatgggcctcaaaaccagcgcaacgctccacgtataaccttcggtggcccgtctgactccacaggcagcaaccagaatggtgagcgtagtggagccaggtctaagcagcgccgtccccagggtctgccgaacaacacggcgagctggtttactgcgcttacccaacacggtaaagaagacttaaaattcccgcgtggccagggcgtcccgatcaacactaactcttccccggatgatcagattggttattaccgcagagcaactcgtcggaaacgcggcggcgacggtaaaatgaaagatttgtctccgcgttggtacttttactatctcggcaccggtccggaagctggactgccctacggggcaaacaaggacgggatcatttgggtggctaccgaaggtgccctgaatactccaaaagatcatatcggcacccgtaaccctgctaataacgctgcgatcgttctgcaactgcctcagggtacaactctgccaaaaggcttctatgcagaagggtcgcgtggtggcagccaggcgagtagccgtagcagctcccgctctcgcaactcgtcccgtaactccactccgggctcttctcgcggcacgtccccggctcgtatggcaggtaacggtggtgacgctgctctggcgctgctactgctggacaggctgaaccagctggagtcgaagatgagtggtaaaggccaacagcagcagggccagaccgttaccaaaaagagcgcagctgaagcatctaaaaaaccgcgacagaaacgtaccgcgactaaagcgtacaatgtaacacaggccttcggtcgtcgaggtccggagcaaactcaaggaaactttggcgatcaggaattaatccgccaggggaccgactacaaacactggccgcaaattgcccagttcgccccatccgctagtgcattcttcggtatgagccgcatcggcatggaagtaacgccaagtggtacgtggctgacctacaccggtgctatcaagcttgatgacaaggacccgaactttaaagaccaggttattctgcttaacaaacatattgatgcctataaaactttcccgccgaccgaacccaaaaaggacaaaaagaaaaaagctgatgaaacccaggctctaccgcagcgtcagaaaaaacagcaaactgtgactctgctgccagctgcggacctggatgatttttccaagcagctgcaacagtctatgagctctgcggactctacgcaggcttaa

SEQ ID NO: 552 - DNA, 2016 bp, Artificial Sequence
  Description of Artificial Sequence: Synthetic polynucleotide
atgcaccatcatcaccatcatggtggttctggttcgccgatacttggttattggaagattaaaggactggttcagcccacacgcctcctgctagaatacttagaggaaaaatatgaagagcacctgtacgaacgtgatgagggggacaaatggcgaaacaagaaatttgaattgggcttagaatttccaaatttgccgtattatatcgatggcgacgtaaaactgacccaatcaatggccattattcgctacatcgcagataaacataacatgctgggtggctgccctaaagaacgggctgagatctccatgctggaaggtgcggtgctcgacattcgctacggcgtcagtagaattgcgtatagcaaggatttcgaaactttaaaagtggatttcctgagcaaacttccggagatgctgaaaatgtttgaggataggctttgtcataagacgtatctcaatggtgatcatgttacccacccggactttatgctgtacgacgcccttgatgtcgttctgtatatggatcccatgtgcctggacgccttcccgaaattagtgtgttttaaaaaacgtatcgaagcgattccacagatcgataaatacttgaagtcttctaaatatattgcttggcctctgcaaggctggcaggcaacgttcggtgggggagatcatccgccaaaatcagatctggtgccgcgtgggagccctggcatacaccgcgacggtggttctggtgagaacctgtactttcaaagctcagataatgggcctcaaaaccagcgcaacgctccacgtataaccttcggtggcccgtctgactccacaggcagcaaccagaatggtgagcgtagtggagccaggtctaagcagcgccgtccccagggtctgccgaacaacacggcgagctggtttactgcgcttacccaacacggtaaagaagacttaaaattcccgcgtggccagggcgtcccgatcaacactaactcttccccggatgatcagattggttattaccgcagagcaactcgtcggattcgcggcggcgacggtaaaatgaaagatttgtctccgcgttggtacttttactatctcggcaccggtccggaagctggactgccctacggggcaaacaaggacgggatcatttgggtggctaccgaaggtgccctgaatactccaaaagatcatatcggcacccgtaaccctgctaataacgctgcgatcgttctgcaactgcctcagggtacaactctgccaaaaggcttctatgcagaagggtcgcgtggtggcagccaggcgagtagccgtagcagctcccgctctcgcaactcgtcccgtaactccactccgggctcttctcgcggcacgtccccggctcgtatggcaggtaacggtggtgacgctgctctggcgctgctactgctggacaggctgaaccagctggagtcgaagatgagtggtaaaggccaacagcagcagggccagaccgttaccaaaaagagcgcagctgaaatgtctaaaaaaccgcgatggaaacgtaccccgactaaagagtacaatgtaacacaggccttcggtcctcgaggtccgaaagatactcaaggaaactttggcgatgccgaattaatcaagcaggggaccgactacaaacactggccgcaaattgcccagttcgtgccatccgctgcggcattcttctttatgagccgcatctcgatgaaagaaacgccagatggtgtgtggctgacctacaccggtacgatcaagcttgataaagatgacccgaactttgatgaccaggttaaactgcttaacaaacatattgatgcctataaaactttcccgccgaccgaacccaaaaaggacaaaaagaaaaaagctgatgaaacccaggctctaccgcagcgtcagaaaaaacagcaaactgtgactctgctgccagctgcggacctggatgatttttccaagcagctgcaacagtctatgagctctgcggactctacgcaggcttaa

SEQ ID NO: 553 - DNA, 2016 bp, Artificial Sequence
  Description of Artificial Sequence: Synthetic polynucleotide
atgcaccatcatcaccatcatggtggttctggttcgccgatacttggttattggaagattaaaggactggttcagcccacacgcctcctgctagaatacttagaggaaaaatatgaagagcacctgtacgaacgtgatgagggggacaaatggcgaaacaagaaatttgaattgggcttagaatttccaaatttgccgtattatatcgatggcgacgtaaaactgacccaatcaatggccattattcgctacatcgcagataaacataacatgctgggtggctgccctaaagaacgggctgagatctccatgctggaaggtgcggtgctcgacattcgctacggcgtcagtagaattgcgtatagcaaggatttcgaaactttaaaagtggatttcctgagcaaacttccggagatgctgaaaatgtttgaggataggctttgtcataagacgtatctcaatggtgatcatgttacccacccggactttatgctgtacgacgcccttgatgtcgttctgtatatggatcccatgtgcctggacgccttcccgaaattagtgtgttttaaaaaacgtatcgaagcgattccacagatcgataaatacttgaagtcttctaaatatattgcttggcctctgcaaggctggcaggcaacgttcggtgggggagatcatccgccaaaatcagatctggtgccgcgtgggagccctggcatacaccgcgacggtggttctggtgagaacctgtactttcaaagctcagataatgggcctcaaaaccagcgcaacgctccacgtataaccttcggtggcccgtctgactccacaggcagcaaccagaatggtgagcgtagtggagccaggtctaagcagcgccgtccccagggtctgccgaacaacacggcgagctggtttactgcgcttacccaacacggtaaagaagacttaaaattcccgcgtggccagggcgtcccgatcaacactaactcttccccggatgatcagattggttattaccgcagagcaactcgtcggattcgcggcggcgacggtaaaatgaaagatttgtctccgcgttggtacttttactatctcggcaccggtccggaagctggactgccctacggggcaaacaaggacgggatcatttgggtggctaccgaaggtgccctgaatactccaaaagatcatatcggcacccgtaaccctgctaataacgctgcgatcgttctgcaactgcctcagggtacaactctgccaaaaggcttctatgcagaagggtcgcgtggtggcagccaggcgagtagccgtagcagctcccgctctcgcaactcgtcccgtaactccactccgggctcttctcgcggcacgtccccggctcgtatggcaggtaacggtggtgacgctgctctggcgctgctactgctggacaggctgaaccagctggagtcgaagatgagtggtaaaggccaacagcagcagggccagaccgttaccaaaaagagcgcagctgaaatgtctaaaaaaccgcgatggaaacgtaccccaactaaagagtacaatgtaacacaggccttcggtccccgaggtccgaaggatactcaaggaaactttggcgatgcggaattaatcaaacaggggaccgactacaaacactggccgcaaattgcccagttcgtgccatccgctgcggcattcttctttatgagccgcatcggcatgaaagaaacgccagatggtgtctggctgacctacaccggtacgatcaagcttgataaagatgacccgaactttgatgaccaggttaaactgcttaacaaacatattgatgcctataaaactttcccgccgaccgaacccaaaaaggacaaaaagaaaaaagctgatgaaacccaggctctaccgcagcgtcagaaaaaacagcaaactgtgactctgctgccagctgcggacctggatgatttttccaagcagctgcaacagtctatgagctctgcggactctacgcaggcttaa

SEQ ID NO: 554 - DNA, 2016 bp, Artificial Sequence
  Description of Artificial Sequence: Synthetic polynucleotide
atgcaccatcatcaccatcatggtggttctggttcgccgatacttggttattggaagattaaaggactggttcagcccacacgcctcctgctagaatacttagaggaaaaatatgaagagcacctgtacgaacgtgatgagggggacaaatggcgaaacaagaaatttgaattgggcttagaatttccaaatttgccgtattatatcgatggcgacgtaaaactgacccaatcaatggccattattcgctacatcgcagataaacataacatgctgggtggctgccctaaagaacgggctgagatctccatgctggaaggtgcggtgctcgacattcgctacggcgtcagtagaattgcgtatagcaaggatttcgaaactttaaaagtggatttcctgagcaaacttccggagatgctgaaaatgtttgaggataggctttgtcataagacgtatctcaatggtgatcatgttacccacccggactttatgctgtacgacgcccttgatgtcgttctgtatatggatcccatgtgcctggacgccttcccgaaattagtgtgttttaaaaaacgtatcgaagcgattccacagatcgataaatacttgaagtcttctaaatatattgcttggcctctgcaaggctggcaggcaacgttcggtgggggagatcatccgccaaaatcagatctggtgccgcgtgggagccctggcatacaccgcgacggtggttctggtgagaacctgtactttcaaagctcagataatgggcctcaaaaccagcgcaacgctccacgtataaccttcggtggcccgtctgactccacaggcagcaaccagaatggtgagcgtagtggagccaggtctaagcagcgccgtccccagggtctgccgaacaacacggcgagctggtttactgcgcttacccaacacggtaaagaagacttaaaattcccgcgtggccagggcgtcccgatcaacccaaactcttccccggatgatcagattggttattaccgcagagcaactcgtcggattcgcggcggcgacggtaaaatgaaagatttgtctccgcgttggtacttttactatctcggcaccggtccggaagctggactgccctacggggcaaacaaggacgggatcatttgggtggctaccgaaggtgccctgaatactccaaaagatcatatcggcacccgtaaccctgctaataacgctgcgatcgttctgcaactgcctcagggtacaactctgccaaaaggcttctatgcagaagggtcgcgtggtggcagccaggcgagtagccgtagcagctcccgctctcgcaactcgtcccgtaactccactccgggctcttctcgcggcacgtccccggctcgtatggcaggtaacggtggtgacgctgctctggcgctgctactgctggacaggctgaaccagctggagtcgaagatgagtggtaaaggccaacagcagcagggccagaccgttaccaaaaagagcgcagctgaagcatctaaaaaaccgcgacagaaacgtaccgcgactaaagcgtacaatgtaacacaggccttcggtcgtcgaggtccggagcaaactcaaggaaactttggcgatcaggaattaatccgccaggggaccgactacaaacactggccgcaaattgcccagttcgccccatccgctagtgcattcttcggtatgagccgcatcggcatggaagtaacgccaagtggtacgtggctgacctacaccggtgctatcaagcttgatgacaaggacccgaactttaaagaccaggttattctgcttaacaaacatattgatgcctataaaactttcccgccgaccgaacccaaaaaggacaaaaagaaaaaagctgatgaaacccaggctctaccgcagcgtcagaaaaaacagcaaactgtgactctgctgccagctgcggacctggatgatttttccaagcagctgcaacagtctatgagctctgcggactctacgcaggcttaa

SEQ ID NO: 555 - DNA, 2016 bp, Artificial Sequence
  Description of Artificial Sequence: Synthetic polynucleotide
atgcaccatcatcaccatcatggtggttctggttcgccgatacttggttattggaagattaaaggactggttcagcccacacgcctcctgctagaatacttagaggaaaaatatgaagagcacctgtacgaacgtgatgagggggacaaatggcgaaacaagaaatttgaattgggcttagaatttccaaatttgccgtattatatcgatggcgacgtaaaactgacccaatcaatggccattattcgctacatcgcagataaacataacatgctgggtggctgccctaaagaacgggctgagatctccatgctggaaggtgcggtgctcgacattcgctacggcgtcagtagaattgcgtatagcaaggatttcgaaactttaaaagtggatttcctgagcaaacttccggagatgctgaaaatgtttgaggataggctttgtcataagacgtatctcaatggtgatcatgttacccacccggactttatgctgtacgacgcccttgatgtcgttctgtatatggatcccatgtgcctggacgccttcccgaaattagtgtgttttaaaaaacgtatcgaagcgattccacagatcgataaatacttgaagtcttctaaatatattgcttggcctctgcaaggctggcaggcaacgttcggtgggggagatcatccgccaaaatcagatctggtgccgcgtgggagccctggcatacaccgcgacggtggttctggtgagaacctgtactttcaaagctcagataatgggcctcaaaaccagcgcaacgctccacgtataaccttcggtggcccgtctgactccacaggcagcaaccagaatggtgagcgtagtggagccaggtctaagcagcgccgtccccagggtctgccgaacaacacggcgagctggtttactgcgcttacccaacacggtaaagaagacttaaaattcccgcgtggccagggcgtcccgatcaacactaactcttccccggatgatcagattggttattaccgcagagcaactcgtcggattcgcggcggcgacggtaaaatgaaagatttgtctccgcgttggtacttttactatctcggcaccggtccggaagctggactgccctacggggcaaacaaggacgggatcatttgggtggctaccgaaggtgccctgaatactccaaaagatcatatcggcacccgtaaccctgctaataacgctgcggatgttctgcaactgcctcagggtacaactctgccaaaaggcttctatgcagaagggtcgcgtggtggcagccaggcgagtagccgtagcagctcccgctctcgcaactcgtcccgtaactccactccgggctcttctcgcggcacgtccccggctcgtatggcaggtaacggtggtgacgctgctctggcgctgctactgctggacaggctgaaccagctggagtcgaagatgagtggtaaaggccaacagcagcagggccagaccgttaccaaaaagagcgcagctgaagcatctaaaaaaccgcgacagaaacgtaccgcgactaaagcgtacaatgtaacacaggccttcggtcgtcgaggtccggagcaaactcaaggaaactttggcgatcaggaattaatccgccaggggaccgactacaaacactggccgcaaattgcccagttcgccccatccgctagtgcattcttcggtatgagccgcatcggcatggaagtaacgccaagtggtacgtggctgacctacaccggtgctatcaagcttgatgacaaggacccgaactttaaagaccaggttattctgcttaacaaacatattgatgcctataaaactttcccgccgaccgaacccaaaaaggacaaaaagaaaaaagctgatgaaacccaggctctaccgcagcgtcagaaaaaacagcaaactgtgactctgctgccagctgcggacctggatgatttttccaagcagctgcaacagtctatgagctctgcggactctacgcaggcttaa

SEQ ID NO: 556 - DNA, 2016 bp, Artificial Sequence
  Description of Artificial Sequence: Synthetic polynucleotide
atgcaccatcatcaccatcatggtggttctggttcgccgatacttggttattggaagattaaaggactggttcagcccacacgcctcctgctagaatacttagaggaaaaatatgaagagcacctgtacgaacgtgatgagggggacaaatggcgaaacaagaaatttgaattgggcttagaatttccaaatttgccgtattatatcgatggcgacgtaaaactgacccaatcaatggccattattcgctacatcgcagataaacataacatgctgggtggctgccctaaagaacgggctgagatctccatgctggaaggtgcggtgctcgacattcgctacggcgtcagtagaattgcgtatagcaaggatttcgaaactttaaaagtggatttcctgagcaaacttccggagatgctgaaaatgtttgaggataggctttgtcataagacgtatctcaatggtgatcatgttacccacccggactttatgctgtacgacgcccttgatgtcgttctgtatatggatcccatgtgcctggacgccttcccgaaattagtgtgttttaaaaaacgtatcgaagcgattccacagatcgataaatacttgaagtcttctaaatatattgcttggcctctgcaaggctggcaggcaacgttcggtgggggagatcatccgccaaaatcagatctggtgccgcgtgggagccctggcatacaccgcgacggtggttctggtgagaacctgtactttcaaagctcagataatgggcctcaaaaccagcgcaacgctccacgtataaccttcggtggcccgtctgactccacaggcagcaaccagaatggtgagcgtagtggagccaggtctaagcagcgccgtccccagggtctgccgaacaacacggcgagctggtttactgcgcttacccaaaatggtaaagaagacttaaaattcccgccaggccagggcgtcccgatcaacactaactcttccccggatgatcagattggttattaccgcagagcaactcgtcggattcgcggcggcgacggtaaaatgaaagatttgcctccgcgttggtacttttactatctcggcaccggtccgcatgctgatctgccctacgggcaaaagcaagacggggtgttttgggtggctcgcccaggtgccctgaatactccaaaagatcatatcggcacccgtaaccctgctaataacgctgcgatcccgctgcaactgcctccgggtacaaaactgccaaaaggcttctatgcagaagggtcgcgtggtggcagccaggcgagtagccgtagcagctcccgctctcgcaactcgtcccgtaactccactccgggctcttctcgcggcacgtccccggctcgtatggcaggtaacggtggtgacgctgctctggcgctgctactgctggacaggctgaaccagctggagtcgaagatgagtggtaaaggccaacagcagcagggccagaccgttaccaaaaagagcgcagctgaagcatctaaaaaaccgcgacagaaacgtaccgcgactaaagcgtacaatgtaacacaggccttcggtcgtcgaggtccggagcaaactcaaggaaactttggcgatcaggaattaatccgccaggggaccgactacaaacactggccgcaaattgcccagttcgccccatccgctagtgcattcttcggtatgagccgcatcggcatggaagtaacgccaagtggtacgtggctgacctacaccggtgctatcaagcttgatgacaaggacccgaactttaaagaccaggttattctgcttaacaaacatattgatgcctataaaactttcccgccgaccgaacccaaaaaggacaaaaagaaaaaagctgatgaaacccaggctctaccgcagcgtcagaaaaaacagcaaactgtgactctgctgccagctgcggacctggatgatttttccaagcagctgcaacagtctatgagctctgcggactctacgcaggcttaa

SEQ ID NO: 557 - DNA, 2016 bp, Artificial Sequence
  Description of Artificial Sequence: Synthetic polynucleotide
atgcaccatcatcaccatcatggtggttctggttcgccgatacttggttattggaagattaaaggactggttcagcccacacgcctcctgctagaatacttagaggaaaaatatgaagagcacctgtacgaacgtgatgagggggacaaatggcgaaacaagaaatttgaattgggcttagaatttccaaatttgccgtattatatcgatggcgacgtaaaactgacccaatcaatggccattattcgctacatcgcagataaacataacatgctgggtggctgccctaaagaacgggctgagatctccatgctggaaggtgcggtgctcgacattcgctacggcgtcagtagaattgcgtatagcaaggatttcgaaactttaaaagtggatttcctgagcaaacttccggagatgctgaaaatgtttgaggataggctttgtcataagacgtatctcaatggtgatcatgttacccacccggactttatgctgtacgacgcccttgatgtcgttctgtatatggatcccatgtgcctggacgccttcccgaaattagtgtgttttaaaaaacgtatcgaagcgattccacagatcgataaatacttgaagtcttctaaatatattgcttggcctctgcaaggctggcaggcaacgttcggtgggggagatcatccgccaaaatcagatctggtgccgcgtgggagccctggcatacaccgcgacggtggttctggtgagaacctgtactttcaaagctcagataatgggcctcaaaaccagcgcaacgctccacgtataaccttcggtggcccgtctgactccacaggcagcaaccagaatggtgagcgtagtggagccaggtctaagcagcgccgtccccagggtctgccgaacaacacggcgagctggtttactggccttacccaacaaggtaaagaagacttaaaattcccgcccggccagggcgtcccgatcaacactaactcttccccggatgatcagattggttattaccgcagagcaactcgtcggattcgcggcggcgacggtaaaatgaaagatttgccaccgaagtggtacttttactatctcggcaccggtccgcatgctgatctgccctacgggcagaaacaagacggggtattttgggtggctcgacctggtgccctgaatactccaaaagatcatatcggcacccgtaaccctgctaataacgctgcgatcccgctgcaactgcctccgggtacaaaactgccaaaaggcttctatgcagaagggtcgcgtggtggcagccaggcgagtagccgtagcagctcccgctctcgcaactcgtcccgtaactccactccgggctcttctcgcggcacgtccccggctcgtatggcaggtaacggtggtgacgctgctctggcgctgctactgctggacaggctgaaccagctggagtcgaagatgagtggtaaaggccaacagcagcagggccagaccgttaccaaaaagagcgcagctgaagcatctaaaaaaccgcgacagaaacgtaccgcgactaaagcgtacaatgtaacacaggccttcggtcgtcgaggtccggagcaaactcaaggaaactttggcgatcaggaattaatccgccaggggaccgactacaaacactggccgcaaattgcccagttcgccccatccgctagtgcattcttcggtatgagccgcatcggcatggaagtaacgccaagtggtacgtggctgacctacaccggtgctatcaagcttgatgacaaggacccgaactttaaagaccaggttattctgcttaacaaacatattgatgcctataaaactttcccgccgaccgaacccaaaaaggacaaaaagaaaaaagctgatgaaacccaggctctaccgcagcgtcagaaaaaacagcaaactgtgactctgctgccagctgcggacctggatgatttttccaagcagctgcaacagtctatgagctctgcggactctacgcaggcttaa

SEQ ID NO: 558 - DNA, 2016 bp, Artificial Sequence
  Description of Artificial Sequence: Synthetic polynucleotide
atgcaccatcatcaccatcatggtggttctggttcgccgatacttggttattggaagattaaaggactggttcagcccacacgcctcctgctagaatacttagaggaaaaatatgaagagcacctgtacgaacgtgatgagggggacaaatggcgaaacaagaaatttgaattgggcttagaatttccaaatttgccgtattatatcgatggcgacgtaaaactgacccaatcaatggccattattcgctacatcgcagataaacataacatgctgggtggctgccctaaagaacgggctgagatctccatgctggaaggtgcggtgctcgacattcgctacggcgtcagtagaattgcgtatagcaaggatttcgaaactttaaaagtggatttcctgagcaaacttccggagatgctgaaaatgtttgaggataggctttgtcataagacgtatctcaatggtgatcatgttacccacccggactttatgctgtacgacgcccttgatgtcgttctgtatatggatcccatgtgcctggacgccttcccgaaattagtgtgttttaaaaaacgtatcgaagcgattccacagatcgataaatacttgaagtcttctaaatatattgcttggcctctgcaaggctggcaggcaacgttcggtgggggagatcatccgccaaaatcagatctggtgccgcgtgggagccctggcatacaccgcgacggtggttctggtgagaacctgtactttcaaagctcagataatgggcctcaaaaccagcgcaacgctccacgtataaccttcggtggcccgtctgactccacaggcagcaaccagaatggtgagcgtagtggagccaggtctaagcagcgccgtccccagggtctgccgaacaacacggcgagctggtttactgcgcttacccaacacggtaaagaagacttaaaattcccgcgtggccagggcgtcccgatcaacactaactcttccccggatgatcagattggttattaccgcagagcaactcgtcggattcgcggcggcgacggtaaaatgaaagatttgtctccgcgttggtacttttactatctcggcaccggtccggaagctggactgccctacggggcaaacaaggacgggatcatttgggtggctaccgaaggtgccctgaatactccaaaagatcatatcggcacccgtaaccctgctaataacgctgcgatcgttctgcaactgcctcagggtacaactctgccaaaaggcttctatgcagaagggtcgcgtggtggcagccaggcgagtagccgtagcagctcccgctctcgcaactcgtcccgtaactccactccgggctcttctcgcggcacgtccccggctcgtatggcaggtaacggtggtgacgctgctctggcgctgctactgctggacaggctgaaccagctggagtcgaagatgagtggtaaaggccaacagcagcagggccagaccgttaccaaaaagagcgcagctgaaatgtctaaaaaaccgcgacagaaacgtaccgcgactaaaggatgtaatgtaacacagtgcttcggtccacgaggtccggagcaaactcaaggaaactttggcgatgccgaattaatcaaaaaaggggtggactacaaacactggccgcaaattgcccagttcgccccatccgctagtgcattcttcggtatgagccgcatctcatccaaagaaacgccaagtggtacgtggctgacctacaccggtgctatcaagcttgataaggatgacccgaactttaaagaccaggttattctgcttaacaaacatattgatgcctataaaactttcccgccgaccgaacccaaaaaggacaaaaagaaaaaagctgatgaaacccaggctctaccgcagcgtcagaaaaaacagcaaactgtgactctgctgccagctgcggacctggatgatttttccaagcagctgcaacagtctatgagctctgcggactctacgcaggcttaa

SEQ ID NO: 559 - DNA, 2016 bp, Artificial Sequence
  Description of Artificial Sequence: Synthetic polynucleotide
atgcaccatcatcaccatcatggtggttctggttcgccgatacttggttattggaagattaaaggactggttcagcccacacgcctcctgctagaatacttagaggaaaaatatgaagagcacctgtacgaacgtgatgagggggacaaatggcgaaacaagaaatttgaattgggcttagaatttccaaatttgccgtattatatcgatggcgacgtaaaactgacccaatcaatggccattattcgctacatcgcagataaacataacatgctgggtggctgccctaaagaacgggctgagatctccatgctggaaggtgcggtgctcgacattcgctacggcgtcagtagaattgcgtatagcaaggatttcgaaactttaaaagtggatttcctgagcaaacttccggagatgctgaaaatgtttgaggataggctttgtcataagacgtatctcaatggtgatcatgttacccacccggactttatgctgtacgacgcccttgatgtcgttctgtatatggatcccatgtgcctggacgccttcccgaaattagtgtgttttaaaaaacgtatcgaagcgattccacagatcgataaatacttgaagtcttctaaatatattgcttggcctctgcaaggctggcaggcaacgttcggtgggggagatcatccgccaaaatcagatctggtgccgcgtgggagccctggcatacaccgcgacggtggttctggtgagaacctgtactttcaaagctcagataatgggcctcaaaaccagcgcaacgctccacgtataaccttcggtggcccgtctgactccacaggcagcaaccagaatggtgagcgtagtggagccaggtctaagcagcgccgtccccagggtctgccgaacaacacggcgagctggtttactgcgcttacccaacacggtaaagaagacttaaaattcccgcgtggccagggcgtcccgatcaacactaactcttccccggatgatcagattggttattaccgcagagcaactcgtcggattcgcggcggcgacggtaaaatgaaagatttgtctccgcgttggtacttttactatctcggcaccggtccggaagctggactgccctacggggcaaacaaggacgggatcatttgggtggctaccgaaggtgccctgaatactccaaaagatcatatcggcacccgtaaccctgctaataacgctgcgatcgttctgcaactgcctcagggtacaactctgccaaaaggcttctatgcagaagggtcgcgtggtggcagccaggcgagtagccgtagcagctcccgctctcgcaactcgtcccgtaactccactccgggctcttctcgcggcacgtccccggctcgtatggcaggtaacggtggtgacgctgctctggcgctgctactgctggacaggctgaaccagctggagtcgaagatgagtggtaaaggccaacagcagcagggccagaccgttaccaaaaagagcgcagctgaagcatctaaaaaaccgcgacagaaacgtaccgcgactaaagcgtacaatgtaacacaggccttcggtcgtcgaggtccggagcaaactcaaggaaactttggcgatcaggaattaatccgccaggggaccgactacaaacactggccgcaaattgcccagttcgccccatccgctagtgcattcttcggtatgagccgcatcggcatgacggtaacgccaagtggtacgtggctgacctacaccggtgctatcaagcttgatgacaaggacccgaactttaaagaccaggttattctgcttaacaaacatattgatgcctataaaactttcccgccgaccgaacccaaaaaggacaaaaagaaaaaagctgatgaaacccaggctctaccgcagcgtcagaaaaaacagcaaactgtgactctgctgccagctgcggacctggatgatttttccaagcagctgcaacagtctatgagctctgcggactctacgcaggcttaa

SEQ ID NO: 560 - DNA, 2016 bp, Artificial Sequence
  Description of Artificial Sequence: Synthetic polynucleotide
atgcaccatcatcaccatcatggtggttctggttcgccgatacttggttattggaagattaaaggactggttcagcccacacgcctcctgctagaatacttagaggaaaaatatgaagagcacctgtacgaacgtgatgagggggacaaatggcgaaacaagaaatttgaattgggcttagaatttccaaatttgccgtattatatcgatggcgacgtaaaactgacccaatcaatggccattattcgctacatcgcagataaacataacatgctgggtggctgccctaaagaacgggctgagatctccatgctggaaggtgcggtgctcgacattcgctacggcgtcagtagaattgcgtatagcaaggatttcgaaactttaaaagtggatttcctgagcaaacttccggagatgctgaaaatgtttgaggataggctttgtcataagacgtatctcaatggtgatcatgttacccacccggactttatgctgtacgacgcccttgatgtcgttctgtatatggatcccatgtgcctggacgccttcccgaaattagtgtgttttaaaaaacgtatcgaagcgattccacagatcgataaatacttgaagtcttctaaatatattgcttggcctctgcaaggctggcaggcaacgttcggtgggggagatcatccgccaaaatcagatctggtgccgcgtgggagccctggcatacaccgcgacggtggttctggtgagaacctgtactttcaaagctcagataatgggcctcaaaaccagcgcaacgctccacgtataaccttcggtggcccgtctgactccacaggcagcaaccagaatggtgagcgtagtggagccaggtctaagcagcgccgtccccagggtctgccgaacaacacggcgagctggtttactgcgcttacccaacacggtaaagaagacttaaaattcccgcgtggccagggcgtcccgatcaacactaactcttccccggatgatcagattggttattaccgcagagcaactcgtcggattcgcggcggcgacggtaaaatgaaagatttgtctccgcgttggtacttttactatctcggcaccggtccggaagctggactgccctacggggcaaacaaggacgggatcatttgggtggctaccgaaggtgccctgaatactccaaaagatcatatcggcacccgtaaccctgctaataacgctgcgatcgttctgcaactgcctcagggtacaactctgccaaaaggcttctatgcagaagggtcgcgtggtggcagccaggcgagtagccgtagcagctcccgctctcgcaactcgtcccgtaactccactccgggctcttctcgcggcacgtccccggctcgtatggcaggtaacggtggtgacgctgctctggcgctgctactgctggacaggctgaaccagctggagtcgaagatgagtggtaaaggccaacagcagcagggccagaccgttaccaaaaagagcgcagctgaagcatctaaaaaaccgcgacagaaacgtaccgcgactaaagcgtacaatgtaacacaggccttcggtcgtcgaggtccggagcaaactcaaggaaactttggcgatcaggaattaatcgagcaggggaccgactacaaacactggccgcaaattgcccagttcgccccatccgctagtgcattcttcggtatgagccgcatcggcatggaagtaacgccaagtggtacgtggctgacctacaccggtgctatcaagcttgatgacaaggacccgaactttaaagaccaggttattctgcttaacaaacatattgatgcctataaaactttcccgccgaccgaacccaaaaaggacaaaaagaaaaaagctgatgaaacccaggctctaccgcagcgtcagaaaaaacagcaaactgtgactctgctgccagctgcggacctggatgatttttccaagcagctgcaacagtctatgagctctgcggactctacgcaggcttaa

SEQ ID NO: 561 - DNA, 2016 bp, Artificial Sequence
  Description of Artificial Sequence: Synthetic polynucleotide
atgcaccatcatcaccatcatggtggttctggttcgccgatacttggttattggaagattaaaggactggttcagcccacacgcctcctgctagaatacttagaggaaaaatatgaagagcacctgtacgaacgtgatgagggggacaaatggcgaaacaagaaatttgaattgggcttagaatttccaaatttgccgtattatatcgatggcgacgtaaaactgacccaatcaatggccattattcgctacatcgcagataaacataacatgctgggtggctgccctaaagaacgggctgagatctccatgctggaaggtgcggtgctcgacattcgctacggcgtcagtagaattgcgtatagcaaggatttcgaaactttaaaagtggatttcctgagcaaacttccggagatgctgaaaatgtttgaggataggctttgtcataagacgtatctcaatggtgatcatgttacccacccggactttatgctgtacgacgcccttgatgtcgttctgtatatggatcccatgtgcctggacgccttcccgaaattagtgtgttttaaaaaacgtatcgaagcgattccacagatcgataaatacttgaagtcttctaaatatattgcttggcctctgcaaggctggcaggcaacgttcggtgggggagatcatccgccaaaatcagatctggtgccgcgtgggagccctggcatacaccgcgacggtggttctggtgagaacctgtactttcaaagctcagataatgggcctcaaaaccagcgcaacgctccacgtataaccttcggtggcccgtctgactccacaggcagcaaccagaatggtgagcgtagtggagccaggtctaagcagcgccgtccccagggtctgccgaacaacacggcgagctggtttactgcgcttacccaacacggtaaagaagacttaaaattcccgcgtggccagggcgtcccgatcaacactaactcttccccggatgatcagattggttattaccgcagagcaactcgtcggattcgcggcggcgacggtaaaatgaaagatttgtctccgcgttggtacttttactatctcggcaccggtccggaagctggactgccctacggggcaaacaaggacgggatcatttgggtggctaccgaaggtgccctgaatactccaaaagatcatatcggcacccgtaaccctgctaataacgctgcgatcgttctgcaactgcctcagggtacaactctgccaaaaggcttctatgcagaagggtcgcgtggtggcagccaggcgagtagccgtagcagctcccgctctcgcaactcgtcccgtaactccactccgggctcttctcgcggcacgtccccggctcgtatggcaggtaacggtggtgacgctgctctggcgctgctactgctggacaggctgaaccagctggagtcgaagatgagtggtaaaggccaacagcagcagggccagaccgttaccaaaaagacggcagctgaagcatctaaaaaaccgcgacagaaacgtaccgcgactaaagcgtacaatgtaacacaggccttcggtcgtcgaggtccggagcaaactcaaggaaactttggcgatcaggaattaatccgccaggggaccgactacaaacactggccgcaaattgcccagttcgccccatccgctagtgcattcttcggtatgagccgcatcggcatggaagtaacgccaagtggtacgtggctgacctacaccggtgctatcaagcttgatgacaaggacccgaactttaaagaccaggttattctgcttaacaaacatattgatgcctataaaactttcccgccgaccgaacccaaaaaggacaaaaagaaaaaagctgatgaaacccaggctctaccgcagcgtcagaaaaaacagcaaactgtgactctgctgccagctgcggacctggatgatttttccaagcagctgcaacagtctatgagctctgcggactctacgcaggcttaa

SEQ ID NO: 562 - DNA, 2016 bp, Artificial Sequence
  Description of Artificial Sequence: Synthetic polynucleotide
atgcaccatcatcaccatcatggtggttctggttcgccgatacttggttattggaagattaaaggactggttcagcccacacgcctcctgctagaatacttagaggaaaaatatgaagagcacctgtacgaacgtgatgagggggacaaatggcgaaacaagaaatttgaattgggcttagaatttccaaatttgccgtattatatcgatggcgacgtaaaactgacccaatcaatggccattattcgctacatcgcagataaacataacatgctgggtggctgccctaaagaacgggctgagatctccatgctggaaggtgcggtgctcgacattcgctacggcgtcagtagaattgcgtatagcaaggatttcgaaactttaaaagtggatttcctgagcaaacttccggagatgctgaaaatgtttgaggataggctttgtcataagacgtatctcaatggtgatcatgttacccacccggactttatgctgtacgacgcccttgatgtcgttctgtatatggatcccatgtgcctggacgccttcccgaaattagtgtgttttaaaaaacgtatcgaagcgattccacagatcgataaatacttgaagtcttctaaatatattgcttggcctctgcaaggctggcaggcaacgttcggtgggggagatcatccgccaaaatcagatctggtgccgcgtgggagccctggcatacaccgcgacggtggttctggtgagaacctgtactttcaaagctcagataatgggcctcaaaaccagcgcaacgctccacgtataaccttcggtggcccgtctgactccacaggcagcaaccagaatggtgagcgtagtggagccaggtctaagcagcgccgtccccagggtctgccgaacaacacggcgagctggtttactgcgcttacccaacacggtaaagaagacttaaaattcccgcgtggccagggcgtcccgatcaacactaactctacgccggatgatcagattggttattaccgcagagcaactcgtcggattcgcggcggcgacggtaaaatgaaagatttgtctccgcgttggtacttttactatctcggcaccggtccggaagctggactgccctacggggcaaacaaggacgggatcatttgggtggctaccgaaggtgccctgaatactccaaaagatcatatcggcacccgtaaccctgctaataacgctgcgatcgttctgcaactgcctcagggtacaactctgccaaaaggcttctatgcagaagggtcgcgtggtggcagccaggcgagtagccgtagcagctcccgctctcgcaactcgtcccgtaactccactccgggctcttctcgcggcacgtccccggctcgtatggcaggtaacggtggtgacgctgctctggcgctgctactgctggacaggctgaaccagctggagtcgaagatgagtggtaaaggccaacagcagcagggccagaccgttaccaaaaagagcgcagctgaagcatctaaaaaaccgcgacagaaacgtaccgcgactaaagcgtacaatgtaacacaggccttcggtcgtcgaggtccggagcaaactcaaggaaactttggcgatcaggaattaatccgccaggggaccgactacaaacactggccgcaaattgcccagttcgccccatccgctagtgcattcttcggtatgagccgcatcggcatggaagtaacgccaagtggtacgtggctgacctacaccggtgctatcaagcttgatgacaaggacccgaactttaaagaccaggttattctgcttaacaaacatattgatgcctataaaactttcccgccgaccgaacccaaaaaggacaaaaagaaaaaagctgatgaaacccaggctctaccgcagcgtcagaaaaaacagcaaactgtgactctgctgccagctgcggacctggatgatttttccaagcagctgcaacagtctatgagctctgcggactctacgcaggcttaa

SEQ ID NO: 563 - DNA, 2016 bp, Artificial Sequence
  Description of Artificial Sequence: Synthetic polynucleotide
atgcaccatcatcaccatcatggtggttctggttcgccgatacttggttattggaagattaaaggactggttcagcccacacgcctcctgctagaatacttagaggaaaaatatgaagagcacctgtacgaacgtgatgagggggacaaatggcgaaacaagaaatttgaattgggcttagaatttccaaatttgccgtattatatcgatggcgacgtaaaactgacccaatcaatggccattattcgctacatcgcagataaacataacatgctgggtggctgccctaaagaacgggctgagatctccatgctggaaggtgcggtgctcgacattcgctacggcgtcagtagaattgcgtatagcaaggatttcgaaactttaaaagtggatttcctgagcaaacttccggagatgctgaaaatgtttgaggataggctttgtcataagacgtatctcaatggtgatcatgttacccacccggactttatgctgtacgacgcccttgatgtcgttctgtatatggatcccatgtgcctggacgccttcccgaaattagtgtgttttaaaaaacgtatcgaagcgattccacagatcgataaatacttgaagtcttctaaatatattgcttggcctctgcaaggctggcaggcaacgttcggtgggggagatcatccgccaaaatcagatctggtgccgcgtgggagccctggcatacaccgcgacggtggttctggtgagaacctgtactttcaaagctcagataatgggcctcaaaaccagcgcaacgctccacgtataaccttcggtggcccgtctgactccacaggcagcaaccagaatggtgagcgtagtggagccaggtctaagcagcgccgtccccagggtctgccgaacaacacggcgagctggtttactgcgcttacccaacacggtaaagaagacttaaaattcccgcgtggccagggcgtcccgatcaacactaactcttccccggatgatcagattggttattaccgcagagcaactcgtcggattcgcggcggcgacggtaaaatgaaagatttgtctccgcgttggtacttttactatctcggcaccggtccggaagctggactgccctacggggcaaacaaggacgggatcatttgggtggctaccgaaggtgccctgaatactccaaaagatcatatcggcacccgtaaccctgctaataacgctgcgatcgttctgcaactgcctcagggtacaactctgccaaaaggcttctatgcagaagggtcgcgtggtggcagccaggcgagtagccgtagcagctcccgctctcgcaactcgtcccgtaactccactccgggctcttctcgcggcacgtccccggctcgtatggcaggtaacggtggtgacgctgctctggcgctgctactgctggacaggctgaaccagctggagtcgaagatgagtggtaaaggccaacagcagcagggccagaccgttaccaaaaagagcgcagctgaagcatctaaaaaaccgcgacagaaacgtaccgcgactaaagcgtacaatgtaacacaggccttcggtcgtcgaggtccggagcaaactcaaggaaactttggcgatcaggaattaatccgccaggggaccgactacaaacactggccgcaaattgcccagttcgccccatccgctagtgcattcttcggtatgagccgcatcggcatggaagtaacgccaagtggtacgtggctgacctacaccggtgctatcaagcttgatgacaaggacccgaactttaatgaccaggttattctgcttaacaaacatattgatgcctataaaactttcccgccgaccgaacccaaaaaggacaaaaagaaaaaagctgatgaaacccaggctctaccgcagcgtcagaaaaaacagcaaactgtgactctgctgccagctgcggacctggatgatttttccaagcagctgcaacagtctatgagctctgcggactctacgcaggcttaa

SEQ ID NO: 564 - DNA, 2016 bp, Artificial Sequence
  Description of Artificial Sequence: Synthetic polynucleotide
atgcaccatcatcaccatcatggtggttctggttcgccgatacttggttattggaagattaaaggactggttcagcccacacgcctcctgctagaatacttagaggaaaaatatgaagagcacctgtacgaacgtgatgagggggacaaatggcgaaacaagaaatttgaattgggcttagaatttccaaatttgccgtattatatcgatggcgacgtaaaactgacccaatcaatggccattattcgctacatcgcagataaacataacatgctgggtggctgccctaaagaacgggctgagatctccatgctggaaggtgcggtgctcgacattcgctacggcgtcagtagaattgcgtatagcaaggatttcgaaactttaaaagtggatttcctgagcaaacttccggagatgctgaaaatgtttgaggataggctttgtcataagacgtatctcaatggtgatcatgttacccacccggactttatgctgtacgacgcccttgatgtcgttctgtatatggatcccatgtgcctggacgccttcccgaaattagtgtgttttaaaaaacgtatcgaagcgattccacagatcgataaatacttgaagtcttctaaatatattgcttggcctctgcaaggctggcaggcaacgttcggtgggggagatcatccgccaaaatcagatctggtgccgcgtgggagccctggcatacaccgcgacggtggttctggtgagaacctgtactttcaaagctcagataatgggcctcaaaaccagcgcaacgctccacgtataaccttcggtggcccgtctgactccacaggcagcaaccagaatggtgagcgtagtggagccaggtctaagcagcgccgtccccagggtctgccgaacaacacggcgagctggtttactgcgcttacccaacacggtaaagaagacttaaaattcccgcgtggccagggcgtcccgatcaacactaactcttccccggatgatcagattggttattaccgcagagcaactcgtcggattcgcggcggcgacggtaaaatgaaagatttgtctccgcgttggtacttttactatctcggcaccggtccggaagctggactgccctacggggcaaacaaggacgggatcatttgggtggctaccgaaggtgccctgaatactccaaaagatcatatcggcacccgtaaccctgctaataaagctgcgatcgttctgcaactgcctcagggtacaactctgccaaaaggcttctatgcagaagggtcgcgtggtggcagccaggcgagtagccgtagcagctcccgctctcgcaactcgtcccgtaactccactccgggctcttctcgcggcacgtccccggctcgtatggcaggtaacggtggtgacgctgctctggcgctgctactgctggacaggctgaaccagctggagtcgaagatgagtggtaaaggccaacagcagcagggccagaccgttaccaaaaagagcgcagctgaagcatctaaaaaaccgcgacagaaacgtaccgcgactaaagcgtacaatgtaacacaggccttcggtcgtcgaggtccggagcaaactcaaggaaactttggcgatcaggaattaatccgccaggggaccgactacaaacactggccgcaaattgcccagttcgccccatccgctagtgcattcttcggtatgagccgcatcggcatggaagtaacgccaagtggtacgtggctgacctacaccggtgctatcaagcttgatgacaaggacccgaactttaaagaccaggttattctgcttaacaaacatattgatgcctataaaactttcccgccgaccgaacccaaaaaggacaaaaagaaaaaagctgatgaaacccaggctctaccgcagcgtcagaaaaaacagcaaactgtgactctgctgccagctgcggacctggatgatttttccaagcagctgcaacagtctatgagctctgcggactctacgcaggcttaa

SEQ ID NO: 565 - DNA, 2016 bp, Artificial Sequence
  Description of Artificial Sequence: Synthetic polynucleotide
atgcaccatcatcaccatcatggtggttctggttcgccgatacttggttattggaagattaaaggactggttcagcccacacgcctcctgctagaatacttagaggaaaaatatgaagagcacctgtacgaacgtgatgagggggacaaatggcgaaacaagaaatttgaattgggcttagaatttccaaatttgccgtattatatcgatggcgacgtaaaactgacccaatcaatggccattattcgctacatcgcagataaacataacatgctgggtggctgccctaaagaacgggctgagatctccatgctggaaggtgcggtgctcgacattcgctacggcgtcagtagaattgcgtatagcaaggatttcgaaactttaaaagtggatttcctgagcaaacttccggagatgctgaaaatgtttgaggataggctttgtcataagacgtatctcaatggtgatcatgttacccacccggactttatgctgtacgacgcccttgatgtcgttctgtatatggatcccatgtgcctggacgccttcccgaaattagtgtgttttaaaaaacgtatcgaagcgattccacagatcgataaatacttgaagtcttctaaatatattgcttggcctctgcaaggctggcaggcaacgttcggtgggggagatcatccgccaaaatcagatctggtgccgcgtgggagccctggcatacaccgcgacggtggttctggtgagaacctgtactttcaaagctcagataatgggcctcaaaaccagcgcaacgctccacgtataaccttcggtggcccgtctgactccacaggcagcaaccagaatggtgagcgtagtggagccaggtctaagcagcgccgtccccagggtctgccgaacaacacggcgagctggtttactgcgcttacccaacacggtaaagaagacttaaaattcccgcgtggccagggcgtcccgatcaacactaactcttccccggatgatcagattggttattaccgcagagcaactcgtcggattcgcggcggcgacggtaaaatgaaagatttgtctccgcgttggtacttttactatctcggcaccggtccggaagctggactgccctacggggcaaacaaggacgggatcatttgggtggctaccgaaggtgccctgaatactccaaaagatcatatcggcacccgtaaccctgctaataacgctgcgatcgttctgcaactgcctaatggtacaactctgccaaaaggcttctatgcagaagggtcgcgtggtggcagccaggcgagtagccgtagcagctcccgctctcgcaactcgtcccgtaactccactccgggctcttctcgcggcacgtccccggctcgtatggcaggtaacggtggtgacgctgctctggcgctgctactgctggacaggctgaaccagctggagtcgaagatgagtggtaaaggccaacagcagcagggccagaccgttaccaaaaagagcgcagctgaagcatctaaaaaaccgcgacagaaacgtaccgcgactaaagcgtacaatgtaacacaggccttcggtcgtcgaggtccggagcaaactcaaggaaactttggcgatcaggaattaatccgccaggggaccgactacaaacactggccgcaaattgcccagttcgccccatccgctagtgcattcttcggtatgagccgcatcggcatggaagtaacgccaagtggtacgtggctgacctacaccggtgctatcaagcttgatgacaaggacccgaactttaaagaccaggttattctgcttaacaaacatattgatgcctataaaactttcccgccgaccgaacccaaaaaggacaaaaagaaaaaagctgatgaaacccaggctctaccgcagcgtcagaaaaaacagcaaactgtgactctgctgccagctgcggacctggatgatttttccaagcagctgcaacagtctatgagctctgcggactctacgcaggcttaa

SEQ ID NO: 566 - DNA, 2016 bp, Artificial Sequence
  Description of Artificial Sequence: Synthetic polynucleotide
atgcaccatcatcaccatcatggtggttctggttcgccgatacttggttattggaagattaaaggactggttcagcccacacgcctcctgctagaatacttagaggaaaaatatgaagagcacctgtacgaacgtgatgagggggacaaatggcgaaacaagaaatttgaattgggcttagaatttccaaatttgccgtattatatcgatggcgacgtaaaactgacccaatcaatggccattattcgctacatcgcagataaacataacatgctgggtggctgccctaaagaacgggctgagatctccatgctggaaggtgcggtgctcgacattcgctacggcgtcagtagaattgcgtatagcaaggatttcgaaactttaaaagtggatttcctgagcaaacttccggagatgctgaaaatgtttgaggataggctttgtcataagacgtatctcaatggtgatcatgttacccacccggactttatgctgtacgacgcccttgatgtcgttctgtatatggatcccatgtgcctggacgccttcccgaaattagtgtgttttaaaaaacgtatcgaagcgattccacagatcgataaatacttgaagtcttctaaatatattgcttggcctctgcaaggctggcaggcaacgttcggtgggggagatcatccgccaaaatcagatctggtgccgcgtgggagccctggcatacaccgcgacggtggttctggtgagaacctgtactttcaaagctcagataatgggcctcaaaaccagcgcaacgctccacgtataaccttcggtggcccgtctgactccacaggcagcaaccagaatggtgagcgtagtggagccaggtctaagcagcgccgtccccagggtctgccgaacaacacggcgagctggtttactgcgcttacccaacacggtaaagaagacttaaaattcccgcgtggccagggcgtcccgatcaacactaactcttccccggatgatcagattggttattaccgcagagcaactcgtcggattcgcggcggcgacggtaaaatgaaagatttgtctccgcgttggtacttttactatctcggcaccggtccggaagctggactgccctacggggcaaacaaggacgggatcatttgggtggctaccgaaggtgccctgaatactccaaaagatcatatcggcacccgtaaccctgctaataacgctgcgatcgttctgcaactgcctcagggtacaactctgccaaaaggcttctatgcagaagggtcgcgtggtggcagccaggcgagtagccgtagcagctcccgctctcgcaactcgtcccgtaactccactccgggctcttctcgcggcacgtccccggctcgtatggcaggtaacggtggtgacgctgctctggcgctgctactgctggacaggctgaaccagctggagtcgaagatgagtggtaaaggccaacagcagcagggccagaccgttaccaaaaagagcgcagctgaagcatctaaaaaaccgcgacagaaacgtaccgcgactaaagcgtacaatgtaacacaggccttcggtcgtcgaggtccggagcaaactcaaggaaactttggcgatcaggaattaatccgccaggggaccgactacaaacactggccgcaaattgcccagttcgccccatccgctagtgcattcttcggtatgagccgcatcggcatggaagtaacgccaagtggtacgtggctgacctacaccggtgctatcaagcttgatgacaaggacccgaactttaaaaaacaggttattctgcttaacaaacatattgatgcctataaaactttcccgccgaccgaacccaaaaaggacaaaaagaaaaaagctgatgaaacccaggctctaccgcagcgtcagaaaaaacagcaaactgtgactctgctgccagctgcggacctggatgatttttccaagcagctgcaacagtctatgagctctgcggactctacgcaggcttaa

SEQ ID NO: 567 - DNA, 2016 bp, Artificial Sequence
  Description of Artificial Sequence: Synthetic polynucleotide
atgcaccatcatcaccatcatggtggttctggttcgccgatacttggttattggaagattaaaggactggttcagcccacacgcctcctgctagaatacttagaggaaaaatatgaagagcacctgtacgaacgtgatgagggggacaaatggcgaaacaagaaatttgaattgggcttagaatttccaaatttgccgtattatatcgatggcgacgtaaaactgacccaatcaatggccattattcgctacatcgcagataaacataacatgctgggtggctgccctaaagaacgggctgagatctccatgctggaaggtgcggtgctcgacattcgctacggcgtcagtagaattgcgtatagcaaggatttcgaaactttaaaagtggatttcctgagcaaacttccggagatgctgaaaatgtttgaggataggctttgtcataagacgtatctcaatggtgatcatgttacccacccggactttatgctgtacgacgcccttgatgtcgttctgtatatggatcccatgtgcctggacgccttcccgaaattagtgtgttttaaaaaacgtatcgaagcgattccacagatcgataaatacttgaagtcttctaaatatattgcttggcctctgcaaggctggcaggcaacgttcggtgggggagatcatccgccaaaatcagatctggtgccgcgtgggagccctggcatacaccgcgacggtggttctggtgagaacctgtactttcaaagctcagataatgggcctcaaaaccagcgcaacgctccacgtataaccttcggtggcccgtctgactccacaggcagcaaccagaatggtgagcgtagtggagccaggtctaagcagcgccgtccccagggtctgccgaacaacacggcgagctggtttactgcgcttacccaacacggtaaagaagacttaaaattcccgcgtggccagggcgtcccgatcaacactaactcttccccggatgatcagattggttattaccgcagagcaactcgtcggattcgcggcggcgacggtaaaatgaaagatttgtctccgcgttggtacttttactatctcggcaccggtccggaagctggactgccctacggggcaaacaaggacgggatcatttgggtggctaccgaaggtgccctgaatactccaaaagatcatatcggcacccgtaaccctgctaataacgctgcgatcgttctgcaactgcctcagggtacaactctgccaaaaggcttctatgcagaagggtcgcgtggtggcagccaggcgagtagccgtagcagctcccgctctcgcaactcgtcccgtaactccactccgggctcttctcgcggcacgtccccggctcgtatggcaggtaacggtggtgacgctgctctggcgctgctactgctggacaggctgaaccagctggagtcgaagatgagtggtaaaggccaacagcagcagggccagaccgttaccaaaaagagcgcagctgaagcatctaaaaaaccgcgacagaaacgtaccgcgactaaagcgtacaatgtaacacaggccttcggtcgtcgaggtccggagcaaactcaaggaaactttggcgatcaggaattaatccgccaggggaccgactacaaacactggccgcaaattgcccagttcgccccatccgctcaagcattcttcggtatgagccgcatcggcatggaagtaacgccaagtggtacgtggctgacctacaccggtgctatcaagcttgatgacaaggacccgaactttaaagaccaggttattctgcttaacaaacatattgatgcctataaaactttcccgccgaccgaacccaaaaaggacaaaaagaaaaaagctgatgaaacccaggctctaccgcagcgtcagaaaaaacagcaaactgtgactctgctgccagctgcggacctggatgatttttccaagcagctgcaacagtctatgagctctgcggactctacgcaggcttaa

SEQ ID NO: 568 - DNA, 2016 bp, Artificial Sequence
  Description of Artificial Sequence: Synthetic polynucleotide
atgcaccatcatcaccatcatggtggttctggttcgccgatacttggttattggaagattaaaggactggttcagcccacacgcctcctgctagaatacttagaggaaaaatatgaagagcacctgtacgaacgtgatgagggggacaaatggcgaaacaagaaatttgaattgggcttagaatttccaaatttgccgtattatatcgatggcgacgtaaaactgacccaatcaatggccattattcgctacatcgcagataaacataacatgctgggtggctgccctaaagaacgggctgagatctccatgctggaaggtgcggtgctcgacattcgctacggcgtcagtagaattgcgtatagcaaggatttcgaaactttaaaagtggatttcctgagcaaacttccggagatgctgaaaatgtttgaggataggctttgtcataagacgtatctcaatggtgatcatgttacccacccggactttatgctgtacgacgcccttgatgtcgttctgtatatggatcccatgtgcctggacgccttcccgaaattagtgtgttttaaaaaacgtatcgaagcgattccacagatcgataaatacttgaagtcttctaaatatattgcttggcctctgcaaggctggcaggcaacgttcggtgggggagatcatccgccaaaatcagatctggtgccgcgtgggagccctggcatacaccgcgacggtggttctggtgagaacctgtactttcaaagctcagataatgggcctcaaaaccagcgcaacgctccacgtataaccttcggtggcccgtctgactccacaggcagcaaccagaatggtgagcgtagtggagccaggtctaagcagcgccgtccccagggtctgccgaacaacacggcgagctggtttactgcgcttacccaacacggtaaagaagacttaaaattcccgcgtggccagggcgtcccgatcaacactaactcttccccggatgatcagattggttattaccgcagagcaactcgtcggattcgcggcggcgacggtaaaatgaaagatttgtctccgcgttggtacttttactatctcggcaccggtccggaagctggactgccctacggggcaaacaaggacgggatcatttgggtggctaccgaaggtgccctgaatactccaaaagatcatatcggcacccgtaaccctgctaataacgctgcgatcgttctgcaactgcctcagggtacaactctgccaaaaggcttctatgcagaagggtcgcgtggtggcagccaggcgagtagccgtagcagctcccgctctcgcaactcgtcccgtaactccactccgggctcttctcgcggcacgtccccggctcgtatggcaggtaacggtggtgacgctgctctggcgctgctactgctggacaggctgaaccagctggagtcgaagatgagtggtaaaggccaacagcagcagggccagaccgttaccaaaaagagcgcagctgaagcagcgaaaaaaccgcgacagaaacgtaccgcgactaaagcgtacaatgtaacacaggccttcggtcgtcgaggtccggagcaaactcaaggaaactttggcgatcaggaattaatccgccaggggaccgactacaaacactggccgcaaattgcccagttcgccccatccgctagtgcattcttcggtatgagccgcatcggcatggaagtaacgccaagtggtacgtggctgacctacaccggtgctatcaagcttgatgacaaggacccgaactttaaagaccaggttattctgcttaacaaacatattgatgcctataaaactttcccgccgaccgaacccaaaaaggacaaaaagaaaaaagctgatgaaacccaggctctaccgcagcgtcagaaaaaacagcaaactgtgactctgctgccagctgcggacctggatgatttttccaagcagctgcaacagtctatgagctctgcggactctacgcaggcttaa

SEQ ID NO: 569 - DNA, 2016 bp, Artificial Sequence
  Description of Artificial Sequence: Synthetic polynucleotide
atgcaccatcatcaccatcatggtggttctggttcgccgatacttggttattggaagattaaaggactggttcagcccacacgcctcctgctagaatacttagaggaaaaatatgaagagcacctgtacgaacgtgatgagggggacaaatggcgaaacaagaaatttgaattgggcttagaatttccaaatttgccgtattatatcgatggcgacgtaaaactgacccaatcaatggccattattcgctacatcgcagataaacataacatgctgggtggctgccctaaagaacgggctgagatctccatgctggaaggtgcggtgctcgacattcgctacggcgtcagtagaattgcgtatagcaaggatttcgaaactttaaaagtggatttcctgagcaaacttccggagatgctgaaaatgtttgaggataggctttgtcataagacgtatctcaatggtgatcatgttacccacccggactttatgctgtacgacgcccttgatgtcgttctgtatatggatcccatgtgcctggacgccttcccgaaattagtgtgttttaaaaaacgtatcgaagcgattccacagatcgataaatacttgaagtcttctaaatatattgcttggcctctgcaaggctggcaggcaacgttcggtgggggagatcatccgccaaaatcagatctggtgccgcgtgggagccctggcatacaccgcgacggtggttctggtgagaacctgtactttcaaagctcagataatgggcctcaaaaccagcgcaacgctccacgtataaccttcggtggcccgtctgactccacaggcagcaaccagaatggtgagcgtagtggagccaggtctaagcagcgccgtccccagggtctgccgaacaacacggcgagctggtttactgcgcttacccaacacggtaaagaagacttaaaattcccgcgtggccagggcgtcccgatcaaccaaaactcttccccggatgatcagattggttattaccgcagagcaactcgtcggattcgcggcggcgacggtaaaatgaaagatttgtctccgcgttggtacttttactatctcggcaccggtccggaagctggactgccctacggggcaaacaaggacgggatcatttgggtggctaccgaaggtgccctgaatactccaaaagatcatatcggcacccgtaaccctgctaataacgctgcgatcgttctgcaactgcctcagggtacaactctgccaaaaggcttctatgcagaagggtcgcgtggtggcagccaggcgagtagccgtagcagctcccgctctcgcaactcgtcccgtaactccactccgggctcttctcgcggcacgtccccggctcgtatggcaggtaacggtggtgacgctgctctggcgctgctactgctggacaggctgaaccagctggagtcgaagatgagtggtaaaggccaacagcagcagggccagaccgttaccaaaaagagcgcagctgaagcatctaaaaaaccgcgacagaaacgtaccgcgactaaagcgtacaatgtaacacaggccttcggtcgtcgaggtccggagcaaactcaaggaaactttggcgatcaggaattaatccgccaggggaccgactacaaacactggccgcaaattgcccagttcgccccatccgctagtgcattcttcggtatgagccgcatcggcatggaagtaacgccaagtggtacgtggctgacctacaccggtgctatcaagcttgatgacaaggacccgaactttaaagaccaggttattctgcttaacaaacatattgatgcctataaaactttcccgccgaccgaacccaaaaaggacaaaaagaaaaaagctgatgaaacccaggctctaccgcagcgtcagaaaaaacagcaaactgtgactctgctgccagctgcggacctggatgatttttccaagcagctgcaacagtctatgagctctgcggactctacgcaggcttaa

SEQ ID NO: 570 - DNA, 2016 bp, Artificial Sequence
  Description of Artificial Sequence: Synthetic polynucleotide
atgcaccatcatcaccatcatggtggttctggttcgccgatacttggttattggaagattaaaggactggttcagcccacacgcctcctgctagaatacttagaggaaaaatatgaagagcacctgtacgaacgtgatgagggggacaaatggcgaaacaagaaatttgaattgggcttagaatttccaaatttgccgtattatatcgatggcgacgtaaaactgacccaatcaatggccattattcgctacatcgcagataaacataacatgctgggtggctgccctaaagaacgggctgagatctccatgctggaaggtgcggtgctcgacattcgctacggcgtcagtagaattgcgtatagcaaggatttcgaaactttaaaagtggatttcctgagcaaacttccggagatgctgaaaatgtttgaggataggctttgtcataagacgtatctcaatggtgatcatgttacccacccggactttatgctgtacgacgcccttgatgtcgttctgtatatggatcccatgtgcctggacgccttcccgaaattagtgtgttttaaaaaacgtatcgaagcgattccacagatcgataaatacttgaagtcttctaaatatattgcttggcctctgcaaggctggcaggcaacgttcggtgggggagatcatccgccaaaatcagatctggtgccgcgtgggagccctggcatacaccgcgacggtggttctggtgagaacctgtactttcaaagctcagataatgggcctcaaaaccagcgcaacgctccacgtataaccttcggtggcccgtctgactccacaggcagcaaccagaatggtgagcgtagtggagccaggtctaagcagcgccgtccccagggtctgccgaacaacacggcgagctggtttactgcgcttacccaacacggtaaacaagacttaaaattcccgcgtggccagggcgtcccgatcaacactaactcttccccggatgatcagattggttattaccgcagagcaactcgtcggattcgcggcggcgacggtaaaatgaaagatttgtctccgcgttggtacttttactatctcggcaccggtccggaagctggactgccctacggggcaaacaaggacgggatcatttgggtggctaccgaaggtgccctgaatactccaaaagatcatatcggcacccgtaaccctgctaataacgctgcgatcgttctgcaactgcctcagggtacaactctgccaaaaggcttctatgcagaagggtcgcgtggtggcagccaggcgagtagccgtagcagctcccgctctcgcaactcgtcccgtaactccactccgggctcttctcgcggcacgtccccggctcgtatggcaggtaacggtggtgacgctgctctggcgctgctactgctggacaggctgaaccagctggagtcgaagatgagtggtaaaggccaacagcagcagggccagaccgttaccaaaaagagcgcagctgaagcatctaaaaaaccgcgacagaaacgtaccgcgactaaagcgtacaatgtaacacaggccttcggtcgtcgaggtccggagcaaactcaaggaaactttggcgatcaggaattaatccgccaggggaccgactacaaacactggccgcaaattgcccagttcgccccatccgctagtgcattcttcggtatgagccgcatcggcatggaagtaacgccaagtggtacgtggctgacctacaccggtgctatcaagcttgatgacaaggacccgaactttaaagaccaggttattctgcttaacaaacatattgatgcctataaaactttcccgccgaccgaacccaaaaaggacaaaaagaaaaaagctgatgaaacccaggctctaccgcagcgtcagaaaaaacagcaaactgtgactctgctgccagctgcggacctggatgatttttccaagcagctgcaacagtctatgagctctgcggactctacgcaggcttaa

SEQ ID NO: 571 - DNA, 2016 bp, Artificial Sequence
  Description of Artificial Sequence: Synthetic polynucleotide
atgcaccatcatcaccatcatggtggttctggttcgccgatacttggttattggaagattaaaggactggttcagcccacacgcctcctgctagaatacttagaggaaaaatatgaagagcacctgtacgaacgtgatgagggggacaaatggcgaaacaagaaatttgaattgggcttagaatttccaaatttgccgtattatatcgatggcgacgtaaaactgacccaatcaatggccattattcgctacatcgcagataaacataacatgctgggtggctgccctaaagaacgggctgagatctccatgctggaaggtgcggtgctcgacattcgctacggcgtcagtagaattgcgtatagcaaggatttcgaaactttaaaagtggatttcctgagcaaacttccggagatgctgaaaatgtttgaggataggctttgtcataagacgtatctcaatggtgatcatgttacccacccggactttatgctgtacgacgcccttgatgtcgttctgtatatggatcccatgtgcctggacgccttcccgaaattagtgtgttttaaaaaacgtatcgaagcgattccacagatcgataaatacttgaagtcttctaaatatattgcttggcctctgcaaggctggcaggcaacgttcggtgggggagatcatccgccaaaatcagatctggtgccgcgtgggagccctggcatacaccgcgacggtggttctggtgagaacctgtactttcaaagctcagataatgggcctcaaaaccagcgcaacgctccacgtataaccttcggtggcccgtctgactccacaggcagcaaccagaatggtgagcgtagtggagccaggtctaagcagcgccgtccccagggtctgccgaacaacacggcgagctggtttactgcgcttacccaacacggtaaagaagacttaaaattcccgcgtggccagggcgtcccgatcaacactaactcttccccggatgatcagattggttattaccgcagagcaactcgtcggattcgcggcggcgacggtaaaatgaaagatttgtctccgcgttggtacttttactatctcggcaccggtccggaagctggactgccctacggggcaaacaaggacgggatcatttgggtggctaccgaaggtgccctgaatactccaaaagatcatatcggcacccgtaaccctgctaataacgctgcgatcgttctgcaactgcctcagggtacaactctgccaaaaggcttctatgcagaagggtcgcgtggtggcagccaggcgagtagccgtagcagctcccgctctcgcaactcgtcccgtaactccactccgggctcttctcgcggcacgtccccggctcgtatggcaggtaacggtggtgacgctgctctggcgctgctactgctggacaggctgaaccagctggagtcgaagatgagtggtaaaggccaacagcagcagggccagaccgttaccaaaaagaatgcagctgaagcatctaaaaaaccgcgacagaaacgtaccgcgactaaagcgtacaatgtaacacaggccttcggtcgtcgaggtccggagcaaactcaaggaaactttggcgatcaggaattaatccgccaggggaccgactacaaacactggccgcaaattgcccagttcgccccatccgctagtgcattcttcggtatgagccgcatcggcatggaagtaacgccaagtggtacgtggctgacctacaccggtgctatcaagcttgatgacaaggacccgaactttaaagaccaggttattctgcttaacaaacatattgatgcctataaaactttcccgccgaccgaacccaaaaaggacaaaaagaaaaaagctgatgaaacccaggctctaccgcagcgtcagaaaaaacagcaaactgtgactctgctgccagctgcggacctggatgatttttccaagcagctgcaacagtctatgagctctgcggactctacgcaggcttaa

SEQ ID NO: 572 - DNA, 2016 bp, Artificial Sequence
  Description of Artificial Sequence: Synthetic polynucleotide
atgcaccatcatcaccatcatggtggttctggttcgccgatacttggttattggaagattaaaggactggttcagcccacacgcctcctgctagaatacttagaggaaaaatatgaagagcacctgtacgaacgtgatgagggggacaaatggcgaaacaagaaatttgaattgggcttagaatttccaaatttgccgtattatatcgatggcgacgtaaaactgacccaatcaatggccattattcgctacatcgcagataaacataacatgctgggtggctgccctaaagaacgggctgagatctccatgctggaaggtgcggtgctcgacattcgctacggcgtcagtagaattgcgtatagcaaggatttcgaaactttaaaagtggatttcctgagcaaacttccggagatgctgaaaatgtttgaggataggctttgtcataagacgtatctcaatggtgatcatgttacccacccggactttatgctgtacgacgcccttgatgtcgttctgtatatggatcccatgtgcctggacgccttcccgaaattagtgtgttttaaaaaacgtatcgaagcgattccacagatcgataaatacttgaagtcttctaaatatattgcttggcctctgcaaggctggcaggcaacgttcggtgggggagatcatccgccaaaatcagatctggtgccgcgtgggagccctggcatacaccgcgacggtggttctggtgagaacctgtactttcaaagctcagataatgggcctcaaaaccagcgcaacgctccacgtataaccttcggtggcccgtctgactccacaggcagcaaccagaatggtgagcgtagtggagccaggtctaagcagcgccgtccccagggtctgccgaacaacacggcgagctggtttactgcgcttacccaacacggtaaagaagacttaaaattcccgcgtggccagggcgtcccgatcaacactaactctaatccggatgatcagattggttattaccgcagagcaactcgtcggattcgcggcggcgacggtaaaatgaaagatttgtctccgcgttggtacttttactatctcggcaccggtccggaagctggactgccctacggggcaaacaaggacgggatcatttgggtggctaccgaaggtgccctgaatactccaaaagatcatatcggcacccgtaaccctgctaataacgctgcgatcgttctgcaactgcctcagggtacaactctgccaaaaggcttctatgcagaagggtcgcgtggtggcagccaggcgagtagccgtagcagctcccgctctcgcaactcgtcccgtaactccactccgggctcttctcgcggcacgtccccggctcgtatggcaggtaacggtggtgacgctgctctggcgctgctactgctggacaggctgaaccagctggagtcgaagatgagtggtaaaggccaacagcagcagggccagaccgttaccaaaaagagcgcagctgaagcatctaaaaaaccgcgacagaaacgtaccgcgactaaagcgtacaatgtaacacaggccttcggtcgtcgaggtccggagcaaactcaaggaaactttggcgatcaggaattaatccgccaggggaccgactacaaacactggccgcaaattgcccagttcgccccatccgctagtgcattcttcggtatgagccgcatcggcatggaagtaacgccaagtggtacgtggctgacctacaccggtgctatcaagcttgatgacaaggacccgaactttaaagaccaggttattctgcttaacaaacatattgatgcctataaaactttcccgccgaccgaacccaaaaaggacaaaaagaaaaaagctgatgaaacccaggctctaccgcagcgtcagaaaaaacagcaaactgtgactctgctgccagctgcggacctggatgatttttccaagcagctgcaacagtctatgagctctgcggactctacgcaggcttaa

SEQ ID NO: 573 - DNA, 2016 bp, Artificial Sequence
  Description of Artificial Sequence: Synthetic polynucleotide
atgcaccatcatcaccatcatggtggttctggttcgccgatacttggttattggaagattaaaggactggttcagcccacacgcctcctgctagaatacttagaggaaaaatatgaagagcacctgtacgaacgtgatgagggggacaaatggcgaaacaagaaatttgaattgggcttagaatttccaaatttgccgtattatatcgatggcgacgtaaaactgacccaatcaatggccattattcgctacatcgcagataaacataacatgctgggtggctgccctaaagaacgggctgagatctccatgctggaaggtgcggtgctcgacattcgctacggcgtcagtagaattgcgtatagcaaggatttcgaaactttaaaagtggatttcctgagcaaacttccggagatgctgaaaatgtttgaggataggctttgtcataagacgtatctcaatggtgatcatgttacccacccggactttatgctgtacgacgcccttgatgtcgttctgtatatggatcccatgtgcctggacgccttcccgaaattagtgtgttttaaaaaacgtatcgaagcgattccacagatcgataaatacttgaagtcttctaaatatattgcttggcctctgcaaggctggcaggcaacgttcggtgggggagatcatccgccaaaatcagatctggtgccgcgtgggagccctggcatacaccgcgacggtggttctggtgagaacctgtactttcaaagctcagataatgggcctcaaaaccagcgcaacgctccacgtataaccttcggtggcccgtctgactccacaggcagcaaccagaatggtgagcgtagtggagccaggtctaagcagcgccgtccccagggtctgccgaacaacacggcgagctggtttactgcgcttacccaacacggtaaagaagacttaaaattcccgcgtggccagggcgtcccgatcaacactaactcttccccggatgatcagattggttattaccgcagagcaactcgtcggattcgcggcggcgacggtaaaatgaaagatttgtctccgcgttggtacttttactatctcggcaccggtccggaagctggactgccctacggggcaaacaaggacgggatcatttgggtggctaccgaaggtgccctgaatactccaaaagatcatatcggcacccgtaaccctgctaataacgctgcgatcgttctgcaactgcctcagggtacaactctgccaaaaggcttctatgcagaagggtcgcgtggtggcagccaggcgagtagccgtagcagctcccgctctcgcaactcgtcccgtaactccactccgggctcttctcgcggcacgtccccggctcgtatggcaggtaacggtggtgacgctgctctggcgctgctactgctggacaggctgaaccagctggagtcgaagatgagtggtaaaggccaacagcagcagggccagaccgttaccaaaaagagcgcagctgaagcatctaaaaaaccgcgacagaaacgtaccgcgactaaagcgtacaatgtaacacaggccttcggtcgtcgaggtccggagcaaactcaaggaaactttggcgatcaggaattaatccgccaggggaccgactacaaacactggccgcaaattgcccagttcgccccatccgctagtgcattcttcggtatgagccgcatcggcatggaagtaacgccaagtggtacgtggctgacctacaccggtgctatcacgcttgatgacaaggacccgaactttaaagaccaggttattctgcttaacaaacatattgatgcctataaaactttcccgccgaccgaacccaaaaaggacaaaaagaaaaaagctgatgaaacccaggctctaccgcagcgtcagaaaaaacagcaaactgtgactctgctgccagctgcggacctggatgatttttccaagcagctgcaacagtctatgagctctgcggactctacgcaggcttaa

SEQ ID NO: 574 - DNA, 2016 bp, Artificial Sequence
  Description of Artificial Sequence: Synthetic polynucleotide
atgcaccatcatcaccatcatggtggttctggttcgccgatacttggttattggaagattaaaggactggttcagcccacacgcctcctgctagaatacttagaggaaaaatatgaagagcacctgtacgaacgtgatgagggggacaaatggcgaaacaagaaatttgaattgggcttagaatttccaaatttgccgtattatatcgatggcgacgtaaaactgacccaatcaatggccattattcgctacatcgcagataaacataacatgctgggtggctgccctaaagaacgggctgagatctccatgctggaaggtgcggtgctcgacattcgctacggcgtcagtagaattgcgtatagcaaggatttcgaaactttaaaagtggatttcctgagcaaacttccggagatgctgaaaatgtttgaggataggctttgtcataagacgtatctcaatggtgatcatgttacccacccggactttatgctgtacgacgcccttgatgtcgttctgtatatggatcccatgtgcctggacgccttcccgaaattagtgtgttttaaaaaacgtatcgaagcgattccacagatcgataaatacttgaagtcttctaaatatattgcttggcctctgcaaggctggcaggcaacgttcggtgggggagatcatccgccaaaatcagatctggtgccgcgtgggagccctggcatacaccgcgacggtggttctggtgagaacctgtactttcaaagctcagataatgggcctcaaaaccagcgcaacgctccacgtataaccttcggtggcccgtctgactccacaggcagcaaccagaatggtgagcgtagtggagccaggtctaagcagcgccgtccccagggtctgccgaacaacacggcgagctggtttactgcgcttacccaacacggtaaagaagacttaaaattcccgcgtggccagggcgtcccgatcaacactaactcttccccggatgatcagattggttattaccgcagagcaactcgtcggattcgcggcggcgacggtaaaatgaaagatttgtctccgcgttggtacttttactatctcggcaccggtccggaagctggactgccctacggggcaaacaaggacgggatcatttgggtggctaccgaaggtgccctgaatactccaaaagatcatatcggcacccgtaaccctgctaataacgctgcgatcgttctgcaactgcctcagggtacaactctgccaaaaggcttctatgcagaagggtcgcgtggtggcagccaggcgagtagccgtagcagctcccgctctcgcaactcgtcccgtaactccactccgggctcttctcgcggcacgtccccggctcgtatggcaggtaacggtggtgacgctgctctggcgctgctactgctggacaggctgaaccagctggagtcgaagatgagtggtaaaggccaacagcagcagggccagaccgttaccaaaaagagcgcagctgaagcatctaaaaaaccgcgacagaaacgtaccgcgactaaagcgtacaatgtaacacaggccttcggtcgtcgaggtccggagcaaactcaaggaaactttggcgatcaggaattaatccgccaggggaccgactacaaacactggccgcaaattgcccagttcgccccatccgctagtgcattcttcggtatgagccgcatcggcatggaagtaacgccaagtggtacgtggctgacctacaccggtgctatcaagcttgatgacacggacccgaactttaaagaccaggttattctgcttaacaaacatattgatgcctataaaactttcccgccgaccgaacccaaaaaggacaaaaagaaaaaagctgatgaaacccaggctctaccgcagcgtcagaaaaaacagcaaactgtgactctgctgccagctgcggacctggatgatttttccaagcagctgcaacagtctatgagctctgcggactctacgcaggcttaa

SEQ ID NO: 575 - DNA, 2016 bp, Artificial Sequence
  Description of Artificial Sequence: Synthetic polynucleotide
atgcaccatcatcaccatcatggtggttctggttcgccgatacttggttattggaagattaaaggactggttcagcccacacgcctcctgctagaatacttagaggaaaaatatgaagagcacctgtacgaacgtgatgagggggacaaatggcgaaacaagaaatttgaattgggcttagaatttccaaatttgccgtattatatcgatggcgacgtaaaactgacccaatcaatggccattattcgctacatcgcagataaacataacatgctgggtggctgccctaaagaacgggctgagatctccatgctggaaggtgcggtgctcgacattcgctacggcgtcagtagaattgcgtatagcaaggatttcgaaactttaaaagtggatttcctgagcaaacttccggagatgctgaaaatgtttgaggataggctttgtcataagacgtatctcaatggtgatcatgttacccacccggactttatgctgtacgacgcccttgatgtcgttctgtatatggatcccatgtgcctggacgccttcccgaaattagtgtgttttaaaaaacgtatcgaagcgattccacagatcgataaatacttgaagtcttctaaatatattgcttggcctctgcaaggctggcaggcaacgttcggtgggggagatcatccgccaaaatcagatctggtgccgcgtgggagccctggcatacaccgcgacggtggttctggtgagaacctgtactttcaaagctcagataatgggcctcaaaaccagcgcaacgctccacgtataaccttcggtggcccgtctgactccacaggcagcaaccagaatggtgagcgtagtggagccaggtctaagcagcgccgtccccagggtctgccgaacaacacggcgagctggtttactgcgcttacccaacacggtaaagaagacttaaaattcccgcgtggccagggcgtcccgatcaacactaactcttccccggatgatcagattggttattaccgcagagcaactcgtcggattcgcggcggcgacggtaaaatgaaagatttgtctccgcgttggtacttttactatctcggcaccggtccggaagctggactgccctacggggcaaacaaggacgggatcatttgggtggctaccgaaggtgccctgaatactccaaaagatcatatcggcacccgtaaccctgctaataacgctgcgatcgttctgcaactgcctcagggtacaactctgccaaaaggcttctatgcagaagggtcgcgtggtggcagccaggcgagtagccgtagcagctcccgctctcgcaactcgtcccgtaactccactccgggctcttctcgcggcacgtccccggctcgtatggcaggtaacggtggtgacgctgctctggcgctgctactgctggacaggctgaaccagctggagtcgaagatgagtggtaaaggccaacagcagcagggccagaccgttaccaaaaagagcgcagctgaagcatctaaaaaaccgcgacagaaacgtaccgcgactaaagcgtacaatgtaacacaggccttcggtgagcgaggtccggagcaaactcaaggaaactttggcgatcaggaattaatccgccaggggaccgactacaaacactggccgcaaattgcccagttcgccccatccgctagtgcattcttcggtatgagccgcatcggcatggaagtaacgccaagtggtacgtggctgacctacaccggtgctatcaagcttgatgacaaggacccgaactttaaagaccaggttattctgcttaacaaacatattgatgcctataaaactttcccgccgaccgaacccaaaaaggacaaaaagaaaaaagctgatgaaacccaggctctaccgcagcgtcagaaaaaacagcaaactgtgactctgctgccagctgcggacctggatgatttttccaagcagctgcaacagtctatgagctctgcggactctacgcaggcttaa

SEQ ID NO: 576 - DNA, 2016 bp, Artificial Sequence
  Description of Artificial Sequence: Synthetic polynucleotide
atgcaccatcatcaccatcatggtggttctggttcgccgatacttggttattggaagattaaaggactggttcagcccacacgcctcctgctagaatacttagaggaaaaatatgaagagcacctgtacgaacgtgatgagggggacaaatggcgaaacaagaaatttgaattgggcttagaatttccaaatttgccgtattatatcgatggcgacgtaaaactgacccaatcaatggccattattcgctacatcgcagataaacataacatgctgggtggctgccctaaagaacgggctgagatctccatgctggaaggtgcggtgctcgacattcgctacggcgtcagtagaattgcgtatagcaaggatttcgaaactttaaaagtggatttcctgagcaaacttccggagatgctgaaaatgtttgaggataggctttgtcataagacgtatctcaatggtgatcatgttacccacccggactttatgctgtacgacgcccttgatgtcgttctgtatatggatcccatgtgcctggacgccttcccgaaattagtgtgttttaaaaaacgtatcgaagcgattccacagatcgataaatacttgaagtcttctaaatatattgcttggcctctgcaaggctggcaggcaacgttcggtgggggagatcatccgccaaaatcagatctggtgccgcgtgggagccctggcatacaccgcgacggtggttctggtgagaacctgtactttcaaagctcagataatgggcctcaaaaccagcgcaacgctccacgtataaccttcggtggcccgtctgactccacaggcagcaaccagaatggtgagcgtagtggagccaggtctaagcagcgccgtccccagggtctgccgaacaacacggcgagctggtttactgcgcttacccaacacggtaaagaagacttaaaattcccgcgtggccagggcgtcccgatcaacactaactcttccccggatgatcagattggttattaccgcagagcaactcgtcggattcgcggcggcgacggtaaaatgaaagatttgtctccgcgttggtacttttactatctcggcaccggtccggaagctggactgccctacggggcaaacaaggacgggatcatttgggtggctaccgaaggtgccctgaatactccaaaagatcatatcggcacccgtaaccctgctaataacgctgcgatcgttctgcaactgcctcagggtacaggcctgccaaaaggcttctatgcagaagggtcgcgtggtggcagccaggcgagtagccgtagcagctcccgctctcgcaactcgtcccgtaactccactccgggctcttctcgcggcacgtccccggctcgtatggcaggtaacggtggtgacgctgctctggcgctgctactgctggacaggctgaaccagctggagtcgaagatgagtggtaaaggccaacagcagcagggccagaccgttaccaaaaagagcgcagctgaagcatctaaaaaaccgcgacagaaacgtaccgcgactaaagcgtacaatgtaacacaggccttcggtcgtcgaggtccggagcaaactcaaggaaactttggcgatcaggaattaatccgccaggggaccgactacaaacactggccgcaaattgcccagttcgccccatccgctagtgcattcttcggtatgagccgcatcggcatggaagtaacgccaagtggtacgtggctgacctacaccggtgctatcaagcttgatgacaaggacccgaactttaaagaccaggttattctgcttaacaaacatattgatgcctataaaactttcccgccgaccgaacccaaaaaggacaaaaagaaaaaagctgatgaaacccaggctctaccgcagcgtcagaaaaaacagcaaactgtgactctgctgccagctgcggacctggatgatttttccaagcagctgcaacagtctatgagctctgcggactctacgcaggcttaa

SEQ ID NO: 577 - DNA, 2016 bp, Artificial Sequence
  Description of Artificial Sequence: Synthetic polynucleotide
atgcaccatcatcaccatcatggtggttctggttcgccgatacttggttattggaagattaaaggactggttcagcccacacgcctcctgctagaatacttagaggaaaaatatgaagagcacctgtacgaacgtgatgagggggacaaatggcgaaacaagaaatttgaattgggcttagaatttccaaatttgccgtattatatcgatggcgacgtaaaactgacccaatcaatggccattattcgctacatcgcagataaacataacatgctgggtggctgccctaaagaacgggctgagatctccatgctggaaggtgcggtgctcgacattcgctacggcgtcagtagaattgcgtatagcaaggatttcgaaactttaaaagtggatttcctgagcaaacttccggagatgctgaaaatgtttgaggataggctttgtcataagacgtatctcaatggtgatcatgttacccacccggactttatgctgtacgacgcccttgatgtcgttctgtatatggatcccatgtgcctggacgccttcccgaaattagtgtgttttaaaaaacgtatcgaagcgattccacagatcgataaatacttgaagtcttctaaatatattgcttggcctctgcaaggctggcaggcaacgttcggtgggggagatcatccgccaaaatcagatctggtgccgcgtgggagccctggcatacaccgcgacggtggttctggtgagaacctgtactttcaaagctcagataatgggcctcaaaaccagcgcaacgctccacgtataaccttcggtggcccgtctgactccacaggcagcaaccagaatggtgagcgtagtggagccaggtctaagcagcgccgtccccagggtctgccgaacaacacggcgagctggtttactgcgcttacccaacacggtaaagaagacttaaaattcccgcgtggccagggcgtcccgatcaacactaactcttccccggatgatcagattggttattaccgcagagcaactcgtcggattcgcggcggcgacggtaaaatgaaagatttgtctccgcgttggtacttttactatctcggcaccggtccggaagctggactgccctacggggcaaacaaggacgggatcatttgggtggctaccgaaggtgccctgaatactccaaaagatcatatcggcacccgtaaccctgctaataacgctgcgatcgttctgcaactgcctcagggtacatggctgccaaaaggcttctatgcagaagggtcgcgtggtggcagccaggcgagtagccgtagcagctcccgctctcgcaactcgtcccgtaactccactccgggctcttctcgcggcacgtccccggctcgtatggcaggtaacggtggtgacgctgctctggcgctgctactgctggacaggctgaaccagctggagtcgaagatgagtggtaaaggccaacagcagcagggccagaccgttaccaaaaagagcgcagctgaagcatctaaaaaaccgcgacagaaacgtaccgcgactaaagcgtacaatgtaacacaggccttcggtcgtcgaggtccggagcaaactcaaggaaactttggcgatcaggaattaatccgccaggggaccgactacaaacactggccgcaaattgcccagttcgccccatccgctagtgcattcttcggtatgagccgcatcggcatggaagtaacgccaagtggtacgtggctgacctacaccggtgctatcaagcttgatgacaaggacccgaactttaaagaccaggttattctgcttaacaaacatattgatgcctataaaactttcccgccgaccgaacccaaaaaggacaaaaagaaaaaagctgatgaaacccaggctctaccgcagcgtcagaaaaaacagcaaactgtgactctgctgccagctgcggacctggatgatttttccaagcagctgcaacagtctatgagctctgcggactctacgcaggcttaa

SEQ ID NO: 578 - DNA, 2016 bp, Artificial Sequence
  Description of Artificial Sequence: Synthetic polynucleotide
atgcaccatcatcaccatcatggtggttctggttcgccgatacttggttattggaagattaaaggactggttcagcccacacgcctcctgctagaatacttagaggaaaaatatgaagagcacctgtacgaacgtgatgagggggacaaatggcgaaacaagaaatttgaattgggcttagaatttccaaatttgccgtattatatcgatggcgacgtaaaactgacccaatcaatggccattattcgctacatcgcagataaacataacatgctgggtggctgccctaaagaacgggctgagatctccatgctggaaggtgcggtgctcgacattcgctacggcgtcagtagaattgcgtatagcaaggatttcgaaactttaaaagtggatttcctgagcaaacttccggagatgctgaaaatgtttgaggataggctttgtcataagacgtatctcaatggtgatcatgttacccacccggactttatgctgtacgacgcccttgatgtcgttctgtatatggatcccatgtgcctggacgccttcccgaaattagtgtgttttaaaaaacgtatcgaagcgattccacagatcgataaatacttgaagtcttctaaatatattgcttggcctctgcaaggctggcaggcaacgttcggtgggggagatcatccgccaaaatcagatctggtgccgcgtgggagccctggcatacaccgcgacggtggttctggtgagaacctgtactttcaaagctcagataatgggcctcaaaaccagcgcaacgctccacgtataaccttcggtggcccgtctgactccacaggcagcaaccagaatggtgagcgtagtggagccaggtctaagcagcgccgtccccagggtctgccgaacaacacggcgagctggtttactgcgcttacccaacacggtaaagaagacttaaaattcccgcgtggccagggcgtcccgatcaacactaactcttccccggatgatcagattggttattaccgcagagcaactcgtcggattcgcggcggcgacggtaaaatgaaagatttgtctccgcgttggtacttttactatctcggcaccggtccggaagctggactgccctacggggcaaacaaggacgggatcatttgggtggctcatgaaggtgccctgaatactccaaaagatcatatcggcacccgtaaccctgctaataacgctgcgatcgttctgcaactgcctcagggtacaactctgccaaaaggcttctatgcagaagggtcgcgtggtggcagccaggcgagtagccgtagcagctcccgctctcgcaactcgtcccgtaactccactccgggctcttctcgcggcacgtccccggctcgtatggcaggtaacggtggtgacgctgctctggcgctgctactgctggacaggctgaaccagctggagtcgaagatgagtggtaaaggccaacagcagcagggccagaccgttaccaaaaagagcgcagctgaagcatctaaaaaaccgcgacagaaacgtaccgcgactaaagcgtacaatgtaacacaggccttcggtcgtcgaggtccggagcaaactcaaggaaactttggcgatcaggaattaatccgccaggggaccgactacaaacactggccgcaaattgcccagttcgccccatccgctagtgcattcttcggtatgagccgcatcggcatggaagtaacgccaagtggtacgtggctgacctacaccggtgctatcaagcttgatgacaaggacccgaactttaaagaccaggttattctgcttaacaaacatattgatgcctataaaactttcccgccgaccgaacccaaaaaggacaaaaagaaaaaagctgatgaaacccaggctctaccgcagcgtcagaaaaaacagcaaactgtgactctgctgccagctgcggacctggatgatttttccaagcagctgcaacagtctatgagctctgcggactctacgcaggcttaa

SEQ ID NO: 579 - DNA, 2016 bp, Artificial Sequence
  Description of Artificial Sequence: Synthetic polynucleotide
atgcaccatcatcaccatcatggtggttctggttcgccgatacttggttattggaagattaaaggactggttcagcccacacgcctcctgctagaatacttagaggaaaaatatgaagagcacctgtacgaacgtgatgagggggacaaatggcgaaacaagaaatttgaattgggcttagaatttccaaatttgccgtattatatcgatggcgacgtaaaactgacccaatcaatggccattattcgctacatcgcagataaacataacatgctgggtggctgccctaaagaacgggctgagatctccatgctggaaggtgcggtgctcgacattcgctacggcgtcagtagaattgcgtatagcaaggatttcgaaactttaaaagtggatttcctgagcaaacttccggagatgctgaaaatgtttgaggataggctttgtcataagacgtatctcaatggtgatcatgttacccacccggactttatgctgtacgacgcccttgatgtcgttctgtatatggatcccatgtgcctggacgccttcccgaaattagtgtgttttaaaaaacgtatcgaagcgattccacagatcgataaatacttgaagtcttctaaatatattgcttggcctctgcaaggctggcaggcaacgttcggtgggggagatcatccgccaaaatcagatctggtgccgcgtgggagccctggcatacaccgcgacggtggttctggtgagaacctgtactttcaaagctcagataatgggcctcaaaaccagcgcaacgctccacgtataaccttcggtggcccgtctgactccacaggcagcaaccagaatggtgagcgtagtggagccaggtctaagcagcgccgtccccagggtctgccgaacaacacggcgagctggtttactgcgcttacccaacacggtaaagaagacttaaaattcccgcgtggccagggcgtcccgatcaacactaactcttccccggatgatcagattggttattaccgcagagcaactcgtcggattcgcggcggcgacggtaaaatgaaagatttgtctccgcgttggtacttttactatctcggcaccggtccggaagctggactgccctacggggcaaacaaggacgggatcatttgggtggctaccgaaggtgccgataatactccaaaagatcatatcggcacccgtaaccctgctaataacgctgcgatcgttctgcaactgcctcagggtacaactctgccaaaaggcttctatgcagaagggtcgcgtggtggcagccaggcgagtagccgtagcagctcccgctctcgcaactcgtcccgtaactccactccgggctcttctcgcggcacgtccccggctcgtatggcaggtaacggtggtgacgctgctctggcgctgctactgctggacaggctgaaccagctggagtcgaagatgagtggtaaaggccaacagcagcagggccagaccgttaccaaaaagagcgcagctgaagcatctaaaaaaccgcgacagaaacgtaccgcgactaaagcgtacaatgtaacacaggccttcggtcgtcgaggtccggagcaaactcaaggaaactttggcgatcaggaattaatccgccaggggaccgactacaaacactggccgcaaattgcccagttcgccccatccgctagtgcattcttcggtatgagccgcatcggcatggaagtaacgccaagtggtacgtggctgacctacaccggtgctatcaagcttgatgacaaggacccgaactttaaagaccaggttattctgcttaacaaacatattgatgcctataaaactttcccgccgaccgaacccaaaaaggacaaaaagaaaaaagctgatgaaacccaggctctaccgcagcgtcagaaaaaacagcaaactgtgactctgctgccagctgcggacctggatgatttttccaagcagctgcaacagtctatgagctctgcggactctacgcaggcttaa

SEQ ID NO: 580 - DNA, 2016 bp, Artificial Sequence
  Description of Artificial Sequence: Synthetic polynucleotide
atgcaccatcatcaccatcatggtggttctggttcgccgatacttggttattggaagattaaaggactggttcagcccacacgcctcctgctagaatacttagaggaaaaatatgaagagcacctgtacgaacgtgatgagggggacaaatggcgaaacaagaaatttgaattgggcttagaatttccaaatttgccgtattatatcgatggcgacgtaaaactgacccaatcaatggccattattcgctacatcgcagataaacataacatgctgggtggctgccctaaagaacgggctgagatctccatgctggaaggtgcggtgctcgacattcgctacggcgtcagtagaattgcgtatagcaaggatttcgaaactttaaaagtggatttcctgagcaaacttccggagatgctgaaaatgtttgaggataggctttgtcataagacgtatctcaatggtgatcatgttacccacccggactttatgctgtacgacgcccttgatgtcgttctgtatatggatcccatgtgcctggacgccttcccgaaattagtgtgttttaaaaaacgtatcgaagcgattccacagatcgataaatacttgaagtcttctaaatatattgcttggcctctgcaaggctggcaggcaacgttcggtgggggagatcatccgccaaaatcagatctggtgccgcgtgggagccctggcatacaccgcgacggtggttctggtgagaacctgtactttcaaagctcagataatgggcctcaaaaccagcgcaacgctccacgtataaccttcggtggcccgtctgactccacaggcagcaaccagaatggtgagcgtagtggagccaggtctaagcagcgccgtccccagggtctgccgaacaacacggcgagctggtttactgcgcttacccaacacggtaaagaagacttaaaattcccgcgtggccagggcgtcccgatcaacactaactcttccccggatgatcagattggtaaataccgcagagcaactcgtcggattcgcggcggcgacggtaaaatgaaagatttgtctccgcgttggtacttttactatctcggcaccggtccggaagctggactgccctacggggcaaacaaggacgggatcatttgggtggctaccgaaggtgccctgaatactccaaaagatcatatcggcacccgtaaccctgctaataacgctgcgatcgttctgcaactgcctcagggtacaactctgccaaaaggcttctatgcagaagggtcgcgtggtggcagccaggcgagtagccgtagcagctcccgctctcgcaactcgtcccgtaactccactccgggctcttctcgcggcacgtccccggctcgtatggcaggtaacggtggtgacgctgctctggcgctgctactgctggacaggctgaaccagctggagtcgaagatgagtggtaaaggccaacagcagcagggccagaccgttaccaaaaagagcgcagctgaagcatctaaaaaaccgcgacagaaacgtaccgcgactaaagcgtacaatgtaacacaggccttcggtcgtcgaggtccggagcaaactcaaggaaactttggcgatcaggaattaatccgccaggggaccgactacaaacactggccgcaaattgcccagttcgccccatccgctagtgcattcttcggtatgagccgcatcggcatggaagtaacgccaagtggtacgtggctgacctacaccggtgctatcaagcttgatgacaaggacccgaactttaaagaccaggttattctgcttaacaaacatattgatgcctataaaactttcccgccgaccgaacccaaaaaggacaaaaagaaaaaagctgatgaaacccaggctctaccgcagcgtcagaaaaaacagcaaactgtgactctgctgccagctgcggacctggatgatttttccaagcagctgcaacagtctatgagctctgcggactctacgcaggcttaa

SEQ ID NO: 581 - DNA, 2016 bp, Artificial Sequence
  Description of Artificial Sequence: Synthetic polynucleotide
atgcaccatcatcaccatcatggtggttctggttcgccgatacttggttattggaagattaaaggactggttcagcccacacgcctcctgctagaatacttagaggaaaaatatgaagagcacctgtacgaacgtgatgagggggacaaatggcgaaacaagaaatttgaattgggcttagaatttccaaatttgccgtattatatcgatggcgacgtaaaactgacccaatcaatggccattattcgctacatcgcagataaacataacatgctgggtggctgccctaaagaacgggctgagatctccatgctggaaggtgcggtgctcgacattcgctacggcgtcagtagaattgcgtatagcaaggatttcgaaactttaaaagtggatttcctgagcaaacttccggagatgctgaaaatgtttgaggataggctttgtcataagacgtatctcaatggtgatcatgttacccacccggactttatgctgtacgacgcccttgatgtcgttctgtatatggatcccatgtgcctggacgccttcccgaaattagtgtgttttaaaaaacgtatcgaagcgattccacagatcgataaatacttgaagtcttctaaatatattgcttggcctctgcaaggctggcaggcaacgttcggtgggggagatcatccgccaaaatcagatctggtgccgcgtgggagccctggcatacaccgcgacggtggttctggtgagaacctgtactttcaaagctcagataatgggcctcaaaaccagcgcaacgctccacgtataaccttcggtggcccgtctgactccacaggcagcaaccagaatggtgagcgtagtggagccaggtctaagcagcgccgtccccagggtctgccgaacaacacggcgagctggtttactgcgcttacccaacacggtaaagaagacttaaaattcccgcgtggccagggcgtcccgatcaacactaactcttccccggatgatcagattggttattaccgcagagcaactcgtcggattcgcggcggcgacggtaaaatgaaagatttgtctccgcgttggtacttttactatctcggcaccggtccggaagctggactgccctacggggcaaacaaggacgggatcatttgggtggctaccgaaggtgccctgaatactccaaaagatcatatcggcacccgtaaccctgctaataacgctgcgatcgttctgcaactgcctcagggtacaactctgccaaaaggcttctattcggaagggtcgcgtggtggcagccaggcgagtagccgtagcagctcccgctctcgcaactcgtcccgtaactccactccgggctcttctcgcggcacgtccccggctcgtatggcaggtaacggtggtgacgctgctctggcgctgctactgctggacaggctgaaccagctggagtcgaagatgagtggtaaaggccaacagcagcagggccagaccgttaccaaaaagagcgcagctgaagcatctaaaaaaccgcgacagaaacgtaccgcgactaaagcgtacaatgtaacacaggccttcggtcgtcgaggtccggagcaaactcaaggaaactttggcgatcaggaattaatccgccaggggaccgactacaaacactggccgcaaattgcccagttcgccccatccgctagtgcattcttcggtatgagccgcatcggcatggaagtaacgccaagtggtacgtggctgacctacaccggtgctatcaagcttgatgacaaggacccgaactttaaagaccaggttattctgcttaacaaacatattgatgcctataaaactttcccgccgaccgaacccaaaaaggacaaaaagaaaaaagctgatgaaacccaggctctaccgcagcgtcagaaaaaacagcaaactgtgactctgctgccagctgcggacctggatgatttttccaagcagctgcaacagtctatgagctctgcggactctacgcaggcttaa

SEQ ID NO: 582 - DNA, 2016 bp, Artificial Sequence
  Description of Artificial Sequence: Synthetic polynucleotide
atgcaccatcatcaccatcatggtggttctggttcgccgatacttggttattggaagattaaaggactggttcagcccacacgcctcctgctagaatacttagaggaaaaatatgaagagcacctgtacgaacgtgatgagggggacaaatggcgaaacaagaaatttgaattgggcttagaatttccaaatttgccgtattatatcgatggcgacgtaaaactgacccaatcaatggccattattcgctacatcgcagataaacataacatgctgggtggctgccctaaagaacgggctgagatctccatgctggaaggtgcggtgctcgacattcgctacggcgtcagtagaattgcgtatagcaaggatttcgaaactttaaaagtggatttcctgagcaaacttccggagatgctgaaaatgtttgaggataggctttgtcataagacgtatctcaatggtgatcatgttacccacccggactttatgctgtacgacgcccttgatgtcgttctgtatatggatcccatgtgcctggacgccttcccgaaattagtgtgttttaaaaaacgtatcgaagcgattccacagatcgataaatacttgaagtcttctaaatatattgcttggcctctgcaaggctggcaggcaacgttcggtgggggagatcatccgccaaaatcagatctggtgccgcgtgggagccctggcatacaccgcgacggtggttctggtgagaacctgtactttcaaagctcagataatgggcctcaaaaccagcgcaacgctccacgtataaccttcggtggcccgtctgactccacaggcagcaaccagaatggtgagcgtagtggagccaggtctaagcagcgccgtccccagggtctgccgaacaacacggcgagctggtttactgcgcttacccaacacggtaaagaagacttaaaattcccgcgtggccagggcgtcccgatcaacgcaaactcttccccggatgatcagattggttattaccgcagagcaactcgtcggattcgcggcggcgacggtaaaatgaaagatttgtctccgcgttggtacttttactatctcggcaccggtccggaagctggactgccctacggggcaaacaaggacgggatcatttgggtggctaccgaaggtgccctgaatactccaaaagatcatatcggcacccgtaaccctgctaataacgctgcgatcgttctgcaactgcctcagggtacaactctgccaaaaggcttctatgcagaagggtcgcgtggtggcagccaggcgagtagccgtagcagctcccgctctcgcaactcgtcccgtaactccactccgggctcttctcgcggcacgtccccggctcgtatggcaggtaacggtggtgacgctgctctggcgctgctactgctggacaggctgaaccagctggagtcgaagatgagtggtaaaggccaacagcagcagggccagaccgttaccaaaaagagcgcagctgaagcatctaaaaaaccgcgacagaaacgtaccgcgactaaagcgtacaatgtaacacaggccttcggtcgtcgaggtccggagcaaactcaaggaaactttggcgatcaggaattaatccgccaggggaccgactacaaacactggccgcaaattgcccagttcgccccatccgctagtgcattcttcggtatgagccgcatcggcatggaagtaacgccaagtggtacgtggctgacctacaccggtgctatcaagcttgatgacaaggacccgaactttaaagaccaggttattctgcttaacaaacatattgatgcctataaaactttcccgccgaccgaacccaaaaaggacaaaaagaaaaaagctgatgaaacccaggctctaccgcagcgtcagaaaaaacagcaaactgtgactctgctgccagctgcggacctggatgatttttccaagcagctgcaacagtctatgagctctgcggactctacgcaggcttaa

SEQ ID NO: 583 - DNA, 2016 bp, Artificial Sequence
  Description of Artificial Sequence: Synthetic polynucleotide
atgcaccatcatcaccatcatggtggttctggttcgccgatacttggttattggaagattaaaggactggttcagcccacacgcctcctgctagaatacttagaggaaaaatatgaagagcacctgtacgaacgtgatgagggggacaaatggcgaaacaagaaatttgaattgggcttagaatttccaaatttgccgtattatatcgatggcgacgtaaaactgacccaatcaatggccattattcgctacatcgcagataaacataacatgctgggtggctgccctaaagaacgggctgagatctccatgctggaaggtgcggtgctcgacattcgctacggcgtcagtagaattgcgtatagcaaggatttcgaaactttaaaagtggatttcctgagcaaacttccggagatgctgaaaatgtttgaggataggctttgtcataagacgtatctcaatggtgatcatgttacccacccggactttatgctgtacgacgcccttgatgtcgttctgtatatggatcccatgtgcctggacgccttcccgaaattagtgtgttttaaaaaacgtatcgaagcgattccacagatcgataaatacttgaagtcttctaaatatattgcttggcctctgcaaggctggcaggcaacgttcggtgggggagatcatccgccaaaatcagatctggtgccgcgtgggagccctggcatacaccgcgacggtggttctggtgagaacctgtactttcaaagctcagataatgggcctcaaaaccagcgcaacgctccacgtataaccttcggtggcccgtctgactccacaggcagcaaccagaatggtgagcgtagtggagccaggtctaagcagcgccgtccccagggtctgccgaacaacacggcgagctggtttactgcgcttacccaacacggtaaagaagacttaaaattcccgcgtggccagggcgtcccgatcaacactaactcttccccggatgatcagattggttattaccgcagagcaactcgtcggattcgcggcggcgacggtaaaatgaaagatttgtctccgcgttggtacttttactatctcggcaccggtccggaagctggactgccctacggggcaaacaaggacgggatcatttgggtggctaccgaaggtgccctgaatactccaaaagatcatatcggcacccgtaaccctgctaataacgctgcgatcgttctgcaactgcctcagggtacaactctgccaaaaggcttctatgcagaagggtcgcgtggtggcagccaggcgagtagccgtagcagctcccgctctcgcaactcgtcccgtaactccactccgggctcttctcgcggcacgtccccggctcgtatggcaggtaacggtggtgacgctgctctggcgctgctactgctggacaggctgaaccagctggagtcgaagatgagtggtaaaggccaacagcagcagggccagaccgttaccaaaaagagcgcagatgaagcatctaaaaaaccgcgacagaaacgtaccgcgactaaagcgtacaatgtaacacaggccttcggtcgtcgaggtccggagcaaactcaaggaaactttggcgatcaggaattaatccgccaggggaccgactacaaacactggccgcaaattgcccagttcgccccatccgctagtgcattcttcggtatgagccgcatcggcatggaagtaacgccaagtggtacgtggctgacctacaccggtgctatcaagcttgatgacaaggacccgaactttaaagaccaggttattctgcttaacaaacatattgatgcctataaaactttcccgccgaccgaacccaaaaaggacaaaaagaaaaaagctgatgaaacccaggctctaccgcagcgtcagaaaaaacagcaaactgtgactctgctgccagctgcggacctggatgatttttccaagcagctgcaacagtctatgagctctgcggactctacgcaggcttaa

SEQ ID NO: 584 - DNA, 2016 bp, Artificial Sequence
  Description of Artificial Sequence: Synthetic polynucleotide
atgcaccatcatcaccatcatggtggttctggttcgccgatacttggttattggaagattaaaggactggttcagcccacacgcctcctgctagaatacttagaggaaaaatatgaagagcacctgtacgaacgtgatgagggggacaaatggcgaaacaagaaatttgaattgggcttagaatttccaaatttgccgtattatatcgatggcgacgtaaaactgacccaatcaatggccattattcgctacatcgcagataaacataacatgctgggtggctgccctaaagaacgggctgagatctccatgctggaaggtgcggtgctcgacattcgctacggcgtcagtagaattgcgtatagcaaggatttcgaaactttaaaagtggatttcctgagcaaacttccggagatgctgaaaatgtttgaggataggctttgtcataagacgtatctcaatggtgatcatgttacccacccggactttatgctgtacgacgcccttgatgtcgttctgtatatggatcccatgtgcctggacgccttcccgaaattagtgtgttttaaaaaacgtatcgaagcgattccacagatcgataaatacttgaagtcttctaaatatattgcttggcctctgcaaggctggcaggcaacgttcggtgggggagatcatccgccaaaatcagatctggtgccgcgtgggagccctggcatacaccgcgacggtggttctggtgagaacctgtactttcaaagctcagataatgggcctcaaaaccagcgcaacgctccacgtataaccttcggtggcccgtctgactccacaggcagcaaccagaatggtgagcgtagtggagccaggtctaagcagcgccgtccccagggtctgccgaacaacacggcgagctggtttactgcgcttacccaacacggtaaagaagacttaaaattcccgcgtggccagggcgtcccgatcaacactaactcttccccggatgatcagattggttattaccgcagagcaactcgtcggattcgcggcggcgacggtaaaatgaaagatttgtctccgcgttggtacttttactatctcggcaccggtccggaagctggactgccctacggggcaaacaaggacgggatcatttgggtggctaccgaaggtgccctgaatactccaaaagatcatatcggcacccgtaaccctgagaataacgctgcgatcgttctgcaactgcctcagggtacaactctgccaaaaggcttctatgcagaagggtcgcgtggtggcagccaggcgagtagccgtagcagctcccgctctcgcaactcgtcccgtaactccactccgggctcttctcgcggcacgtccccggctcgtatggcaggtaacggtggtgacgctgctctggcgctgctactgctggacaggctgaaccagctggagtcgaagatgagtggtaaaggccaacagcagcagggccagaccgttaccaaaaagagcgcagctgaagcatctaaaaaaccgcgacagaaacgtaccgcgactaaagcgtacaatgtaacacaggccttcggtcgtcgaggtccggagcaaactcaaggaaactttggcgatcaggaattaatccgccaggggaccgactacaaacactggccgcaaattgcccagttcgccccatccgctagtgcattcttcggtatgagccgcatcggcatggaagtaacgccaagtggtacgtggctgacctacaccggtgctatcaagcttgatgacaaggacccgaactttaaagaccaggttattctgcttaacaaacatattgatgcctataaaactttcccgccgaccgaacccaaaaaggacaaaaagaaaaaagctgatgaaacccaggctctaccgcagcgtcagaaaaaacagcaaactgtgactctgctgccagctgcggacctggatgatttttccaagcagctgcaacagtctatgagctctgcggactctacgcaggcttaa

SEQ ID NO: 585 - DNA, 2016 bp, Artificial Sequence
  Description of Artificial Sequence: Synthetic polynucleotide
atgcaccatcatcaccatcatggtggttctggttcgccgatacttggttattggaagattaaaggactggttcagcccacacgcctcctgctagaatacttagaggaaaaatatgaagagcacctgtacgaacgtgatgagggggacaaatggcgaaacaagaaatttgaattgggcttagaatttccaaatttgccgtattatatcgatggcgacgtaaaactgacccaatcaatggccattattcgctacatcgcagataaacataacatgctgggtggctgccctaaagaacgggctgagatctccatgctggaaggtgcggtgctcgacattcgctacggcgtcagtagaattgcgtatagcaaggatttcgaaactttaaaagtggatttcctgagcaaacttccggagatgctgaaaatgtttgaggataggctttgtcataagacgtatctcaatggtgatcatgttacccacccggactttatgctgtacgacgcccttgatgtcgttctgtatatggatcccatgtgcctggacgccttcccgaaattagtgtgttttaaaaaacgtatcgaagcgattccacagatcgataaatacttgaagtcttctaaatatattgcttggcctctgcaaggctggcaggcaacgttcggtgggggagatcatccgccaaaatcagatctggtgccgcgtgggagccctggcatacaccgcgacggtggttctggtgagaacctgtactttcaaagctcagataatgggcctcaaaaccagcgcaacgctccacgtataaccttcggtggcccgtctgactccacaggcagcaaccagaatggtgagcgtagtggagccaggtctaagcagcgccgtccccagggtctgccgaacaacacggcgagctggtttactgcgcttacccaacacggtaaagaagacttaaaattcccgcgtggccagggcgtcccgatcaacactaactctcaaccggatgatcagattggttattaccgcagagcaactcgtcggattcgcggcggcgacggtaaaatgaaagatttgtctccgcgttggtacttttactatctcggcaccggtccggaagctggactgccctacggggcaaacaaggacgggatcatttgggtggctaccgaaggtgccctgaatactccaaaagatcatatcggcacccgtaaccctgctaataacgctgcgatcgttctgcaactgcctcagggtacaactctgccaaaaggcttctatgcagaagggtcgcgtggtggcagccaggcgagtagccgtagcagctcccgctctcgcaactcgtcccgtaactccactccgggctcttctcgcggcacgtccccggctcgtatggcaggtaacggtggtgacgctgctctggcgctgctactgctggacaggctgaaccagctggagtcgaagatgagtggtaaaggccaacagcagcagggccagaccgttaccaaaaagagcgcagctgaagcatctaaaaaaccgcgacagaaacgtaccgcgactaaagcgtacaatgtaacacaggccttcggtcgtcgaggtccggagcaaactcaaggaaactttggcgatcaggaattaatccgccaggggaccgactacaaacactggccgcaaattgcccagttcgccccatccgctagtgcattcttcggtatgagccgcatcggcatggaagtaacgccaagtggtacgtggctgacctacaccggtgctatcaagcttgatgacaaggacccgaactttaaagaccaggttattctgcttaacaaacatattgatgcctataaaactttcccgccgaccgaacccaaaaaggacaaaaagaaaaaagctgatgaaacccaggctctaccgcagcgtcagaaaaaacagcaaactgtgactctgctgccagctgcggacctggatgatttttccaagcagctgcaacagtctatgagctctgcggactctacgcaggcttaa

SEQ ID NO: 586 - DNA, 2016 bp, Artificial Sequence
  Description of Artificial Sequence: Synthetic polynucleotide
atgcaccatcatcaccatcatggtggttctggttcgccgatacttggttattggaagattaaaggactggttcagcccacacgcctcctgctagaatacttagaggaaaaatatgaagagcacctgtacgaacgtgatgagggggacaaatggcgaaacaagaaatttgaattgggcttagaatttccaaatttgccgtattatatcgatggcgacgtaaaactgacccaatcaatggccattattcgctacatcgcagataaacataacatgctgggtggctgccctaaagaacgggctgagatctccatgctggaaggtgcggtgctcgacattcgctacggcgtcagtagaattgcgtatagcaaggatttcgaaactttaaaagtggatttcctgagcaaacttccggagatgctgaaaatgtttgaggataggctttgtcataagacgtatctcaatggtgatcatgttacccacccggactttatgctgtacgacgcccttgatgtcgttctgtatatggatcccatgtgcctggacgccttcccgaaattagtgtgttttaaaaaacgtatcgaagcgattccacagatcgataaatacttgaagtcttctaaatatattgcttggcctctgcaaggctggcaggcaacgttcggtgggggagatcatccgccaaaatcagatctggtgccgcgtgggagccctggcatacaccgcgacggtggttctggtgagaacctgtactttcaaagctcagataatgggcctcaaaaccagcgcaacgctccacgtataaccttcggtggcccgtctgactccacaggcagcaaccagaatggtgagcgtagtggagccaggtctaagcagcgccgtccccagggtctgccgaacaacacggcgagctggtttactgcgcttacccaacacggtaaagaagacttaaaattcccgcgtggccagggcgtcccgatcaacactaactcttccccggatgatcagattggttattaccgcagatgtactcgtcggattcgcggcggcgacggtaaaatgaaagatttgtctccgcgttggtacttttactatctcggcaccggtccggaagctggactgccctacggggcaaacaaggacgggatcatttgggtggctaccgaaggtgccctgaatactccaaaagatcatatcggcacccgtaaccctgctaataacgctgcgatcgttctgcaactgcctcagggtacaactctgccaaaaggcttctatgcagaagggtcgcgtggtggcagccaggcgagtagccgtagcagctcccgctctcgcaactcgtcccgtaactccactccgggctcttctcgcggcacgtccccggctcgtatggcaggtaacggtggtgacgctgctctggcgctgctactgctggacaggctgaaccagctggagtcgaagatgagtggtaaaggccaacagcagcagggccagaccgttaccaaaaagagcgcagctgaagcatctaaaaaaccgcgacagaaacgtaccgcgactaaagcgtacaatgtaacacaggccttcggtcgtcgaggtccggagcaaactcaaggaaactttggcgatcaggaattaatccgccaggggaccgactacaaacactggccgcaaattgcccagttcgccccatccgctagtgcattcttcggtatgagccgcatcggcatggaagtaacgccaagtggtacgtggctgacctacaccggtgctatcaagcttgatgacaaggacccgaactttaaagaccaggttattctgcttaacaaacatattgatgcctataaaactttcccgccgaccgaacccaaaaaggacaaaaagaaaaaagctgatgaaacccaggctctaccgcagcgtcagaaaaaacagcaaactgtgactctgctgccagctgcggacctggatgatttttccaagcagctgcaacagtctatgagctctgcggactctacgcaggcttaa

SEQ ID NO: 587 - DNA, 2016 bp, Artificial Sequence
  Description of Artificial Sequence: Synthetic polynucleotide
atgcaccatcatcaccatcatggtggttctggttcgccgatacttggttattggaagattaaaggactggttcagcccacacgcctcctgctagaatacttagaggaaaaatatgaagagcacctgtacgaacgtgatgagggggacaaatggcgaaacaagaaatttgaattgggcttagaatttccaaatttgccgtattatatcgatggcgacgtaaaactgacccaatcaatggccattattcgctacatcgcagataaacataacatgctgggtggctgccctaaagaacgggctgagatctccatgctggaaggtgcggtgctcgacattcgctacggcgtcagtagaattgcgtatagcaaggatttcgaaactttaaaagtggatttcctgagcaaacttccggagatgctgaaaatgtttgaggataggctttgtcataagacgtatctcaatggtgatcatgttacccacccggactttatgctgtacgacgcccttgatgtcgttctgtatatggatcccatgtgcctggacgccttcccgaaattagtgtgttttaaaaaacgtatcgaagcgattccacagatcgataaatacttgaagtcttctaaatatattgcttggcctctgcaaggctggcaggcaacgttcggtgggggagatcatccgccaaaatcagatctggtgccgcgtgggagccctggcatacaccgcgacggtggttctggtgagaacctgtactttcaaagctcagataatgggcctcaaaaccagcgcaacgctccacgtataaccttcggtggcccgtctgactccacaggcagcaaccagaatggtgagcgtagtggagccaggtctaagcagcgccgtccccagggtctgccgaacaacacggcgagctggtttactgcgcttacccaacacggtaaagaagacttaaaattcccgcgtggccagggcgtcccgatcaacactaactcttccccggatgatcagattggttattaccgcagagcaactcgtcggattcgcggcggcgacggtaaaatgaaagatttgtctccgcgttggtacttttactatctcggcaccggtccggaagctggactgccctacggggcaaacaaggacgggatcatttgggtggctaccgaaggtgccctgaatactccaaaagatcatatcggcacccgtaaccctgctaataacgctgcgatcgttctgcaactgcctcagggtacaactctgccaaaaggcttctatgcagaagggtcgcgtggtggcagccaggcgagtagccgtagcagctcccgctctcgcaactcgtcccgtaactccactccgggctcttctcgcggcacgtccccggctcgtatggcaggtaacggtggtgacgctgctctggcgctgctactgctggacaggctgaaccagctggagtcgaagatgagtggtaaaggccaacagcagcagggccagaccgttaccaaaaagagcgcagctgaagcatctaaaaaaccgcgacagaaacgtaccgcgactaaagcgtacaatgtaacacaggccttcggtcgtcgaggtccggagcaaactcaaggaaactttggcgatcaggaattaatccgccaggggaccgactacaaacactggccgcaaattgcccagttcattccatccgctagtgcattcttcggtatgagccgcatcggcatggaagtaacgccaagtggtacgtggctgacctacaccggtgctatcaagcttgatgacaaggacccgaactttaaagaccaggttattctgcttaacaaacatattgatgcctataaaactttcccgccgaccgaacccaaaaaggacaaaaagaaaaaagctgatgaaacccaggctctaccgcagcgtcagaaaaaacagcaaactgtgactctgctgccagctgcggacctggatgatttttccaagcagctgcaacagtctatgagctctgcggactctacgcaggcttaa

SEQ ID NO: 588 - DNA, 2016 bp, Artificial Sequence
  Description of Artificial Sequence: Synthetic polynucleotide
atgcaccatcatcaccatcatggtggttctggttcgccgatacttggttattggaagattaaaggactggttcagcccacacgcctcctgctagaatacttagaggaaaaatatgaagagcacctgtacgaacgtgatgagggggacaaatggcgaaacaagaaatttgaattgggcttagaatttccaaatttgccgtattatatcgatggcgacgtaaaactgacccaatcaatggccattattcgctacatcgcagataaacataacatgctgggtggctgccctaaagaacgggctgagatctccatgctggaaggtgcggtgctcgacattcgctacggcgtcagtagaattgcgtatagcaaggatttcgaaactttaaaagtggatttcctgagcaaacttccggagatgctgaaaatgtttgaggataggctttgtcataagacgtatctcaatggtgatcatgttacccacccggactttatgctgtacgacgcccttgatgtcgttctgtatatggatcccatgtgcctggacgccttcccgaaattagtgtgttttaaaaaacgtatcgaagcgattccacagatcgataaatacttgaagtcttctaaatatattgcttggcctctgcaaggctggcaggcaacgttcggtgggggagatcatccgccaaaatcagatctggtgccgcgtgggagccctggcatacaccgcgacggtggttctggtgagaacctgtactttcaaagctcagataatgggcctcaaaaccagcgcaacgctccacgtataaccttcggtggcccgtctgactccacaggcagcaaccagaatggtgagcgtagtggagccaggtctaagcagcgccgtccccagggtctgccgaacaacacggcgagctggtttactgcgcttacccaacacggtaaagaagacttaaaattcccgcgtggccagggcgtcccgatcaacactaactcttccccggatgatcagattggttattaccgcagagcaactcgtcggattcgcggcggcgacggtaaaatgaaagatttgtctccgcgttggtacttttactatctcggcaccggtccggaagctggactgccctacggggcaaacaaggacgggatcatttgggtggctaccgaaggtgccctgaatactccaaaagatcatatcggcacccgtaaccctgctaataacgctgcgatcgttctgcaactgcctcagggtacaactctgccaaaaggcttctatgcagaagggtcgcgtggtggcagccaggcgagtagccgtagcagctcccgctctcgcaactcgtcccgtaactccactccgggctcttctcgcggcacgtccccggctcgtatggcaggtaacggtggtgacgctgctctggcgctgctactgctggacaggctgaaccagctggagtcgaagatgagtggtaaaggccaacagcagcagggccagaccgttaccaaaaagagcgcagctgaagcatctaaaaaaccgcgacagaaacgtaccgcgactaaagcgtacaatgtaacacaggccttcggtcgtcgaggtccggagcaaactcaaggaaactttggcgatcaggaattaatccgccaggggaccgactacaaacactggccgcaaattgcccagttcgccccatccgctagtgcattcttcggtatgagccatatcggcatggaagtaacgccaagtggtacgtggctgacctacaccggtgctatcaagcttgatgacaaggacccgaactttaaagaccaggttattctgcttaacaaacatattgatgcctataaaactttcccgccgaccgaacccaaaaaggacaaaaagaaaaaagctgatgaaacccaggctctaccgcagcgtcagaaaaaacagcaaactgtgactctgctgccagctgcggacctggatgatttttccaagcagctgcaacagtctatgagctctgcggactctacgcaggcttaa

SEQ ID NO: 589 - DNA, 2016 bp, Artificial Sequence
  Description of Artificial Sequence: Synthetic polynucleotide
atgcaccatcatcaccatcatggtggttctggttcgccgatacttggttattggaagattaaaggactggttcagcccacacgcctcctgctagaatacttagaggaaaaatatgaagagcacctgtacgaacgtgatgagggggacaaatggcgaaacaagaaatttgaattgggcttagaatttccaaatttgccgtattatatcgatggcgacgtaaaactgacccaatcaatggccattattcgctacatcgcagataaacataacatgctgggtggctgccctaaagaacgggctgagatctccatgctggaaggtgcggtgctcgacattcgctacggcgtcagtagaattgcgtatagcaaggatttcgaaactttaaaagtggatttcctgagcaaacttccggagatgctgaaaatgtttgaggataggctttgtcataagacgtatctcaatggtgatcatgttacccacccggactttatgctgtacgacgcccttgatgtcgttctgtatatggatcccatgtgcctggacgccttcccgaaattagtgtgttttaaaaaacgtatcgaagcgattccacagatcgataaatacttgaagtcttctaaatatattgcttggcctctgcaaggctggcaggcaacgttcggtgggggagatcatccgccaaaatcagatctggtgccgcgtgggagccctggcatacaccgcgacggtggttctggtgagaacctgtactttcaaagctcagataatgggcctcaaaaccagcgcaacgctccacgtataaccttcggtggcccgtctgactccacaggcagcaaccagaatggtgagcgtagtggagccaggtctaagcagcgccgtccccagggtctgccgaacaacacggcgagctggtttactgcgcttacccaacacggtaaagaagacttaaaattcccgcgtggccagggcgtcccgatcaacactaactcttccccggatgatcagattggttattaccgcagagcaactcgtcggattcgcggcggcgacggtaaaatgaaagatttgtctccgcgttggtacttttactatctcggcaccggtccggaagctggactgccctacggggcaaacaaggacgggatcatttgggtggctaccgaaggtgccctgaatactccaaaagatcatatcggcacccgtaaccctgctaataacgctgcgatcgttctgcaactgcctcagggtacaactctgccaaaaggcttctatgcagaagggtcgcgtggtggcagccaggcgagtagccgtagcagctcccgctctcgcaactcgtcccgtaactccactccgggctcttctcgcggcacgtccccggctcgtatggcaggtaacggtggtgacgctgctctggcgctgctactgctggacaggctgaaccagctggagtcgaagatgagtggtaaaggccaacagcagcagggccagaccgttaccaaaaagagcgcagctgaagcatctaaaaaaccgcgacagaaacgtaccgcgactaaagcgtacaatgtaacacaggccttcggtcgtcgaggtccggagcaaactcaaggaaactttggcgatcaggaattaatccgccaggggaccgactacaaacactggccgcaaattgcccagttcgccccatccgctagtgcattcttcggtatgagcaaaatcggcatggaagtaacgccaagtggtacgtggctgacctacaccggtgctatcaagcttgatgacaaggacccgaactttaaagaccaggttattctgcttaacaaacatattgatgcctataaaactttcccgccgaccgaacccaaaaaggacaaaaagaaaaaagctgatgaaacccaggctctaccgcagcgtcagaaaaaacagcaaactgtgactctgctgccagctgcggacctggatgatttttccaagcagctgcaacagtctatgagctctgcggactctacgcaggcttaa

SEQ ID NO: 590 - DNA, 2016 bp, Artificial Sequence
  Description of Artificial Sequence: Synthetic polynucleotide
atgcaccatcatcaccatcatggtggttctggttcgccgatacttggttattggaagattaaaggactggttcagcccacacgcctcctgctagaatacttagaggaaaaatatgaagagcacctgtacgaacgtgatgagggggacaaatggcgaaacaagaaatttgaattgggcttagaatttccaaatttgccgtattatatcgatggcgacgtaaaactgacccaatcaatggccattattcgctacatcgcagataaacataacatgctgggtggctgccctaaagaacgggctgagatctccatgctggaaggtgcggtgctcgacattcgctacggcgtcagtagaattgcgtatagcaaggatttcgaaactttaaaagtggatttcctgagcaaacttccggagatgctgaaaatgtttgaggataggctttgtcataagacgtatctcaatggtgatcatgttacccacccggactttatgctgtacgacgcccttgatgtcgttctgtatatggatcccatgtgcctggacgccttcccgaaattagtgtgttttaaaaaacgtatcgaagcgattccacagatcgataaatacttgaagtcttctaaatatattgcttggcctctgcaaggctggcaggcaacgttcggtgggggagatcatccgccaaaatcagatctggtgccgcgtgggagccctggcatacaccgcgacggtggttctggtgagaacctgtactttcaaagctcagataatgggcctcaaaaccagcgcaacgctccacgtataaccttcggtggcccgtctgactccacaggcagcaaccagaatggtgagcgtagtggagccaggtctaagcagcgccgtccccagggtctgccgaacaacacggcgagctggtttactgcgcttacccaacacggtaaagaagacttaaaattcccgcgtggccagggcgtcccgatcaacgataactcttccccggatgatcagattggttattaccgcagagcaactcgtcggattcgcggcggcgacggtaaaatgaaagatttgtctccgcgttggtacttttactatctcggcaccggtccggaagctggactgccctacggggcaaacaaggacgggatcatttgggtggctaccgaaggtgccctgaatactccaaaagatcatatcggcacccgtaaccctgctaataacgctgcgatcgttctgcaactgcctcagggtacaactctgccaaaaggcttctatgcagaagggtcgcgtggtggcagccaggcgagtagccgtagcagctcccgctctcgcaactcgtcccgtaactccactccgggctcttctcgcggcacgtccccggctcgtatggcaggtaacggtggtgacgctgctctggcgctgctactgctggacaggctgaaccagctggagtcgaagatgagtggtaaaggccaacagcagcagggccagaccgttaccaaaaagagcgcagctgaagcatctaaaaaaccgcgacagaaacgtaccgcgactaaagcgtacaatgtaacacaggccttcggtcgtcgaggtccggagcaaactcaaggaaactttggcgatcaggaattaatccgccaggggaccgactacaaacactggccgcaaattgcccagttcgccccatccgctagtgcattcttcggtatgagccgcatcggcatggaagtaacgccaagtggtacgtggctgacctacaccggtgctatcaagcttgatgacaaggacccgaactttaaagaccaggttattctgcttaacaaacatattgatgcctataaaactttcccgccgaccgaacccaaaaaggacaaaaagaaaaaagctgatgaaacccaggctctaccgcagcgtcagaaaaaacagcaaactgtgactctgctgccagctgcggacctggatgatttttccaagcagctgcaacagtctatgagctctgcggactctacgcaggcttaa

SEQ ID NO: 591 - DNA, 2016 bp, Artificial Sequence
  Description of Artificial Sequence: Synthetic polynucleotide
atgcaccatcatcaccatcatggtggttctggttcgccgatacttggttattggaagattaaaggactggttcagcccacacgcctcctgctagaatacttagaggaaaaatatgaagagcacctgtacgaacgtgatgagggggacaaatggcgaaacaagaaatttgaattgggcttagaatttccaaatttgccgtattatatcgatggcgacgtaaaactgacccaatcaatggccattattcgctacatcgcagataaacataacatgctgggtggctgccctaaagaacgggctgagatctccatgctggaaggtgcggtgctcgacattcgctacggcgtcagtagaattgcgtatagcaaggatttcgaaactttaaaagtggatttcctgagcaaacttccggagatgctgaaaatgtttgaggataggctttgtcataagacgtatctcaatggtgatcatgttacccacccggactttatgctgtacgacgcccttgatgtcgttctgtatatggatcccatgtgcctggacgccttcccgaaattagtgtgttttaaaaaacgtatcgaagcgattccacagatcgataaatacttgaagtcttctaaatatattgcttggcctctgcaaggctggcaggcaacgttcggtgggggagatcatccgccaaaatcagatctggtgccgcgtgggagccctggcatacaccgcgacggtggttctggtgagaacctgtactttcaaagctcagataatgggcctcaaaaccagcgcaacgctccacgtataaccttcggtggcccgtctgactccacaggcagcaaccagaatggtgagcgtagtggagccaggtctaagcagcgccgtccccagggtctgccgaacaacacggcgagctggtttactgcgcttacccaacacggtaaagaagacttaaaattcccgcgtggccagggcgtcccgatcaacactaactcttccccggatgatcagattggttattaccgcagagcaactcgtcggattcgcggcggcgacggtaaaatgaaagatttgtctccgcgttggtacttttactatctcggcaccggtccggaagctggactgccctacggggcaaacaaggacgggatcatttgggtggctaccgaaggtgccctgaatactccaaaagatcatatcggcacccgtaaccctgctaataacgctgcgatcgttctgcaactgcctcagggtacaactctgccaaaaggcttctatgcagaagggtcgcgtggtggcagccaggcgagtagccgtagcagctcccgctctcgcaactcgtcccgtaactccactccgggctcttctcgcggcacgtccccggctcgtatggcaggtaacggtggtgacgctgctctggcgctgctactgctggacaggctgaaccagctggagtcgaagatgagtggtaaaggccaacagcagcagggccagaccgttaccaaaaagagcgcagctgaagcatctaaaaaaccgcgacagaaacgtaccgcgactaaagcgtacaatgtaacacaggccttcggtcgtcgaggtccggagcaaactcaaggaaactttggcgatcaggaattaatccgccaggggaccgactacaaacactggccgcaaattgcccagttcgccccatccgctagtgcattcttcggtatgagccgcatcggcatggaagtaacgccaagtggtacgtggctgacctacaccggtgctatcaagcttgatcaaaaggacccgaactttaaagaccaggttattctgcttaacaaacatattgatgcctataaaactttcccgccgaccgaacccaaaaaggacaaaaagaaaaaagctgatgaaacccaggctctaccgcagcgtcagaaaaaacagcaaactgtgactctgctgccagctgcggacctggatgatttttccaagcagctgcaacagtctatgagctctgcggactctacgcaggcttaa

SEQ ID NO: 592 - DNA, 2016 bp, Artificial Sequence
  Description of Artificial Sequence: Synthetic polynucleotide
atgcaccatcatcaccatcatggtggttctggttcgccgatacttggttattggaagattaaaggactggttcagcccacacgcctcctgctagaatacttagaggaaaaatatgaagagcacctgtacgaacgtgatgagggggacaaatggcgaaacaagaaatttgaattgggcttagaatttccaaatttgccgtattatatcgatggcgacgtaaaactgacccaatcaatggccattattcgctacatcgcagataaacataacatgctgggtggctgccctaaagaacgggctgagatctccatgctggaaggtgcggtgctcgacattcgctacggcgtcagtagaattgcgtatagcaaggatttcgaaactttaaaagtggatttcctgagcaaacttccggagatgctgaaaatgtttgaggataggctttgtcataagacgtatctcaatggtgatcatgttacccacccggactttatgctgtacgacgcccttgatgtcgttctgtatatggatcccatgtgcctggacgccttcccgaaattagtgtgttttaaaaaacgtatcgaagcgattccacagatcgataaatacttgaagtcttctaaatatattgcttggcctctgcaaggctggcaggcaacgttcggtgggggagatcatccgccaaaatcagatctggtgccgcgtgggagccctggcatacaccgcgacggtggttctggtgagaacctgtactttcaaagctcagataatgggcctcaaaaccagcgcaacgctccacgtataaccttcggtggcccgtctgactccacaggcagcaaccagaatggtgagcgtagtggagccaggtctaagcagcgccgtccccagggtctgccgaacaacacggcgagctggtttactgcgcttacccaacacggtaaagaagacttaaaattcccgcgtggccagggcgtcccgatcaacactaactcttccccggatgatcagattggttattaccgcagagcaactcgtcggattcgcggcggcgacggtaaaatgaaagatttgtctccgcgttggtacttttactatctcggcaccggtccggaagctggactgccctacggggcagcgaaggacgggatcatttgggtggctaccgaaggtgccctgaatactccaaaagatcatatcggcacccgtaaccctgctaataacgctgcgatcgttctgcaactgcctcagggtacaactctgccaaaaggcttctatgcagaagggtcgcgtggtggcagccaggcgagtagccgtagcagctcccgctctcgcaactcgtcccgtaactccactccgggctcttctcgcggcacgtccccggctcgtatggcaggtaacggtggtgacgctgctctggcgctgctactgctggacaggctgaaccagctggagtcgaagatgagtggtaaaggccaacagcagcagggccagaccgttaccaaaaagagcgcagctgaagcatctaaaaaaccgcgacagaaacgtaccgcgactaaagcgtacaatgtaacacaggccttcggtcgtcgaggtccggagcaaactcaaggaaactttggcgatcaggaattaatccgccaggggaccgactacaaacactggccgcaaattgcccagttcgccccatccgctagtgcattcttcggtatgagccgcatcggcatggaagtaacgccaagtggtacgtggctgacctacaccggtgctatcaagcttgatgacaaggacccgaactttaaagaccaggttattctgcttaacaaacatattgatgcctataaaactttcccgccgaccgaacccaaaaaggacaaaaagaaaaaagctgatgaaacccaggctctaccgcagcgtcagaaaaaacagcaaactgtgactctgctgccagctgcggacctggatgatttttccaagcagctgcaacagtctatgagctctgcggactctacgcaggcttaa

SEQ ID NO: 593 - DNA, 2016 bp, Artificial Sequence
  Description of Artificial Sequence: Synthetic polynucleotide
atgcaccatcatcaccatcatggtggttctggttcgccgatacttggttattggaagattaaaggactggttcagcccacacgcctcctgctagaatacttagaggaaaaatatgaagagcacctgtacgaacgtgatgagggggacaaatggcgaaacaagaaatttgaattgggcttagaatttccaaatttgccgtattatatcgatggcgacgtaaaactgacccaatcaatggccattattcgctacatcgcagataaacataacatgctgggtggctgccctaaagaacgggctgagatctccatgctggaaggtgcggtgctcgacattcgctacggcgtcagtagaattgcgtatagcaaggatttcgaaactttaaaagtggatttcctgagcaaacttccggagatgctgaaaatgtttgaggataggctttgtcataagacgtatctcaatggtgatcatgttacccacccggactttatgctgtacgacgcccttgatgtcgttctgtatatggatcccatgtgcctggacgccttcccgaaattagtgtgttttaaaaaacgtatcgaagcgattccacagatcgataaatacttgaagtcttctaaatatattgcttggcctctgcaaggctggcaggcaacgttcggtgggggagatcatccgccaaaatcagatctggtgccgcgtgggagccctggcatacaccgcgacggtggttctggtgagaacctgtactttcaaagctcagataatgggcctcaaaaccagcgcaacgctccacgtataaccttcggtggcccgtctgactccacaggcagcaaccagaatggtgagcgtagtggagccaggtctaagcagcgccgtccccagggtctgccgaacaacacggcgagctggtttactgcgcttacccaacacggtaaagaagacttaaaattcccgcgtggccagggcgtcccgatcaacactaactcttccccggatgatcagattggttattaccgcagagcaactcgtcggattcgcggcggcgacggtaaaatgaaagatttgtctccgcgttggtacttttactatctcggcaccggtccggaagctggactgccctacggggcaaacaaggacgggatcatttgggtggctaccgaaggtgccctgaatactccaaaagatcatatcggcacccgtaaccctgctaataacgctgcgatcgttctgcaactgcctcagggtacaactctgccaaaaggcttctatgcagaagggtcgcgtggtggcagccaggcgagtagccgtagcagctcccgctctcgcaactcgtcccgtaactccactccgggctcttctcgcggcacgtccccggctcgtatggcaggtaacggtggtgacgctgctctggcgctgctactgctggacaggctgaaccagctggagtcgaagatgagtggtaaaggccaacagcagcagggccagaccgttaccaaaaagagcgcagctgaagcatctaaaaaaccgcgacagaaacgtaccgcgactaaagcgtacaatgtaacacaggccttcggtacgcgaggtccggagcaaactcaaggaaactttggcgatcaggaattaatccgccaggggaccgactacaaacactggccgcaaattgcccagttcgccccatccgctagtgcattcttcggtatgagccgcatcggcatggaagtaacgccaagtggtacgtggctgacctacaccggtgctatcaagcttgatgacaaggacccgaactttaaagaccaggttattctgcttaacaaacatattgatgcctataaaactttcccgccgaccgaacccaaaaaggacaaaaagaaaaaagctgatgaaacccaggctctaccgcagcgtcagaaaaaacagcaaactgtgactctgctgccagctgcggacctggatgatttttccaagcagctgcaacagtctatgagctctgcggactctacgcaggcttaa

SEQ ID NO: 594 - DNA, 2016 bp, Artificial Sequence
  Description of Artificial Sequence: Synthetic polynucleotide
atgcaccatcatcaccatcatggtggttctggttcgccgatacttggttattggaagattaaaggactggttcagcccacacgcctcctgctagaatacttagaggaaaaatatgaagagcacctgtacgaacgtgatgagggggacaaatggcgaaacaagaaatttgaattgggcttagaatttccaaatttgccgtattatatcgatggcgacgtaaaactgacccaatcaatggccattattcgctacatcgcagataaacataacatgctgggtggctgccctaaagaacgggctgagatctccatgctggaaggtgcggtgctcgacattcgctacggcgtcagtagaattgcgtatagcaaggatttcgaaactttaaaagtggatttcctgagcaaacttccggagatgctgaaaatgtttgaggataggctttgtcataagacgtatctcaatggtgatcatgttacccacccggactttatgctgtacgacgcccttgatgtcgttctgtatatggatcccatgtgcctggacgccttcccgaaattagtgtgttttaaaaaacgtatcgaagcgattccacagatcgataaatacttgaagtcttctaaatatattgcttggcctctgcaaggctggcaggcaacgttcggtgggggagatcatccgccaaaatcagatctggtgccgcgtgggagccctggcatacaccgcgacggtggttctggtgagaacctgtactttcaaagctcagataatgggcctcaaaaccagcgcaacgctccacgtataaccttcggtggcccgtctgactccacaggcagcaaccagaatggtgagcgtagtggagccaggtctaagcagcgccgtccccagggtctgccgaacaacacggcgagctggtttactgcgcttacccaacacggtaaagaagacttaaaattcccgcgtggccagggcgtcccgatcaacactaactcttccccggatgatcagattggttattaccgcagagcaactcgtcggattcgcggcggcgacggtaaaatgaaagatttgtctccgcgttggtacttttactatctcggcaccggtccggaagctggactgccctacggggcaaacaaggacgggatcatttgggtggctaccgaaggtgccctgaatactccaaaagatcatatcggcacccgtaaccctgctaataacgctgcgatcgttctgcaactgcctcagggtacaactctgccaaaaggcttctatgcagaagggtcgcgtggtggcagccaggcgagtagccgtagcagctcccgctctcgcaactcgtcccgtaactccactccgggctcttctcgcggcacgtccccggctcgtatggcaggtaacggtggtgacgctgctctggcgctgctactgctggacaggctgaaccagctggagtcgaagatgagtggtaaaggccaacagcagcagggccagaccgttaccaaaaagagcgcagctgaagcatctaaaaaaccgcgacagaaacgtaccgcgactaaagcgtacaatgtaacacaggccttcggtcgtcgaggtccggagcaaactcaaggaaactttggcgatcaggaattaatccgccaggggaccgactacaaacactggccgcaaattgcccagttcgccccatccgctagtgcattcttcggtatgagccgcatcggcatggaagtaacgccaagtggtacgtggctgacctacaccggtgctatcaagcttgatgacaaggacccgaactttaaagaccaggttattctgcttaacaaacatattgatgcctggaaaactttcccgccgaccgaacccaaaaaggacaaaaagaaaaaagctgatgaaacccaggctctaccgcagcgtcagaaaaaacagcaaactgtgactctgctgccagctgcggacctggatgatttttccaagcagctgcaacagtctatgagctctgcggactctacgcaggcttaa

SEQ ID NO: 595 - DNA, 2016 bp, Artificial Sequence
  Description of Artificial Sequence: Synthetic polynucleotide
atgcaccatcatcaccatcatggtggttctggttcgccgatacttggttattggaagattaaaggactggttcagcccacacgcctcctgctagaatacttagaggaaaaatatgaagagcacctgtacgaacgtgatgagggggacaaatggcgaaacaagaaatttgaattgggcttagaatttccaaatttgccgtattatatcgatggcgacgtaaaactgacccaatcaatggccattattcgctacatcgcagataaacataacatgctgggtggctgccctaaagaacgggctgagatctccatgctggaaggtgcggtgctcgacattcgctacggcgtcagtagaattgcgtatagcaaggatttcgaaactttaaaagtggatttcctgagcaaacttccggagatgctgaaaatgtttgaggataggctttgtcataagacgtatctcaatggtgatcatgttacccacccggactttatgctgtacgacgcccttgatgtcgttctgtatatggatcccatgtgcctggacgccttcccgaaattagtgtgttttaaaaaacgtatcgaagcgattccacagatcgataaatacttgaagtcttctaaatatattgcttggcctctgcaaggctggcaggcaacgttcggtgggggagatcatccgccaaaatcagatctggtgccgcgtgggagccctggcatacaccgcgacggtggttctggtgagaacctgtactttcaaagctcagataatgggcctcaaaaccagcgcaacgctccacgtataaccttcggtggcccgtctgactccacaggcagcaaccagaatggtgagcgtagtggagccaggtctaagcagcgccgtccccagggtctgccgaacaacacggcgagctggtttactgcgcttacccaacacggtaaagaagacttaaaattcccgcgtggccagggcgtcccgatcaacactaactcttccccggatgatcagattggttattaccgcagagcaactcgtcggattcgcggcggcgacggtaaaatgaaagatttgtctccgcgttggtacttttactatctcggcaccggtccggaagctggactgccctacggggcaaacaaggacgggatcatttgggtggctaccgaaggtgccctgaatactccaaaaacgcatatcggcacccgtaaccctgctaataacgctgcgatcgttctgcaactgcctcagggtacaactctgccaaaaggcttctatgcagaagggtcgcgtggtggcagccaggcgagtagccgtagcagctcccgctctcgcaactcgtcccgtaactccactccgggctcttctcgcggcacgtccccggctcgtatggcaggtaacggtggtgacgctgctctggcgctgctactgctggacaggctgaaccagctggagtcgaagatgagtggtaaaggccaacagcagcagggccagaccgttaccaaaaagagcgcagctgaagcatctaaaaaaccgcgacagaaacgtaccgcgactaaagcgtacaatgtaacacaggccttcggtcgtcgaggtccggagcaaactcaaggaaactttggcgatcaggaattaatccgccaggggaccgactacaaacactggccgcaaattgcccagttcgccccatccgctagtgcattcttcggtatgagccgcatcggcatggaagtaacgccaagtggtacgtggctgacctacaccggtgctatcaagcttgatgacaaggacccgaactttaaagaccaggttattctgcttaacaaacatattgatgcctataaaactttcccgccgaccgaacccaaaaaggacaaaaagaaaaaagctgatgaaacccaggctctaccgcagcgtcagaaaaaacagcaaactgtgactctgctgccagctgcggacctggatgatttttccaagcagctgcaacagtctatgagctctgcggactctacgcaggcttaa

SEQ ID NO: 596 - DNA, 2016 bp, Artificial Sequence
  Description of Artificial Sequence: Synthetic polynucleotide
atgcaccatcatcaccatcatggtggttctggttcgccgatacttggttattggaagattaaaggactggttcagcccacacgcctcctgctagaatacttagaggaaaaatatgaagagcacctgtacgaacgtgatgagggggacaaatggcgaaacaagaaatttgaattgggcttagaatttccaaatttgccgtattatatcgatggcgacgtaaaactgacccaatcaatggccattattcgctacatcgcagataaacataacatgctgggtggctgccctaaagaacgggctgagatctccatgctggaaggtgcggtgctcgacattcgctacggcgtcagtagaattgcgtatagcaaggatttcgaaactttaaaagtggatttcctgagcaaacttccggagatgctgaaaatgtttgaggataggctttgtcataagacgtatctcaatggtgatcatgttacccacccggactttatgctgtacgacgcccttgatgtcgttctgtatatggatcccatgtgcctggacgccttcccgaaattagtgtgttttaaaaaacgtatcgaagcgattccacagatcgataaatacttgaagtcttctaaatatattgcttggcctctgcaaggctggcaggcaacgttcggtgggggagatcatccgccaaaatcagatctggtgccgcgtgggagccctggcatacaccgcgacggtggttctggtgagaacctgtactttcaaagctcagataatgggcctcaaaaccagcgcaacgctccacgtataaccttcggtggcccgtctgactccacaggcagcaaccagaatggtgagcgtagtggagccaggtctaagcagcgccgtccccagggtctgccgaacaacacggcgagctggtttactgcgcttacccaacacggtaaagaagacttaaaattcccgcgtggccagggcgtcccgatcaacactaactcttccccggatgatcagattggttattaccgcagagcaactcgtcggattcgcggcggcgacggtaaaatgaaagatttgtctccgcgttggtacttttactatctcggcaccggtccggaagctggactgccctacggggcaaacaaggacgggatcatttgggtggctaccgaaggtgccctgaatactccaaaagatcatatcggcacccgtaaccctgctaataacgctgcgatcgttctgcaactgcctcagggtacaactctgccaaaaggcttctatgcagaagggtcgcgtggtggcagccaggcgagtagccgtagcagctcccgctctcgcaactcgtcccgtaactccactccgggctcttctcgcggcacgtccccggctcgtatggcaggtaacggtggtgacgctgctctggcgctgctactgctggacaggctgaaccagctggagtcgaagatgagtggtaaaggccaacagcagcagggccagaccgttaccaaaaagagcgcagctgaagcatctaaaaaaccgcgacagaaacgtaccgcgactaaagcgtacaatgtaacacaggccttcggtcgtcgaggtccggagcaaactcaaggaaactttggcgatcaggaattaatccgccaggggaccgactacaaacactggccgcaaattgcccagttcgccccatccgctagtgcattcttcggtatgagccgcatcggcatggaagtaacgccaagtggtacgtggctgacctacaccggtgctatcaagcttgatgacaaggacccgaactttaaagaccaggttattctgcttaacgaacatattgatgcctataaaactttcccgccgaccgaacccaaaaaggacaaaaagaaaaaagctgatgaaacccaggctctaccgcagcgtcagaaaaaacagcaaactgtgactctgctgccagctgcggacctggatgatttttccaagcagctgcaacagtctatgagctctgcggactctacgcaggcttaa

SEQ ID NO: 597 - DNA, 2016 bp, Artificial Sequence
  Description of Artificial Sequence: Synthetic polynucleotide
atgcaccatcatcaccatcatggtggttctggttcgccgatacttggttattggaagattaaaggactggttcagcccacacgcctcctgctagaatacttagaggaaaaatatgaagagcacctgtacgaacgtgatgagggggacaaatggcgaaacaagaaatttgaattgggcttagaatttccaaatttgccgtattatatcgatggcgacgtaaaactgacccaatcaatggccattattcgctacatcgcagataaacataacatgctgggtggctgccctaaagaacgggctgagatctccatgctggaaggtgcggtgctcgacattcgctacggcgtcagtagaattgcgtatagcaaggatttcgaaactttaaaagtggatttcctgagcaaacttccggagatgctgaaaatgtttgaggataggctttgtcataagacgtatctcaatggtgatcatgttacccacccggactttatgctgtacgacgcccttgatgtcgttctgtatatggatcccatgtgcctggacgccttcccgaaattagtgtgttttaaaaaacgtatcgaagcgattccacagatcgataaatacttgaagtcttctaaatatattgcttggcctctgcaaggctggcaggcaacgttcggtgggggagatcatccgccaaaatcagatctggtgccgcgtgggagccctggcatacaccgcgacggtggttctggtgagaacctgtactttcaaagctcagataatgggcctcaaaaccagcgcaacgctccacgtataaccttcggtggcccgtctgactccacaggcagcaaccagaatggtgagcgtagtggagccaggtctaagcagcgccgtccccagggtctgccgaacaacacggcgagctggtttactgcgcttacccaacacggtaaagaagacttaaaattcccgcgtggccagggcgtcccgatcaacactaactcttccccggatgatcagattggttattaccgcagagcaactcgtcggattcgcggcggcgacggtaaaatgaaagatttgtctccgcgttggtacttttactatctcggcaccggtccggaagctggactgccctacggggcaatcaaggacgggatcatttgggtggctaccgaaggtgccctgaatactccaaaagatcatatcggcacccgtaaccctgctaataacgctgcgatcgttctgcaactgcctcagggtacaactctgccaaaaggcttctatgcagaagggtcgcgtggtggcagccaggcgagtagccgtagcagctcccgctctcgcaactcgtcccgtaactccactccgggctcttctcgcggcacgtccccggctcgtatggcaggtaacggtggtgacgctgctctggcgctgctactgctggacaggctgaaccagctggagtcgaagatgagtggtaaaggccaacagcagcagggccagaccgttaccaaaaagagcgcagctgaagcatctaaaaaaccgcgacagaaacgtaccgcgactaaagcgtacaatgtaacacaggccttcggtcgtcgaggtccggagcaaactcaaggaaactttggcgatcaggaattaatccgccaggggaccgactacaaacactggccgcaaattgcccagttcgccccatccgctagtgcattcttcggtatgagccgcatcggcatggaagtaacgccaagtggtacgtggctgacctacaccggtgctatcaagcttgatgacaaggacccgaactttaaagaccaggttattctgcttaacaaacatattgatgcctataaaactttcccgccgaccgaacccaaaaaggacaaaaagaaaaaagctgatgaaacccaggctctaccgcagcgtcagaaaaaacagcaaactgtgactctgctgccagctgcggacctggatgatttttccaagcagctgcaacagtctatgagctctgcggactctacgcaggcttaa

SEQ ID NO: 598 - protein, 671 aa, Artificial Sequence
  Description of Artificial Sequence: Synthetic polypeptide
MHHHHHHGGSGSPILGYWKIKGLVQPTRLLLEYLEEKYEEHLYERDEGDKWRNKKFELGLEFPNLPYYIDGDVKLTQSMAIIRYIADKHNMLGGCPKERAEISMLEGAVLDIRYGVSRIAYSKDFETLKVDFLSKLPEMLKMFEDRLCHKTYLNGDHVTHPDFMLYDALDVVLYMDPMCLDAFPKLVCFKKRIEAIPQIDKYLKSSKYIAWPLQGWQATFGGGDHPPKSDLVPRGSPGIHRDGGSGENLYFQSSDNGPQNQRNAPRITFGGPSDSTGSNQNGERSGARSKQRRPQGLPNNTASWFTPLVQFGKEDLKFPPGQGVPINTNSSPDDQIGYYRRATRRIRGGDGKMKDLPPKWYFYYLGTGPHADLPYGQKKDGVVWVARPGALNTPKDHIGTRNPANNAAIPLQLPPGTKLPKGFYAEGSRGGSQASSRSSSRSRNSSRNSTPGSSRGTSPARMAGNGGDAALALLLLDRLNQLESKMSGKGQQQQGQTVTKKSAAEASKKPRQKRTATKAYNVTQAFGRRGPEQTQGNFGDQELIRQGTDYKHWPQIAQFAPSASAFFGMSRIGMEVTPSGTWLTYTGAIKLDDKDPNFKDQVILLNKHIDAYKTFPPTEPKKDKKKKADETQALPQRQKKQQTVTLLPAADLDDFSKQLQQSMSSADSTQA

SEQ ID NO: 599 - protein, 671 aa, Artificial Sequence
  Description of Artificial Sequence: Synthetic polypeptide
MHHHHHHGGSGSPILGYWKIKGLVQPTRLLLEYLEEKYEEHLYERDEGDKWRNKKFELGLEFPNLPYYIDGDVKLTQSMAIIRYIADKHNMLGGCPKERAEISMLEGAVLDIRYGVSRIAYSKDFETLKVDFLSKLPEMLKMFEDRLCHKTYLNGDHVTHPDFMLYDALDVVLYMDPMCLDAFPKLVCFKKRIEAIPQIDKYLKSSKYIAWPLQGWQATFGGGDHPPKSDLVPRGSPGIHRDGGSGENLYFQSSDNGPQNQRNAPRITFGGPSDSTGSNQNGERSGARSKQRRPQGLPNNTASWFTALTQHGKEDLKFPRGQGVPINTNSSPDDQIGYYRRATRRIRGGDGKMKDLSPRWYFYYLGTGPEAGLPYGANKDGIIWVATEGALNTPKDHIGTRNPANNAAIVLQLPQGTTLPKGFYAEGSRGGSQASSRSSSRSRNSSRNSTPGSSRGTSPARMAGNGGDAALALLLLDRLNQLESKMSGKGQQQQGQTVTKKSAAEASKKPRQKRTATKDYNVTQAFGRRGPEQTQGNFGDQDLNKLGTDYKHWPQIAQFAPSASAFFGMSRISTEETPSGTWLTYTGAIKLDKKDPNFKDQVILLNKHIDAYKTFPPTEPKKDKKKKADETQALPQRQKKQQTVTLLPAADLDDFSKQLQQSMSSADSTQA

SEQ ID NO: 600 - protein, 671 aa, Artificial Sequence
  Description of Artificial Sequence: Synthetic polypeptide
MHHHHHHGGSGSPILGYWKIKGLVQPTRLLLEYLEEKYEEHLYERDEGDKWRNKKFELGLEFPNLPYYIDGDVKLTQSMAIIRYIADKHNMLGGCPKERAEISMLEGAVLDIRYGVSRIAYSKDFETLKVDFLSKLPEMLKMFEDRLCHKTYLNGDHVTHPDFMLYDALDVVLYMDPMCLDAFPKLVCFKKRIEAIPQIDKYLKSSKYIAWPLQGWQATFGGGDHPPKSDLVPRGSPGIHRDGGSGENLYFQSSDNGPQNQRNAPRITFGGPSDSTGSNQNGERSGARSKQRRPQGLPNNTASWFTALTQHGKEDLKFPRGQGVPKNTNSSPDDQIGYYRRATRRIRGGDGKMKDLSPRWYFYYLGTGPEAGLPYGANKDGIIWVATEGALNTPKDHIGTRNPANNAAIVLQLPQGTTLPKGFYAEGSRGGSQASSRSSSRSRNSSRNSTPGSSRGTSPARMAGNGGDAALALLLLDRLNQLESKMSGKGQQQQGQTVTKKSAAEASKKPRQKRTATKAYNVTQAFGRRGPEQTQGNFGDQELIRQGTDYKHWPQIAQFAPSASAFFGMSRIGMEVTPSGTWLTYTGAIKLDDKDPNFKDQVILLNKHIDAYKTFPPTEPKKDKKKKADETQALPQRQKKQQTVTLLPAADLDDFSKQLQQSMSSADSTQA

SEQ ID NO: 601 - protein, 671 aa, Artificial Sequence
  Description of Artificial Sequence: Synthetic polypeptide
MHHHHHHGGSGSPILGYWKIKGLVQPTRLLLEYLEEKYEEHLYERDEGDKWRNKKFELGLEFPNLPYYIDGDVKLTQSMAIIRYIADKHNMLGGCPKERAEISMLEGAVLDIRYGVSRIAYSKDFETLKVDFLSKLPEMLKMFEDRLCHKTYLNGDHVTHPDFMLYDALDVVLYMDPMCLDAFPKLVCFKKRIEAIPQIDKYLKSSKYIAWPLQGWQATFGGGDHPPKSDLVPRGSPGIHRDGGSGENLYFQSSDNGPQNQRNAPRITFGGPSDSTGSNQNGERSGARSKQRRPQGLPNNTASWFTALTQHGKEDLKFPRGQGVPINTNSSPDDQIGYYRRATRRIRGGDGKMKDLSPRWYFYYLGTGPEAGLPYGANKDGIIWVATEGALNTPKDHIGTRNPANNAAIVLQLPQGTTLPKGFYAEGSRGGSQASSRSSSRSRNSSRNSTPGSSRGTSPARMAGNGGDAALALLLLDRLNQLESKMSGKGQQQQGQTVTKKSAAEASKKPRQKRTATKAYNVTQAFGRRGPEQTQGNFGDQELIRQGTDYKHWPQIAQFAPSASAFFGMSRIGMEHTPSGTWLTYTGAIKLDDKDPNFKDQVILLNKHIDAYKTFPPTEPKKDKKKKADETQALPQRQKKQQTVTLLPAADLDDFSKQLQQSMSSADSTQA

SEQ ID NO: 602 - protein, 671 aa, Artificial Sequence
  Description of Artificial Sequence: Synthetic polypeptide
MHHHHHHGGSGSPILGYWKIKGLVQPTRLLLEYLEEKYEEHLYERDEGDKWRNKKFELGLEFPNLPYYIDGDVKLTQSMAIIRYIADKHNMLGGCPKERAEISMLEGAVLDIRYGVSRIAYSKDFETLKVDFLSKLPEMLKMFEDRLCHKTYLNGDHVTHPDFMLYDALDVVLYMDPMCLDAFPKLVCFKKRIEAIPQIDKYLKSSKYIAWPLQGWQATFGGGDHPPKSDLVPRGSPGIHRDGGSGENLYFQSSDNGPQNQRNAPRITFGGPSDSTGSNQNGERSGARSKQRRPQGLPNNTASWFTALTQHGKEDLKFPRGQGVPINTNSSPDDQIGYYRRATRRIRGGDGKMKDLSPRWYFYYLGTGPEAGLPYGANKDGIIWVATEGALNTPKDHIGTRNPANNAAIELQLPQGTTLPKGFYAEGSRGGSQASSRSSSRSRNSSRNSTPGSSRGTSPARMAGNGGDAALALLLLDRLNQLESKMSGKGQQQQGQTVTKKSAAEASKKPRQKRTATKAYNVTQAFGRRGPEQTQGNFGDQELIRQGTDYKHWPQIAQFAPSASAFFGMSRIGMEVTPSGTWLTYTGAIKLDDKDPNFKDQVILLNKHIDAYKTFPPTEPKKDKKKKADETQALPQRQKKQQTVTLLPAADLDDFSKQLQQSMSSADSTQA

SEQ ID NO: 603 - protein, 671 aa, Artificial Sequence
  Description of Artificial Sequence: Synthetic polypeptide
MHHHHHHGGSGSPILGYWKIKGLVQPTRLLLEYLEEKYEEHLYERDEGDKWRNKKFELGLEFPNLPYYIDGDVKLTQSMAIIRYIADKHNMLGGCPKERAEISMLEGAVLDIRYGVSRIAYSKDFETLKVDFLSKLPEMLKMFEDRLCHKTYLNGDHVTHPDFMLYDALDVVLYMDPMCLDAFPKLVCFKKRIEAIPQIDKYLKSSKYIAWPLQGWQATFGGGDHPPKSDLVPRGSPGIHRDGGSGENLYFQSSDNGPQNQRNAPRITFGGPSDSTGSNQNGERSGARSKQRRPQGLPNNTASWFTGLTQNGKEDLKFPPGQGVPINTNSSPDDQIGYYRRATRRIRGGDGKMKDLPPKWYFYYLGTGPHADLPYGQKKDGVFWVARPGALNTPKDHIGTRNPANNAAIPLQLPPGTKLPKGFYAEGSRGGSQASSRSSSRSRNSSRNSTPGSSRGTSPARMAGNGGDAALALLLLDRLNQLESKMSGKGQQQQGQTVTKKSAAEASKKPRQKRTATKAYNVTQAFGRRGPEQTQGNFGDQELIRQGTDYKHWPQIAQFAPSASAFFGMSRIGMEVTPSGTWLTYTGAIKLDDKDPNFKDQVILLNKHIDAYKTFPPTEPKKDKKKKADETQALPQRQKKQQTVTLLPAADLDDFSKQLQQSMSSADSTQA

SEQ ID NO: 604 - protein, 671 aa, Artificial Sequence
  Description of Artificial Sequence: Synthetic polypeptide
MHHHHHHGGSGSPILGYWKIKGLVQPTRLLLEYLEEKYEEHLYERDEGDKWRNKKFELGLEFPNLPYYIDGDVKLTQSMAIIRYIADKHNMLGGCPKERAEISMLEGAVLDIRYGVSRIAYSKDFETLKVDFLSKLPEMLKMFEDRLCHKTYLNGDHVTHPDFMLYDALDVVLYMDPMCLDAFPKLVCFKKRIEAIPQIDKYLKSSKYIAWPLQGWQATFGGGDHPPKSDLVPRGSPGIHRDGGSGENLYFQSSDNGPQNQRNAPRITFGGPSDSTGSNQNGERSGARSKQRRPQGLPNNTASWFTGLTQHGKEDLKFPPGQGVPINTNSSPDDQIGYYRRATRRIRGGDGKMKDLPPRWYFYYLGTGPEADLPYGAVKPGIFWVAEEGALNTPKDHIGTRNPANNAAIPLQLPPGTTLPKGFYAEGSRGGSQASSRSSSRSRNSSRNSTPGSSRGTSPARMAGNGGDAALALLLLDRLNQLESKMSGKGQQQQGQTVTKKSAAEASKKPRQKRTATKAYNVTQAFGRRGPEQTQGNFGDQELIRQGTDYKHWPQIAQFAPSASAFFGMSRIGMEVTPSGTWLTYTGAIKLDDKDPNFKDQVILLNKHIDAYKTFPPTEPKKDKKKKADETQALPQRQKKQQTVTLLPAADLDDFSKQLQQSMSSADSTQA

SEQ ID NO: 605 - protein, 671 aa, Artificial Sequence
  Description of Artificial Sequence: Synthetic polypeptide
MHHHHHHGGSGSPILGYWKIKGLVQPTRLLLEYLEEKYEEHLYERDEGDKWRNKKFELGLEFPNLPYYIDGDVKLTQSMAIIRYIADKHNMLGGCPKERAEISMLEGAVLDIRYGVSRIAYSKDFETLKVDFLSKLPEMLKMFEDRLCHKTYLNGDHVTHPDFMLYDALDVVLYMDPMCLDAFPKLVCFKKRIEAIPQIDKYLKSSKYIAWPLQGWQATFGGGDHPPKSDLVPRGSPGIHRDGGSGENLYFQSSDNGPQNQRNAPRITFGGPSDSTGSNQNGERSGARSKQRRPQGLPNNTASWFTALTQHGKEDLKFPRGQGVPINTNSSPDDQIGYYRRATRRIRGGDGKMKDLSPRWYFYYLGTGPEAGLPYGANKDGIIWVATEGALNTPKDHIGTRNPANNAAIVLQLPQGTTLPKGFYAEGSRGGSQASSRSSSRSRNSSRNSTPGSSRGTSPARMAGNGGDAALALLLLDRLNQLESKMSGKGQQQQGQTVTKKSAAEASKKPRQKRTATKAYNVTQAFGRRGPEQTQGNFGDQELIKQGTDYKHWPQIAQFAPSASAFFGMSRIGMEVTPSGTWLTYTGAIKLDDKDPNFKDQVILLNKHIDAYKTFPPTEPKKDKKKKADETQALPQRQKKQQTVTLLPAADLDDFSKQLQQSMSSADSTQA

SEQ ID NO: 606 - protein, 671 aa, Artificial Sequence
  Description of Artificial Sequence: Synthetic polypeptide
MHHHHHHGGSGSPILGYWKIKGLVQPTRLLLEYLEEKYEEHLYERDEGDKWRNKKFELGLEFPNLPYYIDGDVKLTQSMAIIRYIADKHNMLGGCPKERAEISMLEGAVLDIRYGVSRIAYSKDFETLKVDFLSKLPEMLKMFEDRLCHKTYLNGDHVTHPDFMLYDALDVVLYMDPMCLDAFPKLVCFKKRIEAIPQIDKYLKSSKYIAWPLQGWQATFGGGDHPPKSDLVPRGSPGIHRDGGSGENLYFQSSDNGPQNQRNAPRITFGGPSDSTGSNQNGERSGARSKQRRPQGLPNNTASWFTALTQHGKEDLKFPRGQGVPINTNSSPDDQIGYYRRATRRIRGGDGKMKDLSPRWYFYYLGTGPEAGLPYGANKDGIIWVATEGALNTPKDHIGTRNPANNAAIVLQLPQGTTLPKGFYAEGSRGGSQASSRSSSRSRNSSRNSTPGSSRGTSPARMAGNGGDAALALLLLDRLNQLESKMSGKGQQQQGQTVTKKSAAEASKKPRQKRTATKDYNVTQAFGRRGPEQTQGNFGDQELIRQGTDYKHWPQIAQFAPSASAFFGMSRIGMEVTPSGTWLTYTGAIKLDDKDPNFKDQVILLNKHIDAYKTFPPTEPKKDKKKKADETQALPQRQKKQQTVTLLPAADLDDFSKQLQQSMSSADSTQA

SEQ ID NO: 607 - protein, 671 aa, Artificial Sequence
  Description of Artificial Sequence: Synthetic polypeptide
MHHHHHHGGSGSPILGYWKIKGLVQPTRLLLEYLEEKYEEHLYERDEGDKWRNKKFELGLEFPNLPYYIDGDVKLTQSMAIIRYIADKHNMLGGCPKERAEISMLEGAVLDIRYGVSRIAYSKDFETLKVDFLSKLPEMLKMFEDRLCHKTYLNGDHVTHPDFMLYDALDVVLYMDPMCLDAFPKLVCFKKRIEAIPQIDKYLKSSKYIAWPLQGWQATFGGGDHPPKSDLVPRGSPGIHRDGGSGENLYFQSSDNGPQNQRNAPRITFGGPSDSTGSNQNGERSGARSKQRRPQGLPNNTASWFTALTQHGKEDLKFPRGQGVPINTNSSPDDQIGYYRRATRRIRGGDGKMKDLSPRWYFYYLGTGPEAGLPYGANKDGIIWVATEGALNTPKDHIGTRNPANNAAIVLQLPQGTTLPKGFYAEGSRGGSQASSRSSSRSRNSSRNSTPGSSRGTSPARMAGNGGDAALALLLLDRLNQLESKMSGKGQQQQGQTVTKKSAAEASKKPRQKRTATKAYNVTQAFGRRGPEQTQGNFGDQELIRQGTDYKHWPQIAQFAPSASAFFGMSRIGMEKTPSGTWLTYTGAIKLDDKDPNFKDQVILLNKHIDAYKTFPPTEPKKDKKKKADETQALPQRQKKQQTVTLLPAADLDDFSKQLQQSMSSADSTQA

SEQ ID NO: 608 - protein, 671 aa, Artificial Sequence
  Description of Artificial Sequence: Synthetic polypeptide
MHHHHHHGGSGSPILGYWKIKGLVQPTRLLLEYLEEKYEEHLYERDEGDKWRNKKFELGLEFPNLPYYIDGDVKLTQSMAIIRYIADKHNMLGGCPKERAEISMLEGAVLDIRYGVSRIAYSKDFETLKVDFLSKLPEMLKMFEDRLCHKTYLNGDHVTHPDFMLYDALDVVLYMDPMCLDAFPKLVCFKKRIEAIPQIDKYLKSSKYIAWPLQGWQATFGGGDHPPKSDLVPRGSPGIHRDGGSGENLYFQSSDNGPQNQRNAPRITFGGPSDSTGSNQNGERSGARSKQRRPQGLPNNTASWFTPLTQNGKEDLKFPPGQGVPINTNSSPDDQIGYYRRATRRIRGGDGKMKDLPPKWYFYYLGTGPHADLPYGQKHPGVFWVARPGALNTPKDHIGTRNPANNAAIPLQLPPGTKLPKGFYAEGSRGGSQASSRSSSRSRNSSRNSTPGSSRGTSPARMAGNGGDAALALLLLDRLNQLESKMSGKGQQQQGQTVTKKSAAEASKKPRQKRTATKAYNVTQAFGRRGPEQTQGNFGDQELIRQGTDYKHWPQIAQFAPSASAFFGMSRIGMEVTPSGTWLTYTGAIKLDDKDPNFKDQVILLNKHIDAYKTFPPTEPKKDKKKKADETQALPQRQKKQQTVTLLPAADLDDFSKQLQQSMSSADSTQA

SEQ ID NO: 609 - protein, 671 aa, Artificial Sequence
  Description of Artificial Sequence: Synthetic polypeptide
MHHHHHHGGSGSPILGYWKIKGLVQPTRLLLEYLEEKYEEHLYERDEGDKWRNKKFELGLEFPNLPYYIDGDVKLTQSMAIIRYIADKHNMLGGCPKERAEISMLEGAVLDIRYGVSRIAYSKDFETLKVDFLSKLPEMLKMFEDRLCHKTYLNGDHVTHPDFMLYDALDVVLYMDPMCLDAFPKLVCFKKRIEAIPQIDKYLKSSKYIAWPLQGWQATFGGGDHPPKSDLVPRGSPGIHRDGGSGENLYFQSSDNGPQNQRNAPRITFGGPSDSTGSNQNGERSGARSKQRRPQGLPNNTASWFTALTQHGKEDLKFPRGQGVPINTNSSPDDQIGYYRRATRRIRGGDGKMKDLSPRWYFYYLGTGPEAGLPYGANKDGIIWVATEGALNTPKDHIGTRNPANNTAIVLQLPQGTTLPKGFYAEGSRGGSQASSRSSSRSRNSSRNSTPGSSRGTSPARMAGNGGDAALALLLLDRLNQLESKMSGKGQQQQGQTVTKKSAAEASKKPRQKRTATKAYNVTQAFGRRGPEQTQGNFGDQELIRQGTDYKHWPQIAQFAPSASAFFGMSRIGMEVTPSGTWLTYTGAIKLDDKDPNFKDQVILLNKHIDAYKTFPPTEPKKDKKKKADETQALPQRQKKQQTVTLLPAADLDDFSKQLQQSMSSADSTQA

SEQ ID NO: 610 - protein, 671 aa, Artificial Sequence
  Description of Artificial Sequence: Synthetic polypeptide
MHHHHHHGGSGSPILGYWKIKGLVQPTRLLLEYLEEKYEEHLYERDEGDKWRNKKFELGLEFPNLPYYIDGDVKLTQSMAIIRYIADKHNMLGGCPKERAEISMLEGAVLDIRYGVSRIAYSKDFETLKVDFLSKLPEMLKMFEDRLCHKTYLNGDHVTHPDFMLYDALDVVLYMDPMCLDAFPKLVCFKKRIEAIPQIDKYLKSSKYIAWPLQGWQATFGGGDHPPKSDLVPRGSPGIHRDGGSGENLYFQSSDNGPQNQRNAPRITFGGPSDSTGSNQNGERSGARSKQRRPQGLPNNTASWFTALTQHGKEDLKFPRGQGVPINTNSSPDDQIGYYRRATRRIRGGDGKMKDLSPRWYFYYLGTGPEAGLPYGANKDGIIWVATEGALNTPKDHIGTRNPANNAAIVLQLPQGTTLPKGFYAEGSRGGSQASSRSSSRSRNSSRNSTPGSSRGTSPARMAGNGGDAALALLLLDRLNQLESKMSGKGQQQQGQTVTKKSAAEASKKPRQKRTATKAYNVTQAFGRRGPEQTQGNFGDQELIRQGTDYKHWPQIAQFAPSASAFFGMSRIGMERTPSGTWLTYTGAIKLDDKDPNFKDQVILLNKHIDAYKTFPPTEPKKDKKKKADETQALPQRQKKQQTVTLLPAADLDDFSKQLQQSMSSADSTQA

SEQ ID NO: 611 - protein, 671 aa, Artificial Sequence
  Description of Artificial Sequence: Synthetic polypeptide
MHHHHHHGGSGSPILGYWKIKGLVQPTRLLLEYLEEKYEEHLYERDEGDKWRNKKFELGLEFPNLPYYIDGDVKLTQSMAIIRYIADKHNMLGGCPKERAEISMLEGAVLDIRYGVSRIAYSKDFETLKVDFLSKLPEMLKMFEDRLCHKTYLNGDHVTHPDFMLYDALDVVLYMDPMCLDAFPKLVCFKKRIEAIPQIDKYLKSSKYIAWPLQGWQATFGGGDHPPKSDLVPRGSPGIHRDGGSGENLYFQSSDNGPQNQRNAPRITFGGPSDSTGSNQNGERSGARSKQRRPQGLPNNTASWFTALTQHGKEDLKFPRGQGVPINTNSSPDDQIGYYRRATRRIRGGDGKMKDLSPRWYFYYLGTGPEAGLPYGANKDGIIWVATEGALNTPKDHIGTRNPANNAAIVLQLPQGTTLPKGFYAEGSRGGSQASSRSSSRSRNSSRNSTPGSSRGTSPARMAGNGGDAALALLLLDRLNQLESKMSGKGQQQQGQTVTKKSAAEASKKPRQKRTATKAYNVTQAFGRRGPEQTQGNFGDQELIRQGTDYKHWPQIAQFAPSASAFFGMSRIGMEETPSGTWLTYTGAIKLDDKDPNFKDQVILLNKHIDAYKTFPPTEPKKDKKKKADETQALPQRQKKQQTVTLLPAADLDDFSKQLQQSMSSADSTQA

SEQ ID NO: 612 - protein, 671 aa, Artificial Sequence
  Description of Artificial Sequence: Synthetic polypeptide
MHHHHHHGGSGSPILGYWKIKGLVQPTRLLLEYLEEKYEEHLYERDEGDKWRNKKFELGLEFPNLPYYIDGDVKLTQSMAIIRYIADKHNMLGGCPKERAEISMLEGAVLDIRYGVSRIAYSKDFETLKVDFLSKLPEMLKMFEDRLCHKTYLNGDHVTHPDFMLYDALDVVLYMDPMCLDAFPKLVCFKKRIEAIPQIDKYLKSSKYIAWPLQGWQATFGGGDHPPKSDLVPRGSPGIHRDGGSGENLYFQSSDNGPQNQRNAPRITFGGPSDSTGSNQNGERSGARSKQRRPQGLPNNTASWFTALTQHGKEDLKFPRGQGVPINTNSSPDDQIGYYRRATRRIRGGDGKMKDLSPRWYFYYLGTGPEAGLPYGANKDGIIWVATEGALNTPKDHIGTRNPANNAAIVLQLPQGTTLPKGFYAEGSRGGSQASSRSSSRSRNSSRNSTPGSSRGTSPARMAGNGGDAALALLLLDRLNQLESKMSGKGQQQQGQTVTKKSAAEASKKPRQKRTATKAYNVTQAFGRRGPEQTQGNFGDQELIRQGTDYKHWPQIAQFAPSASAFFGMSRIGMEDTPSGTWLTYTGAIKLDDKDPNFKDQVILLNKHIDAYKTFPPTEPKKDKKKKADETQALPQRQKKQQTVTLLPAADLDDFSKQLQQSMSSADSTQA

SEQ ID NO: 613 - protein, 671 aa, Artificial Sequence
  Description of Artificial Sequence: Synthetic polypeptide
MHHHHHHGGSGSPILGYWKIKGLVQPTRLLLEYLEEKYEEHLYERDEGDKWRNKKFELGLEFPNLPYYIDGDVKLTQSMAIIRYIADKHNMLGGCPKERAEISMLEGAVLDIRYGVSRIAYSKDFETLKVDFLSKLPEMLKMFEDRLCHKTYLNGDHVTHPDFMLYDALDVVLYMDPMCLDAFPKLVCFKKRIEAIPQIDKYLKSSKYIAWPLQGWQATFGGGDHPPKSDLVPRGSPGIHRDGGSGENLYFQSSDNGPQNQRNAPRITFGGPSDSTGSNQNGERSGARSKQRRPQGLPNNTASWFTALTQHGKEDLKFPRGQGVPINTNSSPDDQIGYYRRATRRIRGGDGKMKDLSPRWYFYYTGTGPEAGLPYGANKDGIIWVATEGALNTPKDHIGTRNPANNAAIVLQLPQGTTLPKGFYAEGSRGGSQASSRSSSRSRNSSRNSTPGSSRGTSPARMAGNGGDAALALLLLDRLNQLESKMSGKGQQQQGQTVTKKSAAEASKKPRQKRTATKAYNVTQAFGRRGPEQTQGNFGDQELIRQGTDYKHWPQIAQFAPSASAFFGMSRIGMEVTPSGTWLTYTGAIKLDDKDPNFKDQVILLNKHIDAYKTFPPTEPKKDKKKKADETQALPQRQKKQQTVTLLPAADLDDFSKQLQQSMSSADSTQA

SEQ ID NO: 614 - protein, 671 aa, Artificial Sequence
  Description of Artificial Sequence: Synthetic polypeptide
MHHHHHHGGSGSPILGYWKIKGLVQPTRLLLEYLEEKYEEHLYERDEGDKWRNKKFELGLEFPNLPYYIDGDVKLTQSMAIIRYIADKHNMLGGCPKERAEISMLEGAVLDIRYGVSRIAYSKDFETLKVDFLSKLPEMLKMFEDRLCHKTYLNGDHVTHPDFMLYDALDVVLYMDPMCLDAFPKLVCFKKRIEAIPQIDKYLKSSKYIAWPLQGWQATFGGGDHPPKSDLVPRGSPGIHRDGGSGENLYFQSSDNGPQNQRNAPRITFGGPSDSTGSNQNGERSGARSKQRRPQGLPNNTASWFTALTQHGKEDLKFPRGQGVPINTNSSPDDQIGYYRRATRRIRGGDGKMKDLSPRWYFYYLGTGPEAQLPYGANKDGIIWVATEGALNTPKDHIGTRNPANNAAIVLQLPQGTTLPKGFYAEGSRGGSQASSRSSSRSRNSSRNSTPGSSRGTSPARMAGNGGDAALALLLLDRLNQLESKMSGKGQQQQGQTVTKKSAAEASKKPRQKRTATKAYNVTQAFGRRGPEQTQGNFGDQELIRQGTDYKHWPQIAQFAPSASAFFGMSRIGMEVTPSGTWLTYTGAIKLDDKDPNFKDQVILLNKHIDAYKTFPPTEPKKDKKKKADETQALPQRQKKQQTVTLLPAADLDDFSKQLQQSMSSADSTQA

SEQ ID NO: 615 - protein, 671 aa, Artificial Sequence
  Description of Artificial Sequence: Synthetic polypeptide
MHHHHHHGGSGSPILGYWKIKGLVQPTRLLLEYLEEKYEEHLYERDEGDKWRNKKFELGLEFPNLPYYIDGDVKLTQSMAIIRYIADKHNMLGGCPKERAEISMLEGAVLDIRYGVSRIAYSKDFETLKVDFLSKLPEMLKMFEDRLCHKTYLNGDHVTHPDFMLYDALDVVLYMDPMCLDAFPKLVCFKKRIEAIPQIDKYLKSSKYIAWPLQGWQATFGGGDHPPKSDLVPRGSPGIHRDGGSGENLYFQSSDNGPQNQRNAPRITFGGPSDSTGSNQNGERSGARSKQRRPQGLPNNTASWFTALTQHGKEDLKFPRGQGVPINTNSSPDDQIGYYRRATRRIRGGDGKMKDLSPRWYFYYLGTGPEAGLPYGANKDGIIWVATEGALNTPKDHIGTRNPANNAAIVLQLPQGTTLPKNFYAEGSRGGSQASSRSSSRSRNSSRNSTPGSSRGTSPARMAGNGGDAALALLLLDRLNQLESKMSGKGQQQQGQTVTKKSAAEASKKPRQKRTATKAYNVTQAFGRRGPEQTQGNFGDQELIRQGTDYKHWPQIAQFAPSASAFFGMSRIGMEVTPSGTWLTYTGAIKLDDKDPNFKDQVILLNKHIDAYKTFPPTEPKKDKKKKADETQALPQRQKKQQTVTLLPAADLDDFSKQLQQSMSSADSTQA

SEQ ID NO: 616 - protein, 671 aa, Artificial Sequence
  Description of Artificial Sequence: Synthetic polypeptide
MHHHHHHGGSGSPILGYWKIKGLVQPTRLLLEYLEEKYEEHLYERDEGDKWRNKKFELGLEFPNLPYYIDGDVKLTQSMAIIRYIADKHNMLGGCPKERAEISMLEGAVLDIRYGVSRIAYSKDFETLKVDFLSKLPEMLKMFEDRLCHKTYLNGDHVTHPDFMLYDALDVVLYMDPMCLDAFPKLVCFKKRIEAIPQIDKYLKSSKYIAWPLQGWQATFGGGDHPPKSDLVPRGSPGIHRDGGSGENLYFQSSDNGPQNQRNAPRITFGGPSDSTGSNQNGERSGARSKQRRPQGLPNNTASWFTALTQHGKEDLKFPRGQGVPINTNSSPDDQIGYYRRATRRIRGGDGKMKDLSPRWYFYYLGTGPEAGLPYGANKDGIIWVATEGALNTPKDHIGTRNPANNAAIVLQLPQGTTLPKGFYAEGSRGGSQASSRSSSRSRNSSRNSTPGSSRGTSPARMAGNGGDAALALLLLDRLNQLESKMSGKGQQQQGQTVTKKSAAEASKKPRQKRTATKAYNVTQAFGRRGPEQTQGNFGDSELIRQGTDYKHWPQIAQFAPSASAFFGMSRIGMEVTPSGTWLTYTGAIKLDDKDPNFKDQVILLNKHIDAYKTFPPTEPKKDKKKKADETQALPQRQKKQQTVTLLPAADLDDFSKQLQQSMSSADSTQA

SEQ ID NO: 617 - protein, 671 aa, Artificial Sequence
  Description of Artificial Sequence: Synthetic polypeptide
MHHHHHHGGSGSPILGYWKIKGLVQPTRLLLEYLEEKYEEHLYERDEGDKWRNKKFELGLEFPNLPYYIDGDVKLTQSMAIIRYIADKHNMLGGCPKERAEISMLEGAVLDIRYGVSRIAYSKDFETLKVDFLSKLPEMLKMFEDRLCHKTYLNGDHVTHPDFMLYDALDVVLYMDPMCLDAFPKLVCFKKRIEAIPQIDKYLKSSKYIAWPLQGWQATFGGGDHPPKSDLVPRGSPGIHRDGGSGENLYFQSSDNGPQNQRNAPRITFGGPSDSTGSNQNGERSGARSKQRRPQGLPNNTASWFTALTQHGKEDLKFPRGQGVPINTNSSPDDQIGYYRRATRRIRGGDGKMKDLSPRWYFYYLGTGPEAGLPYGANKDGIIWVATEGALNTPKDHIGTRNPANNAAIVLQLPQGTTLPKGFYAEGSRGGSQASSRSSERSRNSSRNSTPGEERGTEPARMAGNGGDAALALLLLDRLNQLESKMSGKGQQQQGQTVTKKSAAEASKKPRQKRTATKAYNVTQAFGRRGPEQTQGNFGDQELIRQGTDYKHWPQIAQFAPSASAFFGMSRIGMEVTPSGTWLTYTGAIKLDDKDPNFKDQVILLNKHIDAYKTFPPTEPKKDKKKKADETQALPQRQKKQQTVTLLPAADLDDFSKQLQQSMSSADSTQA

SEQ ID NO: 618 - protein, 671 aa, Artificial Sequence
  Description of Artificial Sequence: Synthetic polypeptide
MHHHHHHGGSGSPILGYWKIKGLVQPTRLLLEYLEEKYEEHLYERDEGDKWRNKKFELGLEFPNLPYYIDGDVKLTQSMAIIRYIADKHNMLGGCPKERAEISMLEGAVLDIRYGVSRIAYSKDFETLKVDFLSKLPEMLKMFEDRLCHKTYLNGDHVTHPDFMLYDALDVVLYMDPMCLDAFPKLVCFKKRIEAIPQIDKYLKSSKYIAWPLQGWQATFGGGDHPPKSDLVPRGSPGIHRDGGSGENLYFQSSDNGPQNQRNAPRITFGGPSDSTGSNQNGERSGARSKQRRPQGLPNNTASWFTALTQNGKEDLKFPRGQGVPINTNSSPDDQIGYYRRATRRIRGGDGKMKDLSPRWYFYYLGTGPEAGLPYGANKDGIIWVATEGALNTPKDHIGTRNPANNAAIVLQLPQGTTLPKGFYAEGSRGGSQASSRSSSRSRNSSRNSTPGSSRGTSPARMAGNGGDAALALLLLDRLNQLESKMSGKGQQQQGQTVTKKSAAEASKKPRQKRTATKAYNVTQAFGRRGPEQTQGNFGDQELIRQGTDYKHWPQIAQFAPSASAFFGMSRIGMEVTPSGTWLTYTGAIKLDDKDPNFKDQVILLNKHIDAYKTFPPTEPKKDKKKKADETQALPQRQKKQQTVTLLPAADLDDFSKQLQQSMSSADSTQA

SEQ ID NO: 619 - protein, 671 aa, Artificial Sequence
  Description of Artificial Sequence: Synthetic polypeptide
MHHHHHHGGSGSPILGYWKIKGLVQPTRLLLEYLEEKYEEHLYERDEGDKWRNKKFELGLEFPNLPYYIDGDVKLTQSMAIIRYIADKHNMLGGCPKERAEISMLEGAVLDIRYGVSRIAYSKDFETLKVDFLSKLPEMLKMFEDRLCHKTYLNGDHVTHPDFMLYDALDVVLYMDPMCLDAFPKLVCFKKRIEAIPQIDKYLKSSKYIAWPLQGWQATFGGGDHPPKSDLVPRGSPGIHRDGGSGENLYFQSSDNGPQNQRNAPRITFGGPSDSTGSNQNGERSGARSKQRRPQGLPNNTASWFTALTQHGKEDLKFPRGQGVPINENSSPDDQIGYYRRATRRIRGGDGKMKDLSPRWYFYYLGTGPEAGLPYGANKDGIIWVATEGALNTPKDHIGTRNPANNAAIVLQLPQGTTLPKGFYAEGSRGGSQASSRSSSRSRNSSRNSTPGSSRGTSPARMAGNGGDAALALLLLDRLNQLESKMSGKGQQQQGQTVTKKSAAEASKKPRQKRTATKAYNVTQAFGRRGPEQTQGNFGDQELIRQGTDYKHWPQIAQFAPSASAFFGMSRIGMEVTPSGTWLTYTGAIKLDDKDPNFKDQVILLNKHIDAYKTFPPTEPKKDKKKKADETQALPQRQKKQQTVTLLPAADLDDFSKQLQQSMSSADSTQA

SEQ ID NO: 620 - protein, 671 aa, Artificial Sequence
  Description of Artificial Sequence: Synthetic polypeptide
MHHHHHHGGSGSPILGYWKIKGLVQPTRLLLEYLEEKYEEHLYERDEGDKWRNKKFELGLEFPNLPYYIDGDVKLTQSMAIIRYIADKHNMLGGCPKERAEISMLEGAVLDIRYGVSRIAYSKDFETLKVDFLSKLPEMLKMFEDRLCHKTYLNGDHVTHPDFMLYDALDVVLYMDPMCLDAFPKLVCFKKRIEAIPQIDKYLKSSKYIAWPLQGWQATFGGGDHPPKSDLVPRGSPGIHRDGGSGENLYFQSSDNGPQNQRNAPRITFGGPSDSTGSNQNGERSGARSKQRRPQGLPNNTASWFTALTQHGKEDLKFPKGQGVPINTNSKPDDQIGYYRREVRRYRGGDGQMKDLNPRWYFYYLGTGPEAGLPYGANKDGIIWVATEGALNTPKDHIGTRNPANNAAIVLQLPQGTTLPKGFYAEGSRGGSQASSRSSSRSRNSSRNSTPGSSRGTSPARMAGNGGDAALALLLLDRLNQLESKMSGKGQQQQGQTVTKKSAAEASKKPRQKRTATKAYNVTQAFGRRGPEQTQGNFGDQELIRQGTDYKHWPQIAQFAPSASAFFGMSRIGMEVTPSGTWLTYTGAIKLDDKDPNFKDQVILLNKHIDAYKTFPPTEPKKDKKKKADETQALPQRQKKQQTVTLLPAADLDDFSKQLQQSMSSADSTQA

SEQ ID NO: 621 - protein, 671 aa, Artificial Sequence
  Description of Artificial Sequence: Synthetic polypeptide
MHHHHHHGGSGSPILGYWKIKGLVQPTRLLLEYLEEKYEEHLYERDEGDKWRNKKFELGLEFPNLPYYIDGDVKLTQSMAIIRYIADKHNMLGGCPKERAEISMLEGAVLDIRYGVSRIAYSKDFETLKVDFLSKLPEMLKMFEDRLCHKTYLNGDHVTHPDFMLYDALDVVLYMDPMCLDAFPKLVCFKKRIEAIPQIDKYLKSSKYIAWPLQGWQATFGGGDHPPKSDLVPRGSPGIHRDGGSGENLYFQSSDNGPQNQRNAPRITFGGPSDSTGSNQNGERSGARSKQRRPQGLPNNTASWFTALTQHGKEDLKFPRGQGVPINTNSSPDDQIGYYRRATRRIRGGDGKMKDLSPRWYFYYLGTGPEAGLPYGANKDGIIWVATEGALNTPKDHIGTRNPANNAAIVLQLPQGTTLPKGFYAEGSRGGSQASSRSSSRSRNSSRNSTPGSSRGTSPARMAGNGGDAALALLLLDRLNQLESKMSGKGQQQQGQTVTKKSAAEASKKPRQKRTATKAYNVTQAFGRRGPEQTQGNFGDEELIRQGTDYKHWPQIAQFAPSASAFFGMSRIGMEVTPSGTWLTYTGAIKLDDKDPNFKDQVILLNKHIDAYKTFPPTEPKKDKKKKADETQALPQRQKKQQTVTLLPAADLDDFSKQLQQSMSSADSTQA

SEQ ID NO: 622 - protein, 671 aa, Artificial Sequence
  Description of Artificial Sequence: Synthetic polypeptide
MHHHHHHGGSGSPILGYWKIKGLVQPTRLLLEYLEEKYEEHLYERDEGDKWRNKKFELGLEFPNLPYYIDGDVKLTQSMAIIRYIADKHNMLGGCPKERAEISMLEGAVLDIRYGVSRIAYSKDFETLKVDFLSKLPEMLKMFEDRLCHKTYLNGDHVTHPDFMLYDALDVVLYMDPMCLDAFPKLVCFKKRIEAIPQIDKYLKSSKYIAWPLQGWQATFGGGDHPPKSDLVPRGSPGIHRDGGSGENLYFQSSDNGPQNQRNAPRITFGGPSDSTGSNQNGERSGARSKQRRPQGLPNNTASWFTALTQHGKEDLKFPRGQGVPINTNSSPDDQIGYYRRATRRIRGGDGKMKDLSPRWYFYYLGTGPYAGLPYGANKDGIIWVATEGALNTPKDHIGTRNPANNAAIVLQLPQGTTLPKGFYAEGSRGGSQASSRSSSRSRNSSRNSTPGSSRGTSPARMAGNGGDAALALLLLDRLNQLESKMSGKGQQQQGQTVTKKSAAEASKKPRQKRTATKAYNVTQAFGRRGPEQTQGNFGDQELIRQGTDYKHWPQIAQFAPSASAFFGMSRIGMEVTPSGTWLTYTGAIKLDDKDPNFKDQVILLNKHIDAYKTFPPTEPKKDKKKKADETQALPQRQKKQQTVTLLPAADLDDFSKQLQQSMSSADSTQA

SEQ ID NO: 623 - protein, 671 aa, Artificial Sequence
  Description of Artificial Sequence: Synthetic polypeptide
MHHHHHHGGSGSPILGYWKIKGLVQPTRLLLEYLEEKYEEHLYERDEGDKWRNKKFELGLEFPNLPYYIDGDVKLTQSMAIIRYIADKHNMLGGCPKERAEISMLEGAVLDIRYGVSRIAYSKDFETLKVDFLSKLPEMLKMFEDRLCHKTYLNGDHVTHPDFMLYDALDVVLYMDPMCLDAFPKLVCFKKRIEAIPQIDKYLKSSKYIAWPLQGWQATFGGGDHPPKSDLVPRGSPGIHRDGGSGENLYFQSSDNGPQNQRNAPRITFGGPSDSTGSNQNGERSGARSKQRRPQGLPNNTASWFTALTQHGKEDLKFPRGQGVPINTNSSPDDQIGYYRRATRRIRGGDGKMKDLSPRWYFYYLGTGPEAGLPYGANKDGIIWVATEGALNTPKDHIGTRNPANNAAIVLQLAQGTTLPKGFYAEGSRGGSQASSRSSSRSRNSSRNSTPGSSRGTSPARMAGNGGDAALALLLLDRLNQLESKMSGKGQQQQGQTVTKKSAAEASKKPRQKRTATKAYNVTQAFGRRGPEQTQGNFGDQELIRQGTDYKHWPQIAQFAPSASAFFGMSRIGMEVTPSGTWLTYTGAIKLDDKDPNFKDQVILLNKHIDAYKTFPPTEPKKDKKKKADETQALPQRQKKQQTVTLLPAADLDDFSKQLQQSMSSADSTQA

SEQ ID NO: 624 - protein, 671 aa, Artificial Sequence
  Description of Artificial Sequence: Synthetic polypeptide
MHHHHHHGGSGSPILGYWKIKGLVQPTRLLLEYLEEKYEEHLYERDEGDKWRNKKFELGLEFPNLPYYIDGDVKLTQSMAIIRYIADKHNMLGGCPKERAEISMLEGAVLDIRYGVSRIAYSKDFETLKVDFLSKLPEMLKMFEDRLCHKTYLNGDHVTHPDFMLYDALDVVLYMDPMCLDAFPKLVCFKKRIEAIPQIDKYLKSSKYIAWPLQGWQATFGGGDHPPKSDLVPRGSPGIHRDGGSGENLYFQSSDNGPQNQRNAPRITFGGPSDSTGSNQNGERSGARSKQRRPQGLPNNTASWFTGLTQFGKEDLKFPPGQGVPINTNSSPDDQIGYYRRATRRIRGGDGKMKDLPPRWYFYYLGTGPHADLPYGQKQDGVFWVARPGALNTPKDHIGTRNPANNAAIPLQLPPGTKLPKGFYAEGSRGGSQASSRSSSRSRNSSRNSTPGSSRGTSPARMAGNGGDAALALLLLDRLNQLESKMSGKGQQQQGQTVTKKSAAEASKKPRQKRTATKAYNVTQAFGRRGPEQTQGNFGDQELIRQGTDYKHWPQIAQFAPSASAFFGMSRIGMEVTPSGTWLTYTGAIKLDDKDPNFKDQVILLNKHIDAYKTFPPTEPKKDKKKKADETQALPQRQKKQQTVTLLPAADLDDFSKQLQQSMSSADSTQA

SEQ ID NO: 625 - protein, 671 aa, Artificial Sequence
  Description of Artificial Sequence: Synthetic polypeptide
MHHHHHHGGSGSPILGYWKIKGLVQPTRLLLEYLEEKYEEHLYERDEGDKWRNKKFELGLEFPNLPYYIDGDVKLTQSMAIIRYIADKHNMLGGCPKERAEISMLEGAVLDIRYGVSRIAYSKDFETLKVDFLSKLPEMLKMFEDRLCHKTYLNGDHVTHPDFMLYDALDVVLYMDPMCLDAFPKLVCFKKRIEAIPQIDKYLKSSKYIAWPLQGWQATFGGGDHPPKSDLVPRGSPGIHRDGGSGENLYFQSSDNGPQNQRNAPRITFGGPSDSTGSNQNGERSGARSKQRRPQGLPNNTASWFTALTQHGKEDLKFPRGQGVPINTNSSPDDQIGYYRRATRRIRGGDGKMKDLSPRWYFYYLGTGPEAGLPYGANKDGVIWVATEGALNTPKDHIGTRNPANNAAIVLQLPQGTTLPKGFYAEGSRGGSQASSRSSSRSRNSSRNSTPGSSRGTSPARMAGNGGDAALALLLLDRLNQLESKMSGKGQQQQGQTVTKKSAAEASKKPRQKRTATKAYNVTQAFGRRGPEQTQGNFGDQELIRQGTDYKHWPQIAQFAPSASAFFGMSRIGMEVTPSGTWLTYTGAIKLDDKDPNFKDQVILLNKHIDAYKTFPPTEPKKDKKKKADETQALPQRQKKQQTVTLLPAADLDDFSKQLQQSMSSADSTQA

SEQ ID NO: 626 - protein, 671 aa, Artificial Sequence
  Description of Artificial Sequence: Synthetic polypeptide
MHHHHHHGGSGSPILGYWKIKGLVQPTRLLLEYLEEKYEEHLYERDEGDKWRNKKFELGLEFPNLPYYIDGDVKLTQSMAIIRYIADKHNMLGGCPKERAEISMLEGAVLDIRYGVSRIAYSKDFETLKVDFLSKLPEMLKMFEDRLCHKTYLNGDHVTHPDFMLYDALDVVLYMDPMCLDAFPKLVCFKKRIEAIPQIDKYLKSSKYIAWPLQGWQATFGGGDHPPKSDLVPRGSPGIHRDGGSGENLYFQSSDNGPQNQRNAPRITFGGPSDSTGSNQNGERSGARSKQRRPQGLPNNTASWFQALTQHGKEDLKFPRGQGVPINTNSSPDDQIGYYRRATRRIRGGDGKMKDLSPRWYFYYLGTGPEAGLPYGANKDGIIWVATEGALNTPKDHIGTRNPANNAAIVLQLPQGTTLPKGFYAEGSRGGSQASSRSSSRSRNSSRNSTPGSSRGTSPARMAGNGGDAALALLLLDRLNQLESKMSGKGQQQQGQTVTKKSAAEASKKPRQKRTATKAYNVTQAFGRRGPEQTQGNFGDQELIRQGTDYKHWPQIAQFAPSASAFFGMSRIGMEVTPSGTWLTYTGAIKLDDKDPNFKDQVILLNKHIDAYKTFPPTEPKKDKKKKADETQALPQRQKKQQTVTLLPAADLDDFSKQLQQSMSSADSTQA

SEQ ID NO: 627 - protein, 671 aa, Artificial Sequence
  Description of Artificial Sequence: Synthetic polypeptide
MHHHHHHGGSGSPILGYWKIKGLVQPTRLLLEYLEEKYEEHLYERDEGDKWRNKKFELGLEFPNLPYYIDGDVKLTQSMAIIRYIADKHNMLGGCPKERAEISMLEGAVLDIRYGVSRIAYSKDFETLKVDFLSKLPEMLKMFEDRLCHKTYLNGDHVTHPDFMLYDALDVVLYMDPMCLDAFPKLVCFKKRIEAIPQIDKYLKSSKYIAWPLQGWQATFGGGDHPPKSDLVPRGSPGIHRDGGSGENLYFQSSDNGPQNQRNAPRITFGGPSDSTGSNQNGERSGARSKQRRPQGLPNNTASWFTGLTQHGKEDLKFPPGQGVPINTNSSPDDQIGYYRRATRRIRGGDGKMKDLPPRWYFYYLGTGPEADLPYGQVKPGIVWVAEEGALNTPKDHIGTRNPANNAAIPLQLPPGTTLPKGFYAEGSRGGSQASSRSSSRSRNSSRNSTPGSSRGTSPARMAGNGGDAALALLLLDRLNQLESKMSGKGQQQQGQTVTKKSAAEASKKPRQKRTATKAYNVTQAFGRRGPEQTQGNFGDQELIRQGTDYKHWPQIAQFAPSASAFFGMSRIGMEVTPSGTWLTYTGAIKLDDKDPNFKDQVILLNKHIDAYKTFPPTEPKKDKKKKADETQALPQRQKKQQTVTLLPAADLDDFSKQLQQSMSSADSTQA

SEQ ID NO: 628 - protein, 671 aa, Artificial Sequence
  Description of Artificial Sequence: Synthetic polypeptide
MHHHHHHGGSGSPILGYWKIKGLVQPTRLLLEYLEEKYEEHLYERDEGDKWRNKKFELGLEFPNLPYYIDGDVKLTQSMAIIRYIADKHNMLGGCPKERAEISMLEGAVLDIRYGVSRIAYSKDFETLKVDFLSKLPEMLKMFEDRLCHKTYLNGDHVTHPDFMLYDALDVVLYMDPMCLDAFPKLVCFKKRIEAIPQIDKYLKSSKYIAWPLQGWQATFGGGDHPPKSDLVPRGSPGIHRDGGSGENLYFQSSDNGPQNQRNAPRITFGGPSDSTGSNQNGERSGARSKQRRPQGLPNNTASWFTALTQHGKEDLKFPRGQGVPINTNSSPDDQIGYYRRATRRIRGGDGKMKDLSPRWYFYYLGTGPEAGLPYGANKDGIIWVATEGALNTPKDHIGTRNPANNAAIVLQLPQGTTLPKGFYAEGSRGGSQASSRSSSRSRNSSRNSTPGSSRGTSPARMAGNGGDAALALLLLDRLNQLESKMSGKGQQQQGQTVTKKSAAEASKKPRQKRTATKGYNVTQAFGRRGPEQTQGNFGDQDLIKLGTDYKHWPQIAQFAPSASAFFGMSRISTEETPSGTWLTYTGAIKLDKKDPNFKDQVILLNKHIDAYKTFPPTEPKKDKKKKADETQALPQRQKKQQTVTLLPAADLDDFSKQLQQSMSSADSTQA

SEQ ID NO: 629 - protein, 671 aa, Artificial Sequence
  Description of Artificial Sequence: Synthetic polypeptide
MHHHHHHGGSGSPILGYWKIKGLVQPTRLLLEYLEEKYEEHLYERDEGDKWRNKKFELGLEFPNLPYYIDGDVKLTQSMAIIRYIADKHNMLGGCPKERAEISMLEGAVLDIRYGVSRIAYSKDFETLKVDFLSKLPEMLKMFEDRLCHKTYLNGDHVTHPDFMLYDALDVVLYMDPMCLDAFPKLVCFKKRIEAIPQIDKYLKSSKYIAWPLQGWQATFGGGDHPPKSDLVPRGSPGIHRDGGSGENLYFQSSDNGPQNQRNAPRITFGGPSDSTGSNQNGERSGARSKQRRPQGLPNNTASWFTALTQHGKEDLKFPRGQGVPINTNSSPDDQIGYYRRATRRIRGGDGKMKDLSPRWYFYYLGTGPEAGLPYGASKDGIIWVATEGALNTPKDHIGTRNPANNAAIVLQLPQGTTLPKGFYAEGSRGGSQASSRSSSRSRNSSRNSTPGSSRGTSPARMAGNGGDAALALLLLDRLNQLESKMSGKGQQQQGQTVTKKSAAEASKKPRQKRTATKAYNVTQAFGRRGPEQTQGNFGDQELIRQGTDYKHWPQIAQFAPSASAFFGMSRIGMEVTPSGTWLTYTGAIKLDDKDPNFKDQVILLNKHIDAYKTFPPTEPKKDKKKKADETQALPQRQKKQQTVTLLPAADLDDFSKQLQQSMSSADSTQA

SEQ ID NO: 630 - protein, 671 aa, Artificial Sequence
  Description of Artificial Sequence: Synthetic polypeptide
MHHHHHHGGSGSPILGYWKIKGLVQPTRLLLEYLEEKYEEHLYERDEGDKWRNKKFELGLEFPNLPYYIDGDVKLTQSMAIIRYIADKHNMLGGCPKERAEISMLEGAVLDIRYGVSRIAYSKDFETLKVDFLSKLPEMLKMFEDRLCHKTYLNGDHVTHPDFMLYDALDVVLYMDPMCLDAFPKLVCFKKRIEAIPQIDKYLKSSKYIAWPLQGWQATFGGGDHPPKSDLVPRGSPGIHRDGGSGENLYFQSSDNGPQNQRNAPRITFGGPSDSTGSNQNGERSGARSKQRRPQGLPNNTASWFTALTQHGKEDLKFPRGQGVPINTNSSPDDQIGYYRRATRRIRGGDGKMKDLSPRWYFYYLGTGPEAGLPYGARKDGIIWVATEGALNTPKDHIGTRNPANNAAIVLQLPQGTTLPKGFYAEGSRGGSQASSRSSSRSRNSSRNSTPGSSRGTSPARMAGNGGDAALALLLLDRLNQLESKMSGKGQQQQGQTVTKKSAAEASKKPRQKRTATKAYNVTQAFGRRGPEQTQGNFGDQELIRQGTDYKHWPQIAQFAPSASAFFGMSRIGMEVTPSGTWLTYTGAIKLDDKDPNFKDQVILLNKHIDAYKTFPPTEPKKDKKKKADETQALPQRQKKQQTVTLLPAADLDDFSKQLQQSMSSADSTQA

SEQ ID NO: 631 - protein, 671 aa, Artificial Sequence
  Description of Artificial Sequence: Synthetic polypeptide
MHHHHHHGGSGSPILGYWKIKGLVQPTRLLLEYLEEKYEEHLYERDEGDKWRNKKFELGLEFPNLPYYIDGDVKLTQSMAIIRYIADKHNMLGGCPKERAEISMLEGAVLDIRYGVSRIAYSKDFETLKVDFLSKLPEMLKMFEDRLCHKTYLNGDHVTHPDFMLYDALDVVLYMDPMCLDAFPKLVCFKKRIEAIPQIDKYLKSSKYIAWPLQGWQATFGGGDHPPKSDLVPRGSPGIHRDGGSGENLYFQSSDNGPQNQRNAPRITFGGPSDSTGSNQNGERSGARSKQRRPQGLPNNTASWFTALTQHGKEDLKFPRGQGVPINTNSSPDDQIGYYRRATRRIRGGDGKMKDLSPRWYFYYLGTGPEAGLPYGANKDGIIWVATEGALNTPKDHIGTRNPANNAAIVLQLPQGTTLPKGFYAEGSRGGSQASSRSSSRSRNSSRNSTPGSSRGTSPARMAGNGGDAALALLLLDRLNQLESKMSGKGQQQQGQTVTKKSAAEASKKPRQKRTATKHYNVTQAFGRRGPEQTQGNFGDQELIRQGTDYKHWPQIAQFAPSASAFFGMSRIGMEVTPSGTWLTYTGAIKLDDKDPNFKDQVILLNKHIDAYKTFPPTEPKKDKKKKADETQALPQRQKKQQTVTLLPAADLDDFSKQLQQSMSSADSTQA

SEQ ID NO: 632 - protein, 671 aa, Artificial Sequence
  Description of Artificial Sequence: Synthetic polypeptide
MHHHHHHGGSGSPILGYWKIKGLVQPTRLLLEYLEEKYEEHLYERDEGDKWRNKKFELGLEFPNLPYYIDGDVKLTQSMAIIRYIADKHNMLGGCPKERAEISMLEGAVLDIRYGVSRIAYSKDFETLKVDFLSKLPEMLKMFEDRLCHKTYLNGDHVTHPDFMLYDALDVVLYMDPMCLDAFPKLVCFKKRIEAIPQIDKYLKSSKYIAWPLQGWQATFGGGDHPPKSDLVPRGSPGIHRDGGSGENLYFQSSDNGPQNQRNAPRITFGGPSDSTGSNQNGERSGARSKQRRPQGLPNNTASWFTPLTQHGKEDLKFPPGQGVPINTNSSPDDQIGYYRRATRRIRGGDGKMKDLPPRWYFYYLGTGPEADLPYGAVKPGIFWVAEEGALNTPKDHIGTRNPANNAAIPLQLPPGTTLPKGFYAEGSRGGSQASSRSSSRSRNSSRNSTPGSSRGTSPARMAGNGGDAALALLLLDRLNQLESKMSGKGQQQQGQTVTKKSAAEASKKPRQKRTATKAYNVTQAFGRRGPEQTQGNFGDQELIRQGTDYKHWPQIAQFAPSASAFFGMSRIGMEVTPSGTWLTYTGAIKLDDKDPNFKDQVILLNKHIDAYKTFPPTEPKKDKKKKADETQALPQRQKKQQTVTLLPAADLDDFSKQLQQSMSSADSTQA

SEQ ID NO: 633 - protein, 671 aa, Artificial Sequence
  Description of Artificial Sequence: Synthetic polypeptide
MHHHHHHGGSGSPILGYWKIKGLVQPTRLLLEYLEEKYEEHLYERDEGDKWRNKKFELGLEFPNLPYYIDGDVKLTQSMAIIRYIADKHNMLGGCPKERAEISMLEGAVLDIRYGVSRIAYSKDFETLKVDFLSKLPEMLKMFEDRLCHKTYLNGDHVTHPDFMLYDALDVVLYMDPMCLDAFPKLVCFKKRIEAIPQIDKYLKSSKYIAWPLQGWQATFGGGDHPPKSDLVPRGSPGIHRDGGSGENLYFQSSDNGPQNQRNAPRITFGGPSDSTGSNQNGERSGARSKQRRPQGLPNNTASWFTALTQHGKEDLKFPRGQGVPINTNSSPDDQIGYYRRATRRIRGGDGKMKDLSPRWYFYYLGTGPEAGLPYGANKDGIIWVATEGALNTPKDHIGTRNPANNAAIVLQLPQGTTLPKGFYAEGSRGGSQASSRSSSRSRNSSRNSTPGSSRGTSPARMAGNGGDAALALLLLDRLNQLESKMSGKGQQQQGQTVTKKSAAEASKKPRQKRTATKAYNVTQAFGRRGPEQTQGNFGDQELIRQGTDDKHWPQIAQFAPSASAFFGMSRIGMEVTPSGTWLTYTGAIKLDDKDPNFKDQVILLNKHIDAYKTFPPTEPKKDKKKKADETQALPQRQKKQQTVTLLPAADLDDFSKQLQQSMSSADSTQA

SEQ ID NO: 634 - protein, 671 aa, Artificial Sequence
  Description of Artificial Sequence: Synthetic polypeptide
MHHHHHHGGSGSPILGYWKIKGLVQPTRLLLEYLEEKYEEHLYERDEGDKWRNKKFELGLEFPNLPYYIDGDVKLTQSMAIIRYIADKHNMLGGCPKERAEISMLEGAVLDIRYGVSRIAYSKDFETLKVDFLSKLPEMLKMFEDRLCHKTYLNGDHVTHPDFMLYDALDVVLYMDPMCLDAFPKLVCFKKRIEAIPQIDKYLKSSKYIAWPLQGWQATFGGGDHPPKSDLVPRGSPGIHRDGGSGENLYFQSSDNGPQNQRNAPRITFGGPSDSTGSNQNGERSGARSKQRRPQGLPNNTASWFTALTQHGKEDLKFPRGQGVPINTNSSPDDQIGYYRRRTRRIRGGDGKMKDLSPRWYFYYLGTGPEAGLPYGANKDGIIWVATEGALNTPKDHIGTRNPANNAAIVLQLPQGTTLPKGFYAEGSRGGSQASSRSSSRSRNSSRNSTPGSSRGTSPARMAGNGGDAALALLLLDRLNQLESKMSGKGQQQQGQTVTKKSAAEASKKPRQKRTATKAYNVTQAFGRRGPEQTQGNFGDQELIRQGTDYKHWPQIAQFAPSASAFFGMSRIGMEVTPSGTWLTYTGAIKLDDKDPNFKDQVILLNKHIDAYKTFPPTEPKKDKKKKADETQALPQRQKKQQTVTLLPAADLDDFSKQLQQSMSSADSTQA

SEQ ID NO: 635 - protein, 671 aa, Artificial Sequence
  Description of Artificial Sequence: Synthetic polypeptide
MHHHHHHGGSGSPILGYWKIKGLVQPTRLLLEYLEEKYEEHLYERDEGDKWRNKKFELGLEFPNLPYYIDGDVKLTQSMAIIRYIADKHNMLGGCPKERAEISMLEGAVLDIRYGVSRIAYSKDFETLKVDFLSKLPEMLKMFEDRLCHKTYLNGDHVTHPDFMLYDALDVVLYMDPMCLDAFPKLVCFKKRIEAIPQIDKYLKSSKYIAWPLQGWQATFGGGDHPPKSDLVPRGSPGIHRDGGSGENLYFQSSDNGPQNQRNAPRITFGGPSDSTGSNQNGERSGARSKQRRPQGLPNNTASWFTGLTQHGKEDLKFPPGQGVPINTNSSPDDQIGYYRRATRRIRGGDGKMKDLPPRWYFYYLGTGPEADLPYGAVKDGIFWVAEEGALNTPKDHIGTRNPANNAAIPLQLPPGTTLPKGFYAEGSRGGSQASSRSSSRSRNSSRNSTPGSSRGTSPARMAGNGGDAALALLLLDRLNQLESKMSGKGQQQQGQTVTKKSAAEASKKPRQKRTATKAYNVTQAFGRRGPEQTQGNFGDQELIRQGTDYKHWPQIAQFAPSASAFFGMSRIGMEVTPSGTWLTYTGAIKLDDKDPNFKDQVILLNKHIDAYKTFPPTEPKKDKKKKADETQALPQRQKKQQTVTLLPAADLDDFSKQLQQSMSSADSTQA

SEQ ID NO: 636 - protein, 671 aa, Artificial Sequence
  Description of Artificial Sequence: Synthetic polypeptide
MHHHHHHGGSGSPILGYWKIKGLVQPTRLLLEYLEEKYEEHLYERDEGDKWRNKKFELGLEFPNLPYYIDGDVKLTQSMAIIRYIADKHNMLGGCPKERAEISMLEGAVLDIRYGVSRIAYSKDFETLKVDFLSKLPEMLKMFEDRLCHKTYLNGDHVTHPDFMLYDALDVVLYMDPMCLDAFPKLVCFKKRIEAIPQIDKYLKSSKYIAWPLQGWQATFGGGDHPPKSDLVPRGSPGIHRDGGSGENLYFQSSDNGPQNQRNAPRITFGGPSDSTGSNQNGERSGARSKQRRPQGLPNNTASWFTALTQHGKEDLKFPRGQGVPINTNSSPDDQIGYYRRATRRIRGGDGKMKDLSPRWYFYYSGTGPEAGLPYGANKDGIIWVATEGALNTPKDHIGTRNPANNAAIVLQLPQGTTLPKGFYAEGSRGGSQASSRSSSRSRNSSRNSTPGSSRGTSPARMAGNGGDAALALLLLDRLNQLESKMSGKGQQQQGQTVTKKSAAEASKKPRQKRTATKAYNVTQAFGRRGPEQTQGNFGDQELIRQGTDYKHWPQIAQFAPSASAFFGMSRIGMEVTPSGTWLTYTGAIKLDDKDPNFKDQVILLNKHIDAYKTFPPTEPKKDKKKKADETQALPQRQKKQQTVTLLPAADLDDFSKQLQQSMSSADSTQA

SEQ ID NO: 637 - protein, 671 aa, Artificial Sequence
  Description of Artificial Sequence: Synthetic polypeptide
MHHHHHHGGSGSPILGYWKIKGLVQPTRLLLEYLEEKYEEHLYERDEGDKWRNKKFELGLEFPNLPYYIDGDVKLTQSMAIIRYIADKHNMLGGCPKERAEISMLEGAVLDIRYGVSRIAYSKDFETLKVDFLSKLPEMLKMFEDRLCHKTYLNGDHVTHPDFMLYDALDVVLYMDPMCLDAFPKLVCFKKRIEAIPQIDKYLKSSKYIAWPLQGWQATFGGGDHPPKSDLVPRGSPGIHRDGGSGENLYFQSSDNGPQNQRNAPRITFGGPSDSTGSNQNGERSGARSKQRRPQGLPNNTASWFTALTQHGKEDLKFPRGQGVPINTNSSPDDQIGYYRRATRRIRGGDGKMKDLSPRWYFYYLGTGPEAGLPYGANKDGIIWVATEGAMNTPKDHIGTRNPANNAAIVLQLPQGTTLPKGFYAEGSRGGSQASSRSSSRSRNSSRNSTPGSSRGTSPARMAGNGGDAALALLLLDRLNQLESKMSGKGQQQQGQTVTKKSAAEASKKPRQKRTATKAYNVTQAFGRRGPEQTQGNFGDQELIRQGTDYKHWPQIAQFAPSASAFFGMSRIGMEVTPSGTWLTYTGAIKLDDKDPNFKDQVILLNKHIDAYKTFPPTEPKKDKKKKADETQALPQRQKKQQTVTLLPAADLDDFSKQLQQSMSSADSTQA

SEQ ID NO: 638 - protein, 671 aa, Artificial Sequence
  Description of Artificial Sequence: Synthetic polypeptide
MHHHHHHGGSGSPILGYWKIKGLVQPTRLLLEYLEEKYEEHLYERDEGDKWRNKKFELGLEFPNLPYYIDGDVKLTQSMAIIRYIADKHNMLGGCPKERAEISMLEGAVLDIRYGVSRIAYSKDFETLKVDFLSKLPEMLKMFEDRLCHKTYLNGDHVTHPDFMLYDALDVVLYMDPMCLDAFPKLVCFKKRIEAIPQIDKYLKSSKYIAWPLQGWQATFGGGDHPPKSDLVPRGSPGIHRDGGSGENLYFQSSDNGPQNQRNAPRITFGGPSDSTGSNQNGERSGARSKQRRPQGLPNNTASWFTGLTQNGKEDLKFPPGQGVPINTNSSPDDQIGYYRRATRRIRGGDGKMKDLPPRWYFYYLGTGPHADLPYGQKQDGVFWVARPGALNTPKDHIGTRNPANNAAIPLQLPPGTKLPKGFYAEGSRGGSQASSRSSSRSRNSSRNSTPGSSRGTSPARMAGNGGDAALALLLLDRLNQLESKMSGKGQQQQGQTVTKKSAAEASKKPRQKRTATKAYNVTQAFGRRGPEQTQGNFGDQELIRQGTDYKHWPQIAQFAPSASAFFGMSRIGMEVTPSGTWLTYTGAIKLDDKDPNFKDQVILLNKHIDAYKTFPPTEPKKDKKKKADETQALPQRQKKQQTVTLLPAADLDDFSKQLQQSMSSADSTQA

SEQ ID NO: 639 - protein, 671 aa, Artificial Sequence
  Description of Artificial Sequence: Synthetic polypeptide
MHHHHHHGGSGSPILGYWKIKGLVQPTRLLLEYLEEKYEEHLYERDEGDKWRNKKFELGLEFPNLPYYIDGDVKLTQSMAIIRYIADKHNMLGGCPKERAEISMLEGAVLDIRYGVSRIAYSKDFETLKVDFLSKLPEMLKMFEDRLCHKTYLNGDHVTHPDFMLYDALDVVLYMDPMCLDAFPKLVCFKKRIEAIPQIDKYLKSSKYIAWPLQGWQATFGGGDHPPKSDLVPRGSPGIHRDGGSGENLYFQSSDNGPQNQRNAPRITFGGPSDSTGSNQNGERSGARSKQRRPQGLPNNTASWFTALTQHGKEDLKFPRGQGVPINTNSSPDDQIGYYRRATRRIRGGDGKMKDLSPRWYFYYLGTGPEAGLPYGANKDGIIWVATEGALNTPKDHIGTRNPANNAAIKLQLPQGTTLPKGFYAEGSRGGSQASSRSSSRSRNSSRNSTPGSSRGTSPARMAGNGGDAALALLLLDRLNQLESKMSGKGQQQQGQTVTKKSAAEASKKPRQKRTATKAYNVTQAFGRRGPEQTQGNFGDQELIRQGTDYKHWPQIAQFAPSASAFFGMSRIGMEVTPSGTWLTYTGAIKLDDKDPNFKDQVILLNKHIDAYKTFPPTEPKKDKKKKADETQALPQRQKKQQTVTLLPAADLDDFSKQLQQSMSSADSTQA

SEQ ID NO: 640 - protein, 671 aa, Artificial Sequence
  Description of Artificial Sequence: Synthetic polypeptide
MHHHHHHGGSGSPILGYWKIKGLVQPTRLLLEYLEEKYEEHLYERDEGDKWRNKKFELGLEFPNLPYYIDGDVKLTQSMAIIRYIADKHNMLGGCPKERAEISMLEGAVLDIRYGVSRIAYSKDFETLKVDFLSKLPEMLKMFEDRLCHKTYLNGDHVTHPDFMLYDALDVVLYMDPMCLDAFPKLVCFKKRIEAIPQIDKYLKSSKYIAWPLQGWQATFGGGDHPPKSDLVPRGSPGIHRDGGSGENLYFQSSDNGPQNQRNAPRITFGGPSDSTGSNQNGERSGARSKQRRPQGLPNNTASWFTALTQHGKEDLKFPRGQGVPINTNSSPDDQIGYYRRATRRIRGGDGKMKDLSPRWYFYYLGTGPEAGLPYGANKDGIIWVATEGALNTPKDHIGSRNPANNAAIVLQLPQGTTLPKGFYAEGSRGGSQASSRSSSRSRNSSRNSTPGSSRGTSPARMAGNGGDAALALLLLDRLNQLESKMSGKGQQQQGQTVTKKSAAEASKKPRQKRTATKAYNVTQAFGRRGPEQTQGNFGDQELIRQGTDYKHWPQIAQFAPSASAFFGMSRIGMEVTPSGTWLTYTGAIKLDDKDPNFKDQVILLNKHIDAYKTFPPTEPKKDKKKKADETQALPQRQKKQQTVTLLPAADLDDFSKQLQQSMSSADSTQA

SEQ ID NO: 641 - protein, 671 aa, Artificial Sequence
  Description of Artificial Sequence: Synthetic polypeptide
MHHHHHHGGSGSPILGYWKIKGLVQPTRLLLEYLEEKYEEHLYERDEGDKWRNKKFELGLEFPNLPYYIDGDVKLTQSMAIIRYIADKHNMLGGCPKERAEISMLEGAVLDIRYGVSRIAYSKDFETLKVDFLSKLPEMLKMFEDRLCHKTYLNGDHVTHPDFMLYDALDVVLYMDPMCLDAFPKLVCFKKRIEAIPQIDKYLKSSKYIAWPLQGWQATFGGGDHPPKSDLVPRGSPGIHRDGGSGENLYFQSSDNGPQNQRNAPRITFGGPSDSTGSNQNGERSGARSKQRRPQGLPNNTASWFTALTQHGKEDLKFPRGQGVPINTNSSPDDQIGYYRRATRRIRGGDGKMKDLSPRWYFYYLGTGPEAGLPYGANKDGIIWVATEGALNTPKDHIGTRNPANNAAIVLQLPQGTTLPKGFYAEGSRGGSQASSRSSSRSRNSSRNSTPGSSRGTSPARMAGNGGDAALALLLLDRLNQLESKMSGKGQQQQGQTVTKKSAAEASKKPRQKRTATKAYNVTQAFGRRGPEQTQGNFGDQELIRQGTDYKHWPQIAQFAPSASAFFGMSRIGMEVTPDGTWLTYTGAIKLDDKDPNFKDQVILLNKHIDAYKTFPPTEPKKDKKKKADETQALPQRQKKQQTVTLLPAADLDDFSKQLQQSMSSADSTQA

SEQ ID NO: 642 - protein, 671 aa, Artificial Sequence
  Description of Artificial Sequence: Synthetic polypeptide
MHHHHHHGGSGSPILGYWKIKGLVQPTRLLLEYLEEKYEEHLYERDEGDKWRNKKFELGLEFPNLPYYIDGDVKLTQSMAIIRYIADKHNMLGGCPKERAEISMLEGAVLDIRYGVSRIAYSKDFETLKVDFLSKLPEMLKMFEDRLCHKTYLNGDHVTHPDFMLYDALDVVLYMDPMCLDAFPKLVCFKKRIEAIPQIDKYLKSSKYIAWPLQGWQATFGGGDHPPKSDLVPRGSPGIHRDGGSGENLYFQSSDNGPQNQRNAPRITFGGPSDSTGSNQNGERSGARSKQRRPQGLPNNTASWFTALTQHGKEDLKFPRGQGVPINTNSSPDDQIGYYRRATRRIRGGDGKMKDLSPRWYFYYLGTGPEAGLPYGANKDGIIWVATEGALNTPKDHIGTRNPANNAAIVLQLPQGTTLPKGFYAEGSRGGSQASSRSSSRSRNSSRNSTPGSSRGTSPARMAGNGGDAALALLLLDRLNQLESKMSGKGQQQQGQTVTKKSAAEMSKKPRQKRTATKGCNVTQCFGPRGPEQTQGNFGDDDLIKLGTDYKHWPQIAQFAPSASAFFGMSRISSKEQPSGTWLTYTGAIKLDKDDPNFKDQVILLNKHIDAYKTFPPTEPKKDKKKKADETQALPQRQKKQQTVTLLPAADLDDFSKQLQQSMSSADSTQA

SEQ ID NO: 643 - protein, 671 aa, Artificial Sequence
  Description of Artificial Sequence: Synthetic polypeptide
MHHHHHHGGSGSPILGYWKIKGLVQPTRLLLEYLEEKYEEHLYERDEGDKWRNKKFELGLEFPNLPYYIDGDVKLTQSMAIIRYIADKHNMLGGCPKERAEISMLEGAVLDIRYGVSRIAYSKDFETLKVDFLSKLPEMLKMFEDRLCHKTYLNGDHVTHPDFMLYDALDVVLYMDPMCLDAFPKLVCFKKRIEAIPQIDKYLKSSKYIAWPLQGWQATFGGGDHPPKSDLVPRGSPGIHRDGGSGENLYFQSSDNGPQNQRNAPRITFGGPSDSTGSNQNGERSGARSKQRRPQGLPNNTASWFTALTQHGKEDLKFPRGQGVPINTNSSPDDQIGYYRRATRRIRGGDGKMKDLSPRWYFYYLGTGPEAGLPYGANKDGIIWVATEGALNTPKDHIGTRNPANNAAIVLQLPQGTTLPKGFYAEGSRGGSQASSRSSSRSRNSSRNSTPGSSRGTSPARMAGNGGDAALALLLLDRLNQLESKMSGKGQQQQGQTVTKKSAAEASKKPRQKRTATKAYNVTQAFGRRGPEQTQGNFGDQELIRQGTDYKHWPQIAQFAPSASAFFGMSRIGMEVTPSGTWLTYTGKIKLDDKDPNFKDQVILLNKHIDAYKTFPPTEPKKDKKKKADETQALPQRQKKQQTVTLLPAADLDDFSKQLQQSMSSADSTQA

SEQ ID NO: 644 - protein, 671 aa, Artificial Sequence
  Description of Artificial Sequence: Synthetic polypeptide
MHHHHHHGGSGSPILGYWKIKGLVQPTRLLLEYLEEKYEEHLYERDEGDKWRNKKFELGLEFPNLPYYIDGDVKLTQSMAIIRYIADKHNMLGGCPKERAEISMLEGAVLDIRYGVSRIAYSKDFETLKVDFLSKLPEMLKMFEDRLCHKTYLNGDHVTHPDFMLYDALDVVLYMDPMCLDAFPKLVCFKKRIEAIPQIDKYLKSSKYIAWPLQGWQATFGGGDHPPKSDLVPRGSPGIHRDGGSGENLYFQSSDNGPQNQRNAPRITFGGPSDSTGSNQNGERSGARSKQRRPQGLPNNTASWFTALTQHGKEDLKFPRGQGVPINTNSSPDDQIGYYRRATRRYRGGDGKMKDLSPRWYFYYLGTGPEAGLPYGANKDGIIWVATEGALNTPKDHIGTRNPANNAAIVLQLPQGTTLPKGFYAEGSRGGSQASSRSSSRSRNSSRNSTPGSSRGTSPARMAGNGGDAALALLLLDRLNQLESKMSGKGQQQQGQTVTKKSAAEASKKPRQKRTATKAYNVTQAFGRRGPEQTQGNFGDQELIRQGTDYKHWPQIAQFAPSASAFFGMSRIGMEVTPSGTWLTYTGAIKLDDKDPNFKDQVILLNKHIDAYKTFPPTEPKKDKKKKADETQALPQRQKKQQTVTLLPAADLDDFSKQLQQSMSSADSTQA

SEQ ID NO: 645 - protein, 671 aa, Artificial Sequence
  Description of Artificial Sequence: Synthetic polypeptide
MHHHHHHGGSGSPILGYWKIKGLVQPTRLLLEYLEEKYEEHLYERDEGDKWRNKKFELGLEFPNLPYYIDGDVKLTQSMAIIRYIADKHNMLGGCPKERAEISMLEGAVLDIRYGVSRIAYSKDFETLKVDFLSKLPEMLKMFEDRLCHKTYLNGDHVTHPDFMLYDALDVVLYMDPMCLDAFPKLVCFKKRIEAIPQIDKYLKSSKYIAWPLQGWQATFGGGDHPPKSDLVPRGSPGIHRDGGSGENLYFQSSDNGPQNQRNAPRITFGGPSDSTGSNQNGERSGARSKQRRPQGLPNNTASWFTALTQHGKEDLKFPRGQGVPINTNSSPDDQIGYYRRATRRIRGGDGKMKDLSPRWYFYYHGTGPEAGLPYGANKDGIIWVATEGALNTPKDHIGTRNPANNAAIVLQLPQGTTLPKGFYAEGSRGGSQASSRSSSRSRNSSRNSTPGSSRGTSPARMAGNGGDAALALLLLDRLNQLESKMSGKGQQQQGQTVTKKSAAEASKKPRQKRTATKAYNVTQAFGRRGPEQTQGNFGDQELIRQGTDYKHWPQIAQFAPSASAFFGMSRIGMEVTPSGTWLTYTGAIKLDDKDPNFKDQVILLNKHIDAYKTFPPTEPKKDKKKKADETQALPQRQKKQQTVTLLPAADLDDFSKQLQQSMSSADSTQA

SEQ ID NO: 646 - protein, 671 aa, Artificial Sequence
  Description of Artificial Sequence: Synthetic polypeptide
MHHHHHHGGSGSPILGYWKIKGLVQPTRLLLEYLEEKYEEHLYERDEGDKWRNKKFELGLEFPNLPYYIDGDVKLTQSMAIIRYIADKHNMLGGCPKERAEISMLEGAVLDIRYGVSRIAYSKDFETLKVDFLSKLPEMLKMFEDRLCHKTYLNGDHVTHPDFMLYDALDVVLYMDPMCLDAFPKLVCFKKRIEAIPQIDKYLKSSKYIAWPLQGWQATFGGGDHPPKSDLVPRGSPGIHRDGGSGENLYFQSSDNGPQNQRNAPRITFGGPSDSTGSNQNGERSGARSKQRRPQGLPNNTASWFTALTQHGKEDLKFPRGQGVPINTNSSPDDQIGYYRRATRRIRGGDGKMKDLSPRWYFYYLGTGPEAGLPYGANKDGIIWVATEGALNTPKDHIGTRNPANNAAIVLQFPQGTTLPKGFYAEGSRGGSQASSRSSSRSRNSSRNSTPGSSRGTSPARMAGNGGDAALALLLLDRLNQLESKMSGKGQQQQGQTVTKKSAAEASKKPRQKRTATKAYNVTQAFGRRGPEQTQGNFGDQELIRQGTDYKHWPQIAQFAPSASAFFGMSRIGMEVTPSGTWLTYTGAIKLDDKDPNFKDQVILLNKHIDAYKTFPPTEPKKDKKKKADETQALPQRQKKQQTVTLLPAADLDDFSKQLQQSMSSADSTQA

SEQ ID NO: 647 - protein, 671 aa, Artificial Sequence
  Description of Artificial Sequence: Synthetic polypeptide
MHHHHHHGGSGSPILGYWKIKGLVQPTRLLLEYLEEKYEEHLYERDEGDKWRNKKFELGLEFPNLPYYIDGDVKLTQSMAIIRYIADKHNMLGGCPKERAEISMLEGAVLDIRYGVSRIAYSKDFETLKVDFLSKLPEMLKMFEDRLCHKTYLNGDHVTHPDFMLYDALDVVLYMDPMCLDAFPKLVCFKKRIEAIPQIDKYLKSSKYIAWPLQGWQATFGGGDHPPKSDLVPRGSPGIHRDGGSGENLYFQSSDNGPQNQRNAPRITFGGPSDSTGSNQNGERSGARSKQRRPQGLPNNTASWFTALTQHGKEDLKFPRGQGVPINTNSSPDDQIGYYRRATRRIRGGDGKMKDLSPRWYFYYLGTGPEAGLPYGANKDGIIWVATEGALNTPKDHIGTRNPANNAAIVLQLPQGTTLPKGFYAEGSRGGSQASSRSSSRSRNSSRNSTPGSSRGTSPARMAGNGGDAALALLLLDRLNQLESKMSGKGQQQQGQTVTKKSAAEMSKKPRQKRTATKGCNVTQCFGPRGPEQTQGNFGDAELVKKGTDYKHWPQIAQFAPSASAFFGMSRISSKETPSGTWLTYTGAIKLDKDDPNFKDQVILLNKHIDAYKTFPPTEPKKDKKKKADETQALPQRQKKQQTVTLLPAADLDDFSKQLQQSMSSADSTQA

SEQ ID NO: 648 - protein, 671 aa, Artificial Sequence
  Description of Artificial Sequence: Synthetic polypeptide
MHHHHHHGGSGSPILGYWKIKGLVQPTRLLLEYLEEKYEEHLYERDEGDKWRNKKFELGLEFPNLPYYIDGDVKLTQSMAIIRYIADKHNMLGGCPKERAEISMLEGAVLDIRYGVSRIAYSKDFETLKVDFLSKLPEMLKMFEDRLCHKTYLNGDHVTHPDFMLYDALDVVLYMDPMCLDAFPKLVCFKKRIEAIPQIDKYLKSSKYIAWPLQGWQATFGGGDHPPKSDLVPRGSPGIHRDGGSGENLYFQSSDNGPQNQRNAPRITFGGPSDSTGSNQNGERSGARSKQRRPQGLPNNTASWFTALTQHGKEDLKFPRGQGVPINTNSSPDDQIGYYRRATRRIRGGDGKMKDLSPLWYFYYLGTGPEAGLPYGANKDGIIWVATEGALNTPKDHIGTRNPANNAAIVLQLPQGTTLPKGFYAEGSRGGSQASSRSSSRSRNSSRNSTPGSSRGTSPARMAGNGGDAALALLLLDRLNQLESKMSGKGQQQQGQTVTKKSAAEASKKPRQKRTATKAYNVTQAFGRRGPEQTQGNFGDQELIRQGTDYKHWPQIAQFAPSASAFFGMSRIGMEVTPSGTWLTYTGAIKLDDKDPNFKDQVILLNKHIDAYKTFPPTEPKKDKKKKADETQALPQRQKKQQTVTLLPAADLDDFSKQLQQSMSSADSTQA

SEQ ID NO: 649 - protein, 671 aa, Artificial Sequence
  Description of Artificial Sequence: Synthetic polypeptide
MHHHHHHGGSGSPILGYWKIKGLVQPTRLLLEYLEEKYEEHLYERDEGDKWRNKKFELGLEFPNLPYYIDGDVKLTQSMAIIRYIADKHNMLGGCPKERAEISMLEGAVLDIRYGVSRIAYSKDFETLKVDFLSKLPEMLKMFEDRLCHKTYLNGDHVTHPDFMLYDALDVVLYMDPMCLDAFPKLVCFKKRIEAIPQIDKYLKSSKYIAWPLQGWQATFGGGDHPPKSDLVPRGSPGIHRDGGSGENLYFQSSDNGPQNQRNAPRITFGGPSDSTGSNQNGERSGARSKQRRPQGLPNNTASWFTALTQHGKEDLKFPRGQGVPINTNSSPDDQIGYYRRATRRIRGGDGKMKDLSPRWYFYYLGTGPEAGLPYGANKDGIIWVATEGALNTPKDHIGTRNPANNAAIVLQLPQGTTLPKGFYAEGSRGGSQASSRSSSRSRNSSRNSTPGSSRGTSPARMAGNGGDAALALLLLDRLNQLESKMSGKGQQQQGQTVTKKSAAEASKKPRQKRTATKAYNVTQAFGRRGPEQTQGNFGDQELIRQGTDYKHWPQIAQFAPSASAFFGMSRIGMEVTPSGTWLTYTGAIKLDPKDPNFKDQVILLNKHIDAYKTFPPTEPKKDKKKKADETQALPQRQKKQQTVTLLPAADLDDFSKQLQQSMSSADSTQA

SEQ ID NO: 650 - protein, 671 aa, Artificial Sequence
  Description of Artificial Sequence: Synthetic polypeptide
MHHHHHHGGSGSPILGYWKIKGLVQPTRLLLEYLEEKYEEHLYERDEGDKWRNKKFELGLEFPNLPYYIDGDVKLTQSMAIIRYIADKHNMLGGCPKERAEISMLEGAVLDIRYGVSRIAYSKDFETLKVDFLSKLPEMLKMFEDRLCHKTYLNGDHVTHPDFMLYDALDVVLYMDPMCLDAFPKLVCFKKRIEAIPQIDKYLKSSKYIAWPLQGWQATFGGGDHPPKSDLVPRGSPGIHRDGGSGENLYFQSSDNGPQNQRNAPRITFGGPSDSTGSNQNGERSGARSKQRRPQGLPNNTASWFTALTQHGKEDLKFPRGQGVPINTNSSPDDQIGYYRRATRRIRGGDGKMKDLSPRWYFYYLGTGPEAGLPYGANKDGIIWVATEGALNTPKDHIGTRNPANNAAIVLQLPQGTTLPKGFYAEGSRGGSQASSRSSSRSRNSSRNSTPGSSRGTSPARMAGNGGDAALALLLLDRLNQLESKMSGKGQQQQGQTVTKKSAAEASKKPRQKRTATKAYNVTQAFGRRGPEQTQGNFGDQEMIRQGTDYKHWPQIAQFAPSASAFFGMSRIGMEVTPSGTWLTYTGAIKLDDKDPNFKDQVILLNKHIDAYKTFPPTEPKKDKKKKADETQALPQRQKKQQTVTLLPAADLDDFSKQLQQSMSSADSTQA

SEQ ID NO: 651 - protein, 671 aa, Artificial Sequence
  Description of Artificial Sequence: Synthetic polypeptide
MHHHHHHGGSGSPILGYWKIKGLVQPTRLLLEYLEEKYEEHLYERDEGDKWRNKKFELGLEFPNLPYYIDGDVKLTQSMAIIRYIADKHNMLGGCPKERAEISMLEGAVLDIRYGVSRIAYSKDFETLKVDFLSKLPEMLKMFEDRLCHKTYLNGDHVTHPDFMLYDALDVVLYMDPMCLDAFPKLVCFKKRIEAIPQIDKYLKSSKYIAWPLQGWQATFGGGDHPPKSDLVPRGSPGIHRDGGSGENLYFQSSDNGPQNQRNAPRITFGGPSDSTGSNQNGERSGARSKQRRPQGLPNNTASWFTPLTQFGKEDLKFPPGQGVPINTNSSPDDQIGYYRRATRRIRGGDGKMKDLPPKWYFYYLGTGPHADLPYGQKHPGVVWVARPGALNTPKDHIGTRNPANNAAIPLQLPPGTKLPKGFYAEGSRGGSQASSRSSSRSRNSSRNSTPGSSRGTSPARMAGNGGDAALALLLLDRLNQLESKMSGKGQQQQGQTVTKKSAAEASKKPRQKRTATKAYNVTQAFGRRGPEQTQGNFGDQELIRQGTDYKHWPQIAQFAPSASAFFGMSRIGMEVTPSGTWLTYTGAIKLDDKDPNFKDQVILLNKHIDAYKTFPPTEPKKDKKKKADETQALPQRQKKQQTVTLLPAADLDDFSKQLQQSMSSADSTQA

SEQ ID NO: 652 - protein, 671 aa, Artificial Sequence
  Description of Artificial Sequence: Synthetic polypeptide
MHHHHHHGGSGSPILGYWKIKGLVQPTRLLLEYLEEKYEEHLYERDEGDKWRNKKFELGLEFPNLPYYIDGDVKLTQSMAIIRYIADKHNMLGGCPKERAEISMLEGAVLDIRYGVSRIAYSKDFETLKVDFLSKLPEMLKMFEDRLCHKTYLNGDHVTHPDFMLYDALDVVLYMDPMCLDAFPKLVCFKKRIEAIPQIDKYLKSSKYIAWPLQGWQATFGGGDHPPKSDLVPRGSPGIHRDGGSGENLYFQSSDNGPQNQRNAPRITFGGPSDSTGSNQNGERSGARSKQRRPQGLPNNTASWFTPLTQFGKEDLKFPPGQGVPINTNSSPDDQIGYYRRATRRIRGGDGKMKDLPPKWYFYYLGTGPHADLPYGQKHPGVFWVARPGALNTPKDHIGTRNPANNAAIPLQLPPGTKLPKGFYAEGSRGGSQASSRSSSRSRNSSRNSTPGSSRGTSPARMAGNGGDAALALLLLDRLNQLESKMSGKGQQQQGQTVTKKSAAEASKKPRQKRTATKAYNVTQAFGRRGPEQTQGNFGDQELIRQGTDYKHWPQIAQFAPSASAFFGMSRIGMEVTPSGTWLTYTGAIKLDDKDPNFKDQVILLNKHIDAYKTFPPTEPKKDKKKKADETQALPQRQKKQQTVTLLPAADLDDFSKQLQQSMSSADSTQA

SEQ ID NO: 653 - protein, 671 aa, Artificial Sequence
  Description of Artificial Sequence: Synthetic polypeptide
MHHHHHHGGSGSPILGYWKIKGLVQPTRLLLEYLEEKYEEHLYERDEGDKWRNKKFELGLEFPNLPYYIDGDVKLTQSMAIIRYIADKHNMLGGCPKERAEISMLEGAVLDIRYGVSRIAYSKDFETLKVDFLSKLPEMLKMFEDRLCHKTYLNGDHVTHPDFMLYDALDVVLYMDPMCLDAFPKLVCFKKRIEAIPQIDKYLKSSKYIAWPLQGWQATFGGGDHPPKSDLVPRGSPGIHRDGGSGENLYFQSSDNGPQNQRNAPRITFGGPSDSTGSNQNGERSGARSKQRRPQGLPNNTASWFTALTQHGKEDLKFPRGQGVPINTNSSPDDQIGYYRRATRRIRGGDGKMKDLSPRWYFYYLGTGPEAGLPYGAEKDGIIWVATEGALNTPKDHIGTRNPANNAAIVLQLPQGTTLPKGFYAEGSRGGSQASSRSSSRSRNSSRNSTPGSSRGTSPARMAGNGGDAALALLLLDRLNQLESKMSGKGQQQQGQTVTKKSAAEASKKPRQKRTATKAYNVTQAFGRRGPEQTQGNFGDQELIRQGTDYKHWPQIAQFAPSASAFFGMSRIGMEVTPSGTWLTYTGAIKLDDKDPNFKDQVILLNKHIDAYKTFPPTEPKKDKKKKADETQALPQRQKKQQTVTLLPAADLDDFSKQLQQSMSSADSTQA

SEQ ID NO: 654 - protein, 671 aa, Artificial Sequence
  Description of Artificial Sequence: Synthetic polypeptide
MHHHHHHGGSGSPILGYWKIKGLVQPTRLLLEYLEEKYEEHLYERDEGDKWRNKKFELGLEFPNLPYYIDGDVKLTQSMAIIRYIADKHNMLGGCPKERAEISMLEGAVLDIRYGVSRIAYSKDFETLKVDFLSKLPEMLKMFEDRLCHKTYLNGDHVTHPDFMLYDALDVVLYMDPMCLDAFPKLVCFKKRIEAIPQIDKYLKSSKYIAWPLQGWQATFGGGDHPPKSDLVPRGSPGIHRDGGSGENLYFQSSDNGPQNQRNAPRITFGGPSDSTGSNQNGERSGARSKQRRPQGLPNNTASWFTALTQHGKEDLKFPRGQGVPINTNSSPDDQIGYYRRATRRIRGGDGKMKDLSPRWYFYYLGTGPEAGLPYGANKDGIIWVATEGALNTPKDHIGTRNPANNAAIVLQLPQGTTLPKGFYAEGSRGGSQASSRSSSRSRNSSRNSTPGSSRGTSPARMAGNGGDAALALLLLDRLNQLESKMSGKGQQQQGQTVTKKSAAEASKKPRQKRTATKGYNVTQAFGRRGPEQTQGNFGDQDLNREGTDYKHWPQIAQFAPSASAFFGMSRISTEETPSGTWLTYTGAIKLDKKDPNFKDQVILLNKHIDAYKTFPPTEPKKDKKKKADETQALPQRQKKQQTVTLLPAADLDDFSKQLQQSMSSADSTQA

SEQ ID NO: 655 - protein, 671 aa, Artificial Sequence
  Description of Artificial Sequence: Synthetic polypeptide
MHHHHHHGGSGSPILGYWKIKGLVQPTRLLLEYLEEKYEEHLYERDEGDKWRNKKFELGLEFPNLPYYIDGDVKLTQSMAIIRYIADKHNMLGGCPKERAEISMLEGAVLDIRYGVSRIAYSKDFETLKVDFLSKLPEMLKMFEDRLCHKTYLNGDHVTHPDFMLYDALDVVLYMDPMCLDAFPKLVCFKKRIEAIPQIDKYLKSSKYIAWPLQGWQATFGGGDHPPKSDLVPRGSPGIHRDGGSGENLYFQSSDNGPQNQRNAPRITFGGPSDSTGSNQNGERSGARSKQRRPQGLPNNTASWFTALTQHGKEDLKFPRGQGVPINTNSSPDDQIGYYRRATRRIRGGDGKMKDLSPRWYFYYLGTGPEAGLPYGANKDGIIWVATEGALNTPKDHIGTRNPANNAAIVLQLPQGTTLPKGFYAEGSRGGSQASSRSSSRSRNSSRNSTPGSSRGTSPARMAGNGGDAALALLLLDRLNQLESKMSGKGQQQQGQTVTKKSAAEMSKKPRQKRTATKGFNVTQCFGPRGPEQTQGNFGDADLIKKGTDYKHWPQIAQFAPSASAFFGMSRISSKETPSGTWLTYTGAIKLDKDDPNFKDQVILLNKHIDAYKTFPPTEPKKDKKKKADETQALPQRQKKQQTVTLLPAADLDDFSKQLQQSMSSADSTQA

SEQ ID NO: 656 - protein, 671 aa, Artificial Sequence
  Description of Artificial Sequence: Synthetic polypeptide
MHHHHHHGGSGSPILGYWKIKGLVQPTRLLLEYLEEKYEEHLYERDEGDKWRNKKFELGLEFPNLPYYIDGDVKLTQSMAIIRYIADKHNMLGGCPKERAEISMLEGAVLDIRYGVSRIAYSKDFETLKVDFLSKLPEMLKMFEDRLCHKTYLNGDHVTHPDFMLYDALDVVLYMDPMCLDAFPKLVCFKKRIEAIPQIDKYLKSSKYIAWPLQGWQATFGGGDHPPKSDLVPRGSPGIHRDGGSGENLYFQSSDNGPQNQRNAPRITFGGPSDSTGSNQNGERSGARSKQRRPQGLPNNTASWFTALTQHGKEDLKFPKGQGVPINTNSKPDDQIGYYRRQVRRYRGGDGQMKDLNPRWYFYYLGTGPEAGLPYGANKDGIIWVATEGALNTPKDHIGTRNPANNAAIVLQLPQGTTLPKGFYAEGSRGGSQASSRSSSRSRNSSRNSTPGSSRGTSPARMAGNGGDAALALLLLDRLNQLESKMSGKGQQQQGQTVTKKSAAEASKKPRQKRTATKAYNVTQAFGRRGPEQTQGNFGDQELIRQGTDYKHWPQIAQFAPSASAFFGMSRIGMEVTPSGTWLTYTGAIKLDDKDPNFKDQVILLNKHIDAYKTFPPTEPKKDKKKKADETQALPQRQKKQQTVTLLPAADLDDFSKQLQQSMSSADSTQA

SEQ ID NO: 657 - protein, 671 aa, Artificial Sequence
  Description of Artificial Sequence: Synthetic polypeptide
MHHHHHHGGSGSPILGYWKIKGLVQPTRLLLEYLEEKYEEHLYERDEGDKWRNKKFELGLEFPNLPYYIDGDVKLTQSMAIIRYIADKHNMLGGCPKERAEISMLEGAVLDIRYGVSRIAYSKDFETLKVDFLSKLPEMLKMFEDRLCHKTYLNGDHVTHPDFMLYDALDVVLYMDPMCLDAFPKLVCFKKRIEAIPQIDKYLKSSKYIAWPLQGWQATFGGGDHPPKSDLVPRGSPGIHRDGGSGENLYFQSSDNGPQNQRNAPRITFGGPSDSTGSNQNGERSGARSKQRRPQGLPNNTASWFTALTQHGKEDLKFPRGQGVPINTNSSPDDQIGYYRRATRRIRGGDGKMKDLSPRWYFYYLGTGPEAGLPYGANKDGIIWVATEGALNTPKDHIGTRNPANNAAIVLQLPQGTTLPKGFYAEGSRGGSQASSRSSERSRNSSRNSTPGSERGTSPARMAGNGGDAALALLLLDRLNQLESKMSGKGQQQQGQTVTKKSAAEASKKPRQKRTATKAYNVTQAFGRRGPEQTQGNFGDQELIRQGTDYKHWPQIAQFAPSASAFFGMSRIGMEVTPSGTWLTYTGAIKLDDKDPNFKDQVILLNKHIDAYKTFPPTEPKKDKKKKADETQALPQRQKKQQTVTLLPAADLDDFSKQLQQSMSSADSTQA

SEQ ID NO: 658 - protein, 671 aa, Artificial Sequence
  Description of Artificial Sequence: Synthetic polypeptide
MHHHHHHGGSGSPILGYWKIKGLVQPTRLLLEYLEEKYEEHLYERDEGDKWRNKKFELGLEFPNLPYYIDGDVKLTQSMAIIRYIADKHNMLGGCPKERAEISMLEGAVLDIRYGVSRIAYSKDFETLKVDFLSKLPEMLKMFEDRLCHKTYLNGDHVTHPDFMLYDALDVVLYMDPMCLDAFPKLVCFKKRIEAIPQIDKYLKSSKYIAWPLQGWQATFGGGDHPPKSDLVPRGSPGIHRDGGSGENLYFQSSDNGPQNQRNAPRITFGGPSDSTGSNQNGERSGARSKQRRPQGLPNNTASWFTALTQHGKEDLKFPRGQGVPINTNSSPDDQIGYYRRATRRIRGGDGKMKDLSPRWYFYYLGTGPEAGLPYGANKDGIIWVATEGALNTPKDHIGTRNPANNAAIVLQLPQGTTLPKGFYAEGSRGGSQASSRSSSRSRNSSRNSTPGSSRGTSPARMAGNGGDAALALLLLDRLNQLESKMSGKGQQQQGQTVTKKSAAEASKKPRQKRTATKQYNVTQAFGRRGPEQTQGNFGDQELIRQGTDYKHWPQIAQFAPSASAFFGMSRIGMEVTPSGTWLTYTGAIKLDDKDPNFKDQVILLNKHIDAYKTFPPTEPKKDKKKKADETQALPQRQKKQQTVTLLPAADLDDFSKQLQQSMSSADSTQA

SEQ ID NO: 659 - protein, 671 aa, Artificial Sequence
  Description of Artificial Sequence: Synthetic polypeptide
MHHHHHHGGSGSPILGYWKIKGLVQPTRLLLEYLEEKYEEHLYERDEGDKWRNKKFELGLEFPNLPYYIDGDVKLTQSMAIIRYIADKHNMLGGCPKERAEISMLEGAVLDIRYGVSRIAYSKDFETLKVDFLSKLPEMLKMFEDRLCHKTYLNGDHVTHPDFMLYDALDVVLYMDPMCLDAFPKLVCFKKRIEAIPQIDKYLKSSKYIAWPLQGWQATFGGGDHPPKSDLVPRGSPGIHRDGGSGENLYFQSSDNGPQNQRNAPRITFGGPSDSTGSNQNGERSGARSKQRRPQGLPNNTASWFTALTQHGKEDLKFPRGQGVPINTNSSPDDQIGYYRRITRRIRGGDGKMKDLSPRWYFYYLGTGPEAGLPYGANKDGIIWVATEGALNTPKDHIGTRNPANNAAIVLQLPQGTTLPKGFYAEGSRGGSQASSRSSSRSRNSSRNSTPGSSRGTSPARMAGNGGDAALALLLLDRLNQLESKMSGKGQQQQGQTVTKKSAAEASKKPRQKRTATKAYNVTQAFGRRGPEQTQGNFGDQELIRQGTDYKHWPQIAQFAPSASAFFGMSRIGMEVTPSGTWLTYTGAIKLDDKDPNFKDQVILLNKHIDAYKTFPPTEPKKDKKKKADETQALPQRQKKQQTVTLLPAADLDDFSKQLQQSMSSADSTQA

SEQ ID NO: 660 - protein, 671 aa, Artificial Sequence
  Description of Artificial Sequence: Synthetic polypeptide
MHHHHHHGGSGSPILGYWKIKGLVQPTRLLLEYLEEKYEEHLYERDEGDKWRNKKFELGLEFPNLPYYIDGDVKLTQSMAIIRYIADKHNMLGGCPKERAEISMLEGAVLDIRYGVSRIAYSKDFETLKVDFLSKLPEMLKMFEDRLCHKTYLNGDHVTHPDFMLYDALDVVLYMDPMCLDAFPKLVCFKKRIEAIPQIDKYLKSSKYIAWPLQGWQATFGGGDHPPKSDLVPRGSPGIHRDGGSGENLYFQSSDNGPQNQRNAPRITFGGPSDSTGSNQNGERSGARSKQRRPQGLPNNTASWFTALTQHGKEDLKFPRGQGVPINTNSSPDDQIGYYRRATRRIRGGDGKMKDLSPRWYFYYLGTGPEAGLPYGANKDGIIWVATEGALNTPKDHIGTRNPANHAAIVLQLPQGTTLPKGFYAEGSRGGSQASSRSSSRSRNSSRNSTPGSSRGTSPARMAGNGGDAALALLLLDRLNQLESKMSGKGQQQQGQTVTKKSAAEASKKPRQKRTATKAYNVTQAFGRRGPEQTQGNFGDQELIRQGTDYKHWPQIAQFAPSASAFFGMSRIGMEVTPSGTWLTYTGAIKLDDKDPNFKDQVILLNKHIDAYKTFPPTEPKKDKKKKADETQALPQRQKKQQTVTLLPAADLDDFSKQLQQSMSSADSTQA

SEQ ID NO: 661 - protein, 671 aa, Artificial Sequence
  Description of Artificial Sequence: Synthetic polypeptide
MHHHHHHGGSGSPILGYWKIKGLVQPTRLLLEYLEEKYEEHLYERDEGDKWRNKKFELGLEFPNLPYYIDGDVKLTQSMAIIRYIADKHNMLGGCPKERAEISMLEGAVLDIRYGVSRIAYSKDFETLKVDFLSKLPEMLKMFEDRLCHKTYLNGDHVTHPDFMLYDALDVVLYMDPMCLDAFPKLVCFKKRIEAIPQIDKYLKSSKYIAWPLQGWQATFGGGDHPPKSDLVPRGSPGIHRDGGSGENLYFQSSDNGPQNQRNAPRITFGGPSDSTGSNQNGERSGARSKQRRPQGLPNNTASWFTALTQHGKEDLKFPRGQGVPINTNSSPDDQIGYYRRATRRIRGGDGKMKDLSPNWYFYYLGTGPEAGLPYGANKDGIIWVATEGALNTPKDHIGTRNPANNAAIVLQLPQGTTLPKGFYAEGSRGGSQASSRSSSRSRNSSRNSTPGSSRGTSPARMAGNGGDAALALLLLDRLNQLESKMSGKGQQQQGQTVTKKSAAEASKKPRQKRTATKAYNVTQAFGRRGPEQTQGNFGDQELIRQGTDYKHWPQIAQFAPSASAFFGMSRIGMEVTPSGTWLTYTGAIKLDDKDPNFKDQVILLNKHIDAYKTFPPTEPKKDKKKKADETQALPQRQKKQQTVTLLPAADLDDFSKQLQQSMSSADSTQA

SEQ ID NO: 662 - protein, 671 aa, Artificial Sequence
  Description of Artificial Sequence: Synthetic polypeptide
MHHHHHHGGSGSPILGYWKIKGLVQPTRLLLEYLEEKYEEHLYERDEGDKWRNKKFELGLEFPNLPYYIDGDVKLTQSMAIIRYIADKHNMLGGCPKERAEISMLEGAVLDIRYGVSRIAYSKDFETLKVDFLSKLPEMLKMFEDRLCHKTYLNGDHVTHPDFMLYDALDVVLYMDPMCLDAFPKLVCFKKRIEAIPQIDKYLKSSKYIAWPLQGWQATFGGGDHPPKSDLVPRGSPGIHRDGGSGENLYFQSSDNGPQNQRNAPRITFGGPSDSTGSNQNGERSGARSKQRRPQGLPNNTASWFTALTQHGKEDLKFPRGQGVPINTNSSPDDQIGYYRRATRRIRGGDGKMKDLSPRWYFYYLGSGPEAGLPYGANKDGIIWVATEGALNTPKDHIGTRNPANNAAIVLQLPQGTTLPKGFYAEGSRGGSQASSRSSSRSRNSSRNSTPGSSRGTSPARMAGNGGDAALALLLLDRLNQLESKMSGKGQQQQGQTVTKKSAAEASKKPRQKRTATKAYNVTQAFGRRGPEQTQGNFGDQELIRQGTDYKHWPQIAQFAPSASAFFGMSRIGMEVTPSGTWLTYTGAIKLDDKDPNFKDQVILLNKHIDAYKTFPPTEPKKDKKKKADETQALPQRQKKQQTVTLLPAADLDDFSKQLQQSMSSADSTQA

SEQ ID NO: 663 - protein, 671 aa, Artificial Sequence
  Description of Artificial Sequence: Synthetic polypeptide
MHHHHHHGGSGSPILGYWKIKGLVQPTRLLLEYLEEKYEEHLYERDEGDKWRNKKFELGLEFPNLPYYIDGDVKLTQSMAIIRYIADKHNMLGGCPKERAEISMLEGAVLDIRYGVSRIAYSKDFETLKVDFLSKLPEMLKMFEDRLCHKTYLNGDHVTHPDFMLYDALDVVLYMDPMCLDAFPKLVCFKKRIEAIPQIDKYLKSSKYIAWPLQGWQATFGGGDHPPKSDLVPRGSPGIHRDGGSGENLYFQSSDNGPQNQRNAPRITFGGPSDSTGSNQNGERSGARSKQRRPQGLPNNTASWFTALTQHGKEDLKFPRGQGVPINTNSSPDDQIGYYRRATRRIRGGDGKMKDLSPRWYFYYLGTGPEAGLPYGANKDGIIWVATEGALNTPKDHIGTRNPANNAAIALQLPQGTTLPKGFYAEGSRGGSQASSRSSSRSRNSSRNSTPGSSRGTSPARMAGNGGDAALALLLLDRLNQLESKMSGKGQQQQGQTVTKKSAAEASKKPRQKRTATKAYNVTQAFGRRGPEQTQGNFGDQELIRQGTDYKHWPQIAQFAPSASAFFGMSRIGMEVTPSGTWLTYTGAIKLDDKDPNFKDQVILLNKHIDAYKTFPPTEPKKDKKKKADETQALPQRQKKQQTVTLLPAADLDDFSKQLQQSMSSADSTQA

SEQ ID NO: 664 - protein, 671 aa, Artificial Sequence
  Description of Artificial Sequence: Synthetic polypeptide
MHHHHHHGGSGSPILGYWKIKGLVQPTRLLLEYLEEKYEEHLYERDEGDKWRNKKFELGLEFPNLPYYIDGDVKLTQSMAIIRYIADKHNMLGGCPKERAEISMLEGAVLDIRYGVSRIAYSKDFETLKVDFLSKLPEMLKMFEDRLCHKTYLNGDHVTHPDFMLYDALDVVLYMDPMCLDAFPKLVCFKKRIEAIPQIDKYLKSSKYIAWPLQGWQATFGGGDHPPKSDLVPRGSPGIHRDGGSGENLYFQSSDNGPQNQRNAPRITFGGPSDSTGSNQNGERSGARSKQRRPQGLPNNTASWFTALTQHGKEDLKFPRGQGVPINTNSSPDDQIGYYRRATRRIRGGDGKMKDLSPRWYFYYLGTGPEAGLPYGANKDGIIWVATEGALNTPKDHIGTRNPANNAAIVLQLPQGTTLPKGFYAEGSRGGSQASSRSSSRSRNSSRNSTPGSSRGTSPARMAGNGGDAALALLLLDRLNQLESKMSGKGQQQQGQTVTKKSAAEASKKPRQKRTATKEYNVTQAFGRRGPEQTQGNFGDQDLIKLGTDYKHWPQIAQFAPSASAFFGMSRIGTEETPSGTWLTYTGAIKLDKKDPNFKDQVILLNKHIDAYKTFPPTEPKKDKKKKADETQALPQRQKKQQTVTLLPAADLDDFSKQLQQSMSSADSTQA

SEQ ID NO: 665 - protein, 671 aa, Artificial Sequence
  Description of Artificial Sequence: Synthetic polypeptide
MHHHHHHGGSGSPILGYWKIKGLVQPTRLLLEYLEEKYEEHLYERDEGDKWRNKKFELGLEFPNLPYYIDGDVKLTQSMAIIRYIADKHNMLGGCPKERAEISMLEGAVLDIRYGVSRIAYSKDFETLKVDFLSKLPEMLKMFEDRLCHKTYLNGDHVTHPDFMLYDALDVVLYMDPMCLDAFPKLVCFKKRIEAIPQIDKYLKSSKYIAWPLQGWQATFGGGDHPPKSDLVPRGSPGIHRDGGSGENLYFQSSDNGPQNQRNAPRITFGGPSDSTGSNQNGERSGARSKQRRPQGLPNNTASWFTGLTQHGKEDLKFPPGQGVPINTNSSPDDQIGYYRRATRRIRGGDGKMKDLPPRWYFYYLGTGPEADLPYGAVKDGIVWVAEEGALNTPKDHIGTRNPANNAAIPLQLPPGTTLPKGFYAEGSRGGSQASSRSSSRSRNSSRNSTPGSSRGTSPARMAGNGGDAALALLLLDRLNQLESKMSGKGQQQQGQTVTKKSAAEASKKPRQKRTATKAYNVTQAFGRRGPEQTQGNFGDQELIRQGTDYKHWPQIAQFAPSASAFFGMSRIGMEVTPSGTWLTYTGAIKLDDKDPNFKDQVILLNKHIDAYKTFPPTEPKKDKKKKADETQALPQRQKKQQTVTLLPAADLDDFSKQLQQSMSSADSTQA

SEQ ID NO: 666 - protein, 671 aa, Artificial Sequence
  Description of Artificial Sequence: Synthetic polypeptide
MHHHHHHGGSGSPILGYWKIKGLVQPTRLLLEYLEEKYEEHLYERDEGDKWRNKKFELGLEFPNLPYYIDGDVKLTQSMAIIRYIADKHNMLGGCPKERAEISMLEGAVLDIRYGVSRIAYSKDFETLKVDFLSKLPEMLKMFEDRLCHKTYLNGDHVTHPDFMLYDALDVVLYMDPMCLDAFPKLVCFKKRIEAIPQIDKYLKSSKYIAWPLQGWQATFGGGDHPPKSDLVPRGSPGIHRDGGSGENLYFQSSDNGPQNQRNAPRITFGGPSDSTGSNQNGERSGARSKQRRPQGLPNNTASWFTALTQHGKEDLKFPRGQGVPINTNSSPDDQIGYYRRATRRIRGGDGKMKDLSPRWYFYYLGTGPEAGLPYGANKDGIIWVATEGALNTPKDHIGTRNPANNAAIVLQLPQGTTLPKGFYAEGSRGGSQASSRSSSRSRNSSRNSTPGSSRGTSPARMAGNGGDAALALLLLDRLNQLESKMSGKGQQQQGQTVTKKSAAEASKKPRQKRTATKAYNVTQAFGRRGPEQTQGNFGDDELIRQGTDYKHWPQIAQFAPSASAFFGMSRIGMEVTPSGTWLTYTGAIKLDDKDPNFKDQVILLNKHIDAYKTFPPTEPKKDKKKKADETQALPQRQKKQQTVTLLPAADLDDFSKQLQQSMSSADSTQA

SEQ ID NO: 667 - protein, 671 aa, Artificial Sequence
  Description of Artificial Sequence: Synthetic polypeptide
MHHHHHHGGSGSPILGYWKIKGLVQPTRLLLEYLEEKYEEHLYERDEGDKWRNKKFELGLEFPNLPYYIDGDVKLTQSMAIIRYIADKHNMLGGCPKERAEISMLEGAVLDIRYGVSRIAYSKDFETLKVDFLSKLPEMLKMFEDRLCHKTYLNGDHVTHPDFMLYDALDVVLYMDPMCLDAFPKLVCFKKRIEAIPQIDKYLKSSKYIAWPLQGWQATFGGGDHPPKSDLVPRGSPGIHRDGGSGENLYFQSSDNGPQNQRNAPRITFGGPSDSTGSNQNGERSGARSKQRRPQGLPNNTASWFTPLTQHGKEDLKFPPGQGVPINTNSSPDDQIGYYRRATRRIRGGDGKMKDLPPRWYFYYLGTGPEADLPYGQVKDGIVWVAEEGALNTPKDHIGTRNPANNAAIPLQLPPGTTLPKGFYAEGSRGGSQASSRSSSRSRNSSRNSTPGSSRGTSPARMAGNGGDAALALLLLDRLNQLESKMSGKGQQQQGQTVTKKSAAEASKKPRQKRTATKAYNVTQAFGRRGPEQTQGNFGDQELIRQGTDYKHWPQIAQFAPSASAFFGMSRIGMEVTPSGTWLTYTGAIKLDDKDPNFKDQVILLNKHIDAYKTFPPTEPKKDKKKKADETQALPQRQKKQQTVTLLPAADLDDFSKQLQQSMSSADSTQA

SEQ ID NO: 668 - protein, 671 aa, Artificial Sequence
  Description of Artificial Sequence: Synthetic polypeptide
MHHHHHHGGSGSPILGYWKIKGLVQPTRLLLEYLEEKYEEHLYERDEGDKWRNKKFELGLEFPNLPYYIDGDVKLTQSMAIIRYIADKHNMLGGCPKERAEISMLEGAVLDIRYGVSRIAYSKDFETLKVDFLSKLPEMLKMFEDRLCHKTYLNGDHVTHPDFMLYDALDVVLYMDPMCLDAFPKLVCFKKRIEAIPQIDKYLKSSKYIAWPLQGWQATFGGGDHPPKSDLVPRGSPGIHRDGGSGENLYFQSSDNGPQNQRNAPRITFGGPSDSTGSNQNGERSGARSKQRRPQGLPNNTASWFTALTQHGKEDLKFPRGQGVPINTNSSPDDQIGYYRRATRRIRGGDGKMKDLSPRWYFYYLGTGPEAGLPYGANKDGIIWVATEGALNTPKDHIGTRNPANNAAIVLQLPQGTTLPKGFYAEGSRGGSQASSRSSSRSRNSSRNSTPGSSRGTSPARMAGNGGDAALALLLLDRLNQLESKMSGKGQQQQGQTVTKKSAAEASKKPRQKRTATKAYNVTQAFGRRGPNQTQGNFGDQELIRQGTDYKHWPQIAQFAPSASAFFGMSRIGMEVTPSGTWLTYTGAIKLDDKDPNFKDQVILLNKHIDAYKTFPPTEPKKDKKKKADETQALPQRQKKQQTVTLLPAADLDDFSKQLQQSMSSADSTQA

SEQ ID NO: 669 - protein, 671 aa, Artificial Sequence
  Description of Artificial Sequence: Synthetic polypeptide
MHHHHHHGGSGSPILGYWKIKGLVQPTRLLLEYLEEKYEEHLYERDEGDKWRNKKFELGLEFPNLPYYIDGDVKLTQSMAIIRYIADKHNMLGGCPKERAEISMLEGAVLDIRYGVSRIAYSKDFETLKVDFLSKLPEMLKMFEDRLCHKTYLNGDHVTHPDFMLYDALDVVLYMDPMCLDAFPKLVCFKKRIEAIPQIDKYLKSSKYIAWPLQGWQATFGGGDHPPKSDLVPRGSPGIHRDGGSGENLYFQSSDNGPQNQRNAPRITFGGPSDSTGSNQNGERSGARSKQRRPQGLPNNTASWFTALTQHGKEDLKFPRGQGVPINTNSSPDDQIGYYRRATRRIRGGDGKMKDLSPRWYFYYLGTGPEAGLPYGANKDGIIWVATEGALNTPKSHIGTRNPANNAAIVLQLPQGTTLPKGFYAEGSRGGSQASSRSSSRSRNSSRNSTPGSSRGTSPARMAGNGGDAALALLLLDRLNQLESKMSGKGQQQQGQTVTKKSAAEASKKPRQKRTATKAYNVTQAFGRRGPEQTQGNFGDQELIRQGTDYKHWPQIAQFAPSASAFFGMSRIGMEVTPSGTWLTYTGAIKLDDKDPNFKDQVILLNKHIDAYKTFPPTEPKKDKKKKADETQALPQRQKKQQTVTLLPAADLDDFSKQLQQSMSSADSTQA

SEQ ID NO: 670 - protein, 671 aa, Artificial Sequence
  Description of Artificial Sequence: Synthetic polypeptide
MHHHHHHGGSGSPILGYWKIKGLVQPTRLLLEYLEEKYEEHLYERDEGDKWRNKKFELGLEFPNLPYYIDGDVKLTQSMAIIRYIADKHNMLGGCPKERAEISMLEGAVLDIRYGVSRIAYSKDFETLKVDFLSKLPEMLKMFEDRLCHKTYLNGDHVTHPDFMLYDALDVVLYMDPMCLDAFPKLVCFKKRIEAIPQIDKYLKSSKYIAWPLQGWQATFGGGDHPPKSDLVPRGSPGIHRDGGSGENLYFQSSDNGPQNQRNAPRITFGGPSDSTGSNQNGERSGARSKQRRPQGLPNNTASWFTALTQHGKEDLKFPRGQGVPINTNSSPDDQIGYYRRATRRIRGGDGKMKDLSPRWYFYYLGTGPEAGLPYGANKQGIIWVATEGALNTPKDHIGTRNPANNAAIVLQLPQGTTLPKGFYAEGSRGGSQASSRSSSRSRNSSRNSTPGSSRGTSPARMAGNGGDAALALLLLDRLNQLESKMSGKGQQQQGQTVTKKSAAEASKKPRQKRTATKAYNVTQAFGRRGPEQTQGNFGDQELIRQGTDYKHWPQIAQFAPSASAFFGMSRIGMEVTPSGTWLTYTGAIKLDDKDPNFKDQVILLNKHIDAYKTFPPTEPKKDKKKKADETQALPQRQKKQQTVTLLPAADLDDFSKQLQQSMSSADSTQA

SEQ ID NO: 671 - protein, 671 aa, Artificial Sequence
  Description of Artificial Sequence: Synthetic polypeptide
MHHHHHHGGSGSPILGYWKIKGLVQPTRLLLEYLEEKYEEHLYERDEGDKWRNKKFELGLEFPNLPYYIDGDVKLTQSMAIIRYIADKHNMLGGCPKERAEISMLEGAVLDIRYGVSRIAYSKDFETLKVDFLSKLPEMLKMFEDRLCHKTYLNGDHVTHPDFMLYDALDVVLYMDPMCLDAFPKLVCFKKRIEAIPQIDKYLKSSKYIAWPLQGWQATFGGGDHPPKSDLVPRGSPGIHRDGGSGENLYFQSSDNGPQNQRNAPRITFGGPSDSTGSNQNGERSGARSKQRRPQGLPNNTASWFTALTQHGKEDLKFPRGQGVPINTNSSPDDQIGYYRRATRRIRGGDGKMKDLSPRWYFYYLGTGPEAGLPYGATKDGIIWVATEGALNTPKDHIGTRNPANNAAIVLQLPQGTTLPKGFYAEGSRGGSQASSRSSSRSRNSSRNSTPGSSRGTSPARMAGNGGDAALALLLLDRLNQLESKMSGKGQQQQGQTVTKKSAAEASKKPRQKRTATKAYNVTQAFGRRGPEQTQGNFGDQELIRQGTDYKHWPQIAQFAPSASAFFGMSRIGMEVTPSGTWLTYTGAIKLDDKDPNFKDQVILLNKHIDAYKTFPPTEPKKDKKKKADETQALPQRQKKQQTVTLLPAADLDDFSKQLQQSMSSADSTQA

SEQ ID NO: 672 - protein, 671 aa, Artificial Sequence
  Description of Artificial Sequence: Synthetic polypeptide
MHHHHHHGGSGSPILGYWKIKGLVQPTRLLLEYLEEKYEEHLYERDEGDKWRNKKFELGLEFPNLPYYIDGDVKLTQSMAIIRYIADKHNMLGGCPKERAEISMLEGAVLDIRYGVSRIAYSKDFETLKVDFLSKLPEMLKMFEDRLCHKTYLNGDHVTHPDFMLYDALDVVLYMDPMCLDAFPKLVCFKKRIEAIPQIDKYLKSSKYIAWPLQGWQATFGGGDHPPKSDLVPRGSPGIHRDGGSGENLYFQSSDNGPQNQRNAPRITFGGPSDSTGSNQNGERSGARSKQRRPQGLPNNTASWFTALTQHGKEDLKFPRGQGVPINTNSSPDDQIGQYRRATRRIRGGDGKMKDLSPRWYFYYLGTGPEAGLPYGANKDGIIWVATEGALNTPKDHIGTRNPANNAAIVLQLPQGTTLPKGFYAEGSRGGSQASSRSSSRSRNSSRNSTPGSSRGTSPARMAGNGGDAALALLLLDRLNQLESKMSGKGQQQQGQTVTKKSAAEASKKPRQKRTATKAYNVTQAFGRRGPEQTQGNFGDQELIRQGTDYKHWPQIAQFAPSASAFFGMSRIGMEVTPSGTWLTYTGAIKLDDKDPNFKDQVILLNKHIDAYKTFPPTEPKKDKKKKADETQALPQRQKKQQTVTLLPAADLDDFSKQLQQSMSSADSTQA

SEQ ID NO: 673 - protein, 671 aa, Artificial Sequence
  Description of Artificial Sequence: Synthetic polypeptide
MHHHHHHGGSGSPILGYWKIKGLVQPTRLLLEYLEEKYEEHLYERDEGDKWRNKKFELGLEFPNLPYYIDGDVKLTQSMAIIRYIADKHNMLGGCPKERAEISMLEGAVLDIRYGVSRIAYSKDFETLKVDFLSKLPEMLKMFEDRLCHKTYLNGDHVTHPDFMLYDALDVVLYMDPMCLDAFPKLVCFKKRIEAIPQIDKYLKSSKYIAWPLQGWQATFGGGDHPPKSDLVPRGSPGIHRDGGSGENLYFQSSDNGPQNQRNAPRITFGGPSDSTGSNQNGERSGARSKQRRPQGLPNNTASWFTALTQHGKEDLKFPRGQGVPINTNSSPDDQIGYYRRATRRIRGGDGKMKDLSPRWYFYYLGTGPEAGLPYGANKDGIIWVATEGALNTPKDHIGTRNPANNAAICLQLPQGTTLPKGFYAEGSRGGSQASSRSSSRSRNSSRNSTPGSSRGTSPARMAGNGGDAALALLLLDRLNQLESKMSGKGQQQQGQTVTKKSAAEASKKPRQKRTATKAYNVTQAFGRRGPEQTQGNFGDQELIRQGTDYKHWPQIAQFAPSASAFFGMSRIGMEVTPSGTWLTYTGAIKLDDKDPNFKDQVILLNKHIDAYKTFPPTEPKKDKKKKADETQALPQRQKKQQTVTLLPAADLDDFSKQLQQSMSSADSTQA

SEQ ID NO: 674 - protein, 671 aa, Artificial Sequence
  Description of Artificial Sequence: Synthetic polypeptide
MHHHHHHGGSGSPILGYWKIKGLVQPTRLLLEYLEEKYEEHLYERDEGDKWRNKKFELGLEFPNLPYYIDGDVKLTQSMAIIRYIADKHNMLGGCPKERAEISMLEGAVLDIRYGVSRIAYSKDFETLKVDFLSKLPEMLKMFEDRLCHKTYLNGDHVTHPDFMLYDALDVVLYMDPMCLDAFPKLVCFKKRIEAIPQIDKYLKSSKYIAWPLQGWQATFGGGDHPPKSDLVPRGSPGIHRDGGSGENLYFQSSDNGPQNQRNAPRITFGGPSDSTGSNQNGERSGARSKQRRPQGLPNNTASWFTALTQHGKEDLKFPRGQGVPINTNSSPDDQIGYYRRATRRIRGGDGKMKDLSPRWYFYYLGTGPEAGLPYGANKDGIIWVATEGALNTPKDHIGTRNPANNAAIVLQLPQGTTLPKGFYAEGSRGGSQASSRSSSRSRNSSRNSTPGSSRGTSPARMAGNGGDAALALLLLDRLNQLESKMSGKGQQQQGQTVTKKSAAEMSKKPRQKRTATKGCNVTQCFGPRGPEQTQGNFGDAELIKKGTDYKHWPQIAQFAPSASAFFGMSRISSKETPSGTWLTYTGAIKLDKDDPNFKDQVILLNKHIDAYKTFPPTEPKKDKKKKADETQALPQRQKKQQTVTLLPAADLDDFSKQLQQSMSSADSTQA

SEQ ID NO: 675 - protein, 671 aa, Artificial Sequence
  Description of Artificial Sequence: Synthetic polypeptide
MHHHHHHGGSGSPILGYWKIKGLVQPTRLLLEYLEEKYEEHLYERDEGDKWRNKKFELGLEFPNLPYYIDGDVKLTQSMAIIRYIADKHNMLGGCPKERAEISMLEGAVLDIRYGVSRIAYSKDFETLKVDFLSKLPEMLKMFEDRLCHKTYLNGDHVTHPDFMLYDALDVVLYMDPMCLDAFPKLVCFKKRIEAIPQIDKYLKSSKYIAWPLQGWQATFGGGDHPPKSDLVPRGSPGIHRDGGSGENLYFQSSDNGPQNQRNAPRITFGGPSDSTGSNQNGERSGARSKQRRPQGLPNNTASWFTALTQHGKEDLKFPRGQGVPINTNSSPDDQIGYYRRATRRIRGGDGKMKDLSPRWYFYYLGTGPEAGLPYGANKDGIIWVATEGALNTPKDHIGTRNPANNAAIVLQLPQGTTLPKGFYAEGSRGGSQASSRSSSRSRNSSRNSTPGSSRGTSPARMAGNGGDAALALLLLDRLNQLESKMSGKGQQQQGQTVTKKSAAEMSKKPRWKRTATKGYNVTQAFGKRGPKDTQGNFGDAELIKQGTDYKHWPQIAQFVPSAAAFFFMSRISMKETPDGVWLTYTGTIKLDKDDPNFDDQVKLLNKHIDAYKTFPPTEPKKDKKKKADETQALPQRQKKQQTVTLLPAADLDDFSKQLQQSMSSADSTQA

SEQ ID NO: 676 - protein, 671 aa, Artificial Sequence
  Description of Artificial Sequence: Synthetic polypeptide
MHHHHHHGGSGSPILGYWKIKGLVQPTRLLLEYLEEKYEEHLYERDEGDKWRNKKFELGLEFPNLPYYIDGDVKLTQSMAIIRYIADKHNMLGGCPKERAEISMLEGAVLDIRYGVSRIAYSKDFETLKVDFLSKLPEMLKMFEDRLCHKTYLNGDHVTHPDFMLYDALDVVLYMDPMCLDAFPKLVCFKKRIEAIPQIDKYLKSSKYIAWPLQGWQATFGGGDHPPKSDLVPRGSPGIHRDGGSGENLYFQSSDNGPQNQRNAPRITFGGPSDSTGSNQNGERSGARSKQRRPQGLPNNTASWFTALTQHGKEDLKFPRGQGVPINTNSSPDDQIGYYRRATRRIRGGDGKMKDLSPRWYFYYLGTGPEAGLPYGANKDGIIWVATEGALNTPKDHIGTRNPANNAAIVLQLPQGTTLPKGFYAEGSRGGSQASSRSSSRSRNSSRNSTPGSSRGTSPARMAGNGGDAALALLLLDRLNQLESKMSGKGQQQQGQTVTKKSAAEASKKPRCKRTATKAYNVTQAFGRRGPEQTQGNFGDQELIRQGTDYKHWPQIAQFAPSASAFFGMSRIGMEVTPSGTWLTYTGAIKLDDKDPNFKDQVILLNKHIDAYKTFPPTEPKKDKKKKADETQALPQRQKKQQTVTLLPAADLDDFSKQLQQSMSSADSTQA

SEQ ID NO: 677 - protein, 671 aa, Artificial Sequence
  Description of Artificial Sequence: Synthetic polypeptide
MHHHHHHGGSGSPILGYWKIKGLVQPTRLLLEYLEEKYEEHLYERDEGDKWRNKKFELGLEFPNLPYYIDGDVKLTQSMAIIRYIADKHNMLGGCPKERAEISMLEGAVLDIRYGVSRIAYSKDFETLKVDFLSKLPEMLKMFEDRLCHKTYLNGDHVTHPDFMLYDALDVVLYMDPMCLDAFPKLVCFKKRIEAIPQIDKYLKSSKYIAWPLQGWQATFGGGDHPPKSDLVPRGSPGIHRDGGSGENLYFQSSDNGPQNQRNAPRITFGGPSDSTGSNQNGERSGARSKQRRPQGLPNNTASWFTALTQHGKEDLKFPRGQGVPINTNSSPDDQIGYYRRATRRIRGGDGKMKDLSPRWYFYYLGTGPEAGLPYGANKDGIIWVATEGALNTPKDHIGTRNPANNAAIVLQLPQGTTLPKGFYAEGSRGGSQASSRSSSRSRNSSRNSTPGSSRGTSPARMAGNGGDAALALLLLDRLNQLESKMSGKGQQQQGQTVTKKSAAEASKKPRQKRTATKEYNVTQAFGRRGPEQTQGNFGDQDLIKLGTDYKHWPQIAQFAPSASAFFGMSRIGMRETPSGTWLTYTGAIKLDKKDPNFKDQVILLNKHIDAYKTFPPTEPKKDKKKKADETQALPQRQKKQQTVTLLPAADLDDFSKQLQQSMSSADSTQA

SEQ ID NO: 678 - protein, 671 aa, Artificial Sequence
  Description of Artificial Sequence: Synthetic polypeptide
MHHHHHHGGSGSPILGYWKIKGLVQPTRLLLEYLEEKYEEHLYERDEGDKWRNKKFELGLEFPNLPYYIDGDVKLTQSMAIIRYIADKHNMLGGCPKERAEISMLEGAVLDIRYGVSRIAYSKDFETLKVDFLSKLPEMLKMFEDRLCHKTYLNGDHVTHPDFMLYDALDVVLYMDPMCLDAFPKLVCFKKRIEAIPQIDKYLKSSKYIAWPLQGWQATFGGGDHPPKSDLVPRGSPGIHRDGGSGENLYFQSSDNGPQNQRNAPRITFGGPSDSTGSNQNGERSGARSKQRRPQGLPNNTASWFTGLTQHGKEDLKFPPGQGVPINTNSSPDDQIGYYRRATRRIRGGDGKMKDLPPRWYFYYLGTGPEADLPYGAVKPGIFWVAAEGALNTPKDHIGTRNPANNAAIPLQLPPGTTLPKGFYAEGSRGGSQASSRSSSRSRNSSRNSTPGSSRGTSPARMAGNGGDAALALLLLDRLNQLESKMSGKGQQQQGQTVTKKSAAEASKKPRQKRTATKAYNVTQAFGRRGPEQTQGNFGDQELIRQGTDYKHWPQIAQFAPSASAFFGMSRIGMEVTPSGTWLTYTGAIKLDDKDPNFKDQVILLNKHIDAYKTFPPTEPKKDKKKKADETQALPQRQKKQQTVTLLPAADLDDFSKQLQQSMSSADSTQA

SEQ ID NO: 679 - protein, 671 aa, Artificial Sequence
  Description of Artificial Sequence: Synthetic polypeptide
MHHHHHHGGSGSPILGYWKIKGLVQPTRLLLEYLEEKYEEHLYERDEGDKWRNKKFELGLEFPNLPYYIDGDVKLTQSMAIIRYIADKHNMLGGCPKERAEISMLEGAVLDIRYGVSRIAYSKDFETLKVDFLSKLPEMLKMFEDRLCHKTYLNGDHVTHPDFMLYDALDVVLYMDPMCLDAFPKLVCFKKRIEAIPQIDKYLKSSKYIAWPLQGWQATFGGGDHPPKSDLVPRGSPGIHRDGGSGENLYFQSSDNGPQNQRNAPRITFGGPSDSTGSNQNGERSGARSKQRRPQGLPNNTASWFTALTQHGKEDLKFPRGQGVPINTNSSPDDQIGYYRRATRRIRGGDGKMKDLSPRWYFYYLGTGPEAGLPYGANKDGIIWVATEGALNTPKDHIGTRNPANNAAIVLQLPQGTTLPKGFYAEGSRGGSQASSRSSSRSRNSSRNSTPGSSRGTSPARMAGNGGDAALALLLLDRLNQLESKMSGKGQQQQGQTVTKKSAAEASKKPRQKRTATKAYNVTQAFGRRGPEQTQGNFGDQELIRQGTDYKHWPQIAQFAPSASAFFGMSRIGMEVTPNGTWLTYTGAIKLDDKDPNFKDQVILLNKHIDAYKTFPPTEPKKDKKKKADETQALPQRQKKQQTVTLLPAADLDDFSKQLQQSMSSADSTQA

SEQ ID NO: 680 - protein, 671 aa, Artificial Sequence
  Description of Artificial Sequence: Synthetic polypeptide
MHHHHHHGGSGSPILGYWKIKGLVQPTRLLLEYLEEKYEEHLYERDEGDKWRNKKFELGLEFPNLPYYIDGDVKLTQSMAIIRYIADKHNMLGGCPKERAEISMLEGAVLDIRYGVSRIAYSKDFETLKVDFLSKLPEMLKMFEDRLCHKTYLNGDHVTHPDFMLYDALDVVLYMDPMCLDAFPKLVCFKKRIEAIPQIDKYLKSSKYIAWPLQGWQATFGGGDHPPKSDLVPRGSPGIHRDGGSGENLYFQSSDNGPQNQRNAPRITFGGPSDSTGSNQNGERSGARSKQRRPQGLPNNTASWFTALTQHGKEDLKFPRGQGVPINTNSSPDDQIGYYRRATRRIRGGDGKMKDLSPRWYFYYLGTGPEAGLPYGANKDGIIWVATEGALNTPKDHIGTRNPANNAAIVLQLPQGTTLPKGFYAEGSRGGSQASSRSSSRSRNSSRNSTPGSSRGTSPARMAGNGGDAALALLLLDRLNQLESKMSGKGQQQQGQTVTKKSAAEASKKPRQKRTATKAYNVTQAFGRRGPEQTQGNFGDQELIRQGTDYKKWPQIAQFAPSASAFFGMSRIGMEVTPSGTWLTYTGAIKLDDKDPNFKDQVILLNKHIDAYKTFPPTEPKKDKKKKADETQALPQRQKKQQTVTLLPAADLDDFSKQLQQSMSSADSTQA

SEQ ID NO: 681 - protein, 671 aa, Artificial Sequence
  Description of Artificial Sequence: Synthetic polypeptide
MHHHHHHGGSGSPILGYWKIKGLVQPTRLLLEYLEEKYEEHLYERDEGDKWRNKKFELGLEFPNLPYYIDGDVKLTQSMAIIRYIADKHNMLGGCPKERAEISMLEGAVLDIRYGVSRIAYSKDFETLKVDFLSKLPEMLKMFEDRLCHKTYLNGDHVTHPDFMLYDALDVVLYMDPMCLDAFPKLVCFKKRIEAIPQIDKYLKSSKYIAWPLQGWQATFGGGDHPPKSDLVPRGSPGIHRDGGSGENLYFQSSDNGPQNQRNAPRITFGGPSDSTGSNQNGERSGARSKQRRPQGLPNNTASWFTALTQHGKEDLKFPRGQGVPINTNSSPDDQIGYYRRATRRIRGGDGKMKDLSPRWYFYYLGTGPEAGLPYGANKDGIIWVATEGALNTPKDHIGTRNPANNAAIVLQLPQGTTLPKGFYAEGSRGGSQASSRSSSRSRNSSRNSTPGSSRGTSPARMAGNGGDAALALLLLDRLNQLESKMSGKGQQQQGQTVTKKSAAEASKKPRQKRTATKDYNVTQAFGRRGPEQTQGNFGDQDLIKLGTDYKHWPQIAQFAPSASAFFGMSRIGTEETPSGTWLTYTGAIKLDKKDPNFKDQVILLNKHIDAYKTFPPTEPKKDKKKKADETQALPQRQKKQQTVTLLPAADLDDFSKQLQQSMSSADSTQA

SEQ ID NO: 682 - protein, 671 aa, Artificial Sequence
  Description of Artificial Sequence: Synthetic polypeptide
MHHHHHHGGSGSPILGYWKIKGLVQPTRLLLEYLEEKYEEHLYERDEGDKWRNKKFELGLEFPNLPYYIDGDVKLTQSMAIIRYIADKHNMLGGCPKERAEISMLEGAVLDIRYGVSRIAYSKDFETLKVDFLSKLPEMLKMFEDRLCHKTYLNGDHVTHPDFMLYDALDVVLYMDPMCLDAFPKLVCFKKRIEAIPQIDKYLKSSKYIAWPLQGWQATFGGGDHPPKSDLVPRGSPGIHRDGGSGENLYFQSSDNGPQNQRNAPRITFGGPSDSTGSNQNGERSGARSKQRRPQGLPNNTASWFTALTQHGKEDLKFPRGQGVPINTNSSPDDQIGYYRRATRRIRGGDGKMKDLPPRWYFYYLGTGPEAGLPYGANKDGIIWVATEGALNTPKDHIGTRNPANNAAIVLQLPQGTTLPKGFYAEGSRGGSQASSRSSSRSRNSSRNSTPGSSRGTSPARMAGNGGDAALALLLLDRLNQLESKMSGKGQQQQGQTVTKKSAAEASKKPRQKRTATKAYNVTQAFGRRGPEQTQGNFGDQELIRQGTDYKHWPQIAQFAPSASAFFGMSRIGMEVTPSGTWLTYTGAIKLDDKDPNFKDQVILLNKHIDAYKTFPPTEPKKDKKKKADETQALPQRQKKQQTVTLLPAADLDDFSKQLQQSMSSADSTQA

SEQ ID NO: 683 - protein, 671 aa, Artificial Sequence
  Description of Artificial Sequence: Synthetic polypeptide
MHHHHHHGGSGSPILGYWKIKGLVQPTRLLLEYLEEKYEEHLYERDEGDKWRNKKFELGLEFPNLPYYIDGDVKLTQSMAIIRYIADKHNMLGGCPKERAEISMLEGAVLDIRYGVSRIAYSKDFETLKVDFLSKLPEMLKMFEDRLCHKTYLNGDHVTHPDFMLYDALDVVLYMDPMCLDAFPKLVCFKKRIEAIPQIDKYLKSSKYIAWPLQGWQATFGGGDHPPKSDLVPRGSPGIHRDGGSGENLYFQSSDNGPQNQRNAPRITFGGPSDSTGSNQNGERSGARSKQRRPQGLPNNTASWFTALTQHGKEDLKFPRGQGWPINTNSSPDDQIGYYRRATRRIRGGDGKMKDLSPRWYFYYLGTGPEAGLPYGANKDGIIWVATEGALNTPKDHIGTRNPANNAAIVLQLPQGTTLPKGFYAEGSRGGSQASSRSSSRSRNSSRNSTPGSSRGTSPARMAGNGGDAALALLLLDRLNQLESKMSGKGQQQQGQTVTKKSAAEASKKPRQKRTATKAYNVTQAFGRRGPEQTQGNFGDQELIRQGTDYKHWPQIAQFAPSASAFFGMSRIGMEVTPSGTWLTYTGAIKLDDKDPNFKDQVILLNKHIDAYKTFPPTEPKKDKKKKADETQALPQRQKKQQTVTLLPAADLDDFSKQLQQSMSSADSTQA

SEQ ID NO: 684 - protein, 671 aa, Artificial Sequence
  Description of Artificial Sequence: Synthetic polypeptide
MHHHHHHGGSGSPILGYWKIKGLVQPTRLLLEYLEEKYEEHLYERDEGDKWRNKKFELGLEFPNLPYYIDGDVKLTQSMAIIRYIADKHNMLGGCPKERAEISMLEGAVLDIRYGVSRIAYSKDFETLKVDFLSKLPEMLKMFEDRLCHKTYLNGDHVTHPDFMLYDALDVVLYMDPMCLDAFPKLVCFKKRIEAIPQIDKYLKSSKYIAWPLQGWQATFGGGDHPPKSDLVPRGSPGIHRDGGSGENLYFQSSDNGPQNQRNAPRITFGGPSDSTGSNQNGERSGARSKQRRPQGLPNNTASWFTALTQHGKEDLKFPRGQGVPINTNSSPDDQIGYYRRATRRIRGGDGKMKDLSPRWYFYYLGTGPEAGLPYGANKDGIIWVATEGALNTPKDHIGTRNPANNAAIVLQLPQGTTLPKGFYAEGSRGGSQASSRSSSRSRNSSRNSTPGSSRGTSPARMAGNGGDAALALLLLDRLNQLESKMSGKGQQQQGQTVTKKSAAEASKKPRQKRTATKAYNVTQAFGRRGPEQTQGNFGDQELIRQGTDYKHWPQIAQFAPSASAFFGMSRIGMEVTPSGTWLTYTGTIKLDDKDPNFKDQVILLNKHIDAYKTFPPTEPKKDKKKKADETQALPQRQKKQQTVTLLPAADLDDFSKQLQQSMSSADSTQA

SEQ ID NO: 685 - protein, 671 aa, Artificial Sequence
  Description of Artificial Sequence: Synthetic polypeptide
MHHHHHHGGSGSPILGYWKIKGLVQPTRLLLEYLEEKYEEHLYERDEGDKWRNKKFELGLEFPNLPYYIDGDVKLTQSMAIIRYIADKHNMLGGCPKERAEISMLEGAVLDIRYGVSRIAYSKDFETLKVDFLSKLPEMLKMFEDRLCHKTYLNGDHVTHPDFMLYDALDVVLYMDPMCLDAFPKLVCFKKRIEAIPQIDKYLKSSKYIAWPLQGWQATFGGGDHPPKSDLVPRGSPGIHRDGGSGENLYFQSSDNGPQNQRNAPRITFGGPSDSTGSNQNGERSGARSKQRRPQGLPNNTASWFTALTQHGKEDLKFPRGQGVPINTNSSPDDQIGYYRRATRRIRGGDGKMKDLSPRWYFYYLGTGPEAGLPYGANKDGIIWVATEGALNTPKDHIGTRNPANNAAIVLQLPQGTTLPKGFYAEGSRGGSQASSRSSSRSRNSSRNSTPGSSRGTSPARMAGNGGDAALALLLLDRLNQLESKMSGKGQQQQGQTVTKKSAAEASKKPRQKRTATKAYNVTQAFGRRGPEQTQGNFGDQELIRQGTDYKHWPQIAQFAPSASAFFGMSRIGMEVAPSGTWLTYTGAIKLDDKDPNFKDQVILLNKHIDAYKTFPPTEPKKDKKKKADETQALPQRQKKQQTVTLLPAADLDDFSKQLQQSMSSADSTQA

SEQ ID NO: 686 - protein, 671 aa, Artificial Sequence
  Description of Artificial Sequence: Synthetic polypeptide
MHHHHHHGGSGSPILGYWKIKGLVQPTRLLLEYLEEKYEEHLYERDEGDKWRNKKFELGLEFPNLPYYIDGDVKLTQSMAIIRYIADKHNMLGGCPKERAEISMLEGAVLDIRYGVSRIAYSKDFETLKVDFLSKLPEMLKMFEDRLCHKTYLNGDHVTHPDFMLYDALDVVLYMDPMCLDAFPKLVCFKKRIEAIPQIDKYLKSSKYIAWPLQGWQATFGGGDHPPKSDLVPRGSPGIHRDGGSGENLYFQSSDNGPQNQRNAPRITFGGPSDSTGSNQNGERSGARSKQRRPQGLPNNTASWFTALTQHGKEDLKFPRGQGVPINTNSSPDDQIGYYRRATRRIRGGDGKMKDLSPRWYFYYLGTGPEAGLPYGANKDGIIWVATEGALNTPKDHIGTRNPANNEAIVLQLPQGTTLPKGFYAEGSRGGSQASSRSSSRSRNSSRNSTPGSSRGTSPARMAGNGGDAALALLLLDRLNQLESKMSGKGQQQQGQTVTKKSAAEASKKPRQKRTATKAYNVTQAFGRRGPEQTQGNFGDQELIRQGTDYKHWPQIAQFAPSASAFFGMSRIGMEVTPSGTWLTYTGAIKLDDKDPNFKDQVILLNKHIDAYKTFPPTEPKKDKKKKADETQALPQRQKKQQTVTLLPAADLDDFSKQLQQSMSSADSTQA

SEQ ID NO: 687 - protein, 671 aa, Artificial Sequence
  Description of Artificial Sequence: Synthetic polypeptide
MHHHHHHGGSGSPILGYWKIKGLVQPTRLLLEYLEEKYEEHLYERDEGDKWRNKKFELGLEFPNLPYYIDGDVKLTQSMAIIRYIADKHNMLGGCPKERAEISMLEGAVLDIRYGVSRIAYSKDFETLKVDFLSKLPEMLKMFEDRLCHKTYLNGDHVTHPDFMLYDALDVVLYMDPMCLDAFPKLVCFKKRIEAIPQIDKYLKSSKYIAWPLQGWQATFGGGDHPPKSDLVPRGSPGIHRDGGSGENLYFQSSDNGPQNQRNAPRITFGGPSDSTGSNQNGERSGARSKQRRPQGLPNNTASWFTALTQHGKEDLKFPRGQGVPINTNSSPDDQIGYYRRATRRIRGGDGKMKDLSPRWYFYYLGTGPEAGLPYGANKDGIIWVATEGALNTPKDHIGTRNPANNAAIVLQLPQGTTLPKGFYAEGSRGGSQASSRSSSRSRNSSRNSTPGSSRGTSPARMAGNGGDAALALLLLDRLNQLESKMSGKGQQQQGQTVTKKSAAEASKKPRQKRTATKAYNVTQAFGRRGPEQTQGNFGDQELIRQGTDYKHWPQIAQFAPSASAFFGMSRIGMEVNPSGTWLTYTGAIKLDDKDPNFKDQVILLNKHIDAYKTFPPTEPKKDKKKKADETQALPQRQKKQQTVTLLPAADLDDFSKQLQQSMSSADSTQA

SEQ ID NO: 688 - protein, 671 aa, Artificial Sequence
  Description of Artificial Sequence: Synthetic polypeptide
MHHHHHHGGSGSPILGYWKIKGLVQPTRLLLEYLEEKYEEHLYERDEGDKWRNKKFELGLEFPNLPYYIDGDVKLTQSMAIIRYIADKHNMLGGCPKERAEISMLEGAVLDIRYGVSRIAYSKDFETLKVDFLSKLPEMLKMFEDRLCHKTYLNGDHVTHPDFMLYDALDVVLYMDPMCLDAFPKLVCFKKRIEAIPQIDKYLKSSKYIAWPLQGWQATFGGGDHPPKSDLVPRGSPGIHRDGGSGENLYFQSSDNGPQNQRNAPRITFGGPSDSTGSNQNGERSGARSKQRRPQGLPNNTASWFTALTQHGKEDLKFPRGQGVPINTNSSPDDQIGYYRRATRRIRGGDGKMKDLSPRWYFYYLGTGPEAGLPYGANKDGIIWVATPGALNTPKDHIGTRNPANNAAIVLQLPQGTTLPKGFYAEGSRGGSQASSRSSSRSRNSSRNSTPGSSRGTSPARMAGNGGDAALALLLLDRLNQLESKMSGKGQQQQGQTVTKKSAAEASKKPRQKRTATKAYNVTQAFGRRGPEQTQGNFGDQELIRQGTDYKHWPQIAQFAPSASAFFGMSRIGMEVTPSGTWLTYTGAIKLDDKDPNFKDQVILLNKHIDAYKTFPPTEPKKDKKKKADETQALPQRQKKQQTVTLLPAADLDDFSKQLQQSMSSADSTQA

SEQ ID NO: 689 - protein, 671 aa, Artificial Sequence
  Description of Artificial Sequence: Synthetic polypeptide
MHHHHHHGGSGSPILGYWKIKGLVQPTRLLLEYLEEKYEEHLYERDEGDKWRNKKFELGLEFPNLPYYIDGDVKLTQSMAIIRYIADKHNMLGGCPKERAEISMLEGAVLDIRYGVSRIAYSKDFETLKVDFLSKLPEMLKMFEDRLCHKTYLNGDHVTHPDFMLYDALDVVLYMDPMCLDAFPKLVCFKKRIEAIPQIDKYLKSSKYIAWPLQGWQATFGGGDHPPKSDLVPRGSPGIHRDGGSGENLYFQSSDNGPQNQRNAPRITFGGPSDSTGSNQNGERSGARSKQRRPQGLPNNTASWFTALTQHGKEDLKFPRGQGVPINTNSSPDDQIGYYRRATRRIRGGDGKMKDLSPRWYFYYLGTGPEAGLPYGANKDGIIWVATEGALNTPKDHIGTRNPANNAAIVLQLPQGTTLPKGFYAEGSRGGSQASSRSSSRSRNSSRNSTPGSSRGTSPARMAGNGGDAALALLLLDRLNQLESKMSGKGQQQQGQTVTKKSAAEASKKPRQKRTATKAYNVTQAFGRRGPEQTQGNFGDQELIRQGTDYKHWPQIAQFAPSASAFFGMSRIGMETTPSGTWLTYTGAIKLDDKDPNFKDQVILLNKHIDAYKTFPPTEPKKDKKKKADETQALPQRQKKQQTVTLLPAADLDDFSKQLQQSMSSADSTQA

SEQ ID NO: 690 - protein, 671 aa, Artificial Sequence
  Description of Artificial Sequence: Synthetic polypeptide
MHHHHHHGGSGSPILGYWKIKGLVQPTRLLLEYLEEKYEEHLYERDEGDKWRNKKFELGLEFPNLPYYIDGDVKLTQSMAIIRYIADKHNMLGGCPKERAEISMLEGAVLDIRYGVSRIAYSKDFETLKVDFLSKLPEMLKMFEDRLCHKTYLNGDHVTHPDFMLYDALDVVLYMDPMCLDAFPKLVCFKKRIEAIPQIDKYLKSSKYIAWPLQGWQATFGGGDHPPKSDLVPRGSPGIHRDGGSGENLYFQSSDNGPQNQRNAPRITFGGPSDSTGSNQNGERSGARSKQRRPQGLPNNTASWFTALTQKGKEDLKFPRGQGVPINTNSSPDDQIGYYRRATRRIRGGDGKMKDLSPRWYFYYLGTGPEAGLPYGANKDGIIWVATEGALNTPKDHIGTRNPANNAAIVLQLPQGTTLPKGFYAEGSRGGSQASSRSSSRSRNSSRNSTPGSSRGTSPARMAGNGGDAALALLLLDRLNQLESKMSGKGQQQQGQTVTKKSAAEASKKPRQKRTATKAYNVTQAFGRRGPEQTQGNFGDQELIRQGTDYKHWPQIAQFAPSASAFFGMSRIGMEVTPSGTWLTYTGAIKLDDKDPNFKDQVILLNKHIDAYKTFPPTEPKKDKKKKADETQALPQRQKKQQTVTLLPAADLDDFSKQLQQSMSSADSTQA

SEQ ID NO: 691 - protein, 671 aa, Artificial Sequence
  Description of Artificial Sequence: Synthetic polypeptide
MHHHHHHGGSGSPILGYWKIKGLVQPTRLLLEYLEEKYEEHLYERDEGDKWRNKKFELGLEFPNLPYYIDGDVKLTQSMAIIRYIADKHNMLGGCPKERAEISMLEGAVLDIRYGVSRIAYSKDFETLKVDFLSKLPEMLKMFEDRLCHKTYLNGDHVTHPDFMLYDALDVVLYMDPMCLDAFPKLVCFKKRIEAIPQIDKYLKSSKYIAWPLQGWQATFGGGDHPPKSDLVPRGSPGIHRDGGSGENLYFQSSDNGPQNQRNAPRITFGGPSDSTGSNQNGERSGARSKQRRPQGLPNNTASWFTALTQHGKEDLKFPRGQGVPINTNSSPDDQIGYYRRATRRIRGGDGKMKDLSPRWYFYYLGTGPEAGLPYGANKDGIIWVATEGALNTPKDHIGTRNPANNAAIVLQLPQGTTLPKGFYAEGSRGGSQASSRSSSRSRNSSRNSTPGSSRGTSPARMAGNGGDAALALLLLDRLNQLESKMSGKGQQQQGQTVTKKSAAEASKKPRQKRTATKAYNVTQAFGRRGPHQTQGNFGDQELIRQGTDYKHWPQIAQFAPSASAFFGMSRIGMEVTPSGTWLTYTGAIKLDDKDPNFKDQVILLNKHIDAYKTFPPTEPKKDKKKKADETQALPQRQKKQQTVTLLPAADLDDFSKQLQQSMSSADSTQA

SEQ ID NO: 692 - protein, 671 aa, Artificial Sequence
  Description of Artificial Sequence: Synthetic polypeptide
MHHHHHHGGSGSPILGYWKIKGLVQPTRLLLEYLEEKYEEHLYERDEGDKWRNKKFELGLEFPNLPYYIDGDVKLTQSMAIIRYIADKHNMLGGCPKERAEISMLEGAVLDIRYGVSRIAYSKDFETLKVDFLSKLPEMLKMFEDRLCHKTYLNGDHVTHPDFMLYDALDVVLYMDPMCLDAFPKLVCFKKRIEAIPQIDKYLKSSKYIAWPLQGWQATFGGGDHPPKSDLVPRGSPGIHRDGGSGENLYFQSSDNGPQNQRNAPRITFGGPSDSTGSNQNGERSGARSKQRRPQGLPNNTASWFTALTQHGKEDLKFPEGQGVPINTNSSPDDQIGYYRRATRRIRGGDGKMKDLSPRWYFYYLGTGPEAGLPYGANKDGIIWVATEGALNTPKDHIGTRNPANNAAIVLQLPQGTTLPKGFYAEGSRGGSQASSRSSSRSRNSSRNSTPGSSRGTSPARMAGNGGDAALALLLLDRLNQLESKMSGKGQQQQGQTVTKKSAAEASKKPRQKRTATKAYNVTQAFGRRGPEQTQGNFGDQELIRQGTDYKHWPQIAQFAPSASAFFGMSRIGMEVTPSGTWLTYTGAIKLDDKDPNFKDQVILLNKHIDAYKTFPPTEPKKDKKKKADETQALPQRQKKQQTVTLLPAADLDDFSKQLQQSMSSADSTQA

SEQ ID NO: 693 - protein, 671 aa, Artificial Sequence
  Description of Artificial Sequence: Synthetic polypeptide
MHHHHHHGGSGSPILGYWKIKGLVQPTRLLLEYLEEKYEEHLYERDEGDKWRNKKFELGLEFPNLPYYIDGDVKLTQSMAIIRYIADKHNMLGGCPKERAEISMLEGAVLDIRYGVSRIAYSKDFETLKVDFLSKLPEMLKMFEDRLCHKTYLNGDHVTHPDFMLYDALDVVLYMDPMCLDAFPKLVCFKKRIEAIPQIDKYLKSSKYIAWPLQGWQATFGGGDHPPKSDLVPRGSPGIHRDGGSGENLYFQSSDNGPQNQRNAPRITFGGPSDSTGSNQNGERSGARSKQRRPQGLPNNTASWFTALTQHGKEDLTFPRGQGVPINTNSSPDDQIGYYRRATRRIRGGDGKMKDLSPRWYFYYLGTGPEAGLPYGANKDGIIWVATEGALNTPKDHIGTRNPANNAAIVLQLPQGTTLPKGFYAEGSRGGSQASSRSSSRSRNSSRNSTPGSSRGTSPARMAGNGGDAALALLLLDRLNQLESKMSGKGQQQQGQTVTKKSAAEASKKPRQKRTATKAYNVTQAFGRRGPEQTQGNFGDQELIRQGTDYKHWPQIAQFAPSASAFFGMSRIGMEVTPSGTWLTYTGAIKLDDKDPNFKDQVILLNKHIDAYKTFPPTEPKKDKKKKADETQALPQRQKKQQTVTLLPAADLDDFSKQLQQSMSSADSTQA

SEQ ID NO: 694 - protein, 671 aa, Artificial Sequence
  Description of Artificial Sequence: Synthetic polypeptide
MHHHHHHGGSGSPILGYWKIKGLVQPTRLLLEYLEEKYEEHLYERDEGDKWRNKKFELGLEFPNLPYYIDGDVKLTQSMAIIRYIADKHNMLGGCPKERAEISMLEGAVLDIRYGVSRIAYSKDFETLKVDFLSKLPEMLKMFEDRLCHKTYLNGDHVTHPDFMLYDALDVVLYMDPMCLDAFPKLVCFKKRIEAIPQIDKYLKSSKYIAWPLQGWQATFGGGDHPPKSDLVPRGSPGIHRDGGSGENLYFQSSDNGPQNQRNAPRITFGGPSDSTGSNQNGERSGARSKQRRPQGLPNNTASWFTALTQHGKEDLKFPRGQGVPINTNSSPDDQIGYYRRATRRIRGGDGKMKDLSPRWYFYYLGTGPEAGLPYGANKDGIIWVATEGALNTPKDHIGTRNPNNNAAIVLQLPQGTTLPKGFYAEGSRGGSQASSRSSSRSRNSSRNSTPGSSRGTSPARMAGNGGDAALALLLLDRLNQLESKMSGKGQQQQGQTVTKKSAAEASKKPRQKRTATKAYNVTQAFGRRGPEQTQGNFGDQELIRQGTDYKHWPQIAQFAPSASAFFGMSRIGMEVTPSGTWLTYTGAIKLDDKDPNFKDQVILLNKHIDAYKTFPPTEPKKDKKKKADETQALPQRQKKQQTVTLLPAADLDDFSKQLQQSMSSADSTQA

SEQ ID NO: 695 - protein, 671 aa, Artificial Sequence
  Description of Artificial Sequence: Synthetic polypeptide
MHHHHHHGGSGSPILGYWKIKGLVQPTRLLLEYLEEKYEEHLYERDEGDKWRNKKFELGLEFPNLPYYIDGDVKLTQSMAIIRYIADKHNMLGGCPKERAEISMLEGAVLDIRYGVSRIAYSKDFETLKVDFLSKLPEMLKMFEDRLCHKTYLNGDHVTHPDFMLYDALDVVLYMDPMCLDAFPKLVCFKKRIEAIPQIDKYLKSSKYIAWPLQGWQATFGGGDHPPKSDLVPRGSPGIHRDGGSGENLYFQSSDNGPQNQRNAPRITFGGPSDSTGSNQNGERSGARSKQRRPQGLPNNTASWFTALTQHGKEDLKFPRGQGVPINTNSSPDDQIGYYRRATRRIRGGDGKMKDLSPRWYFYYLGTGPEAGLPYGANKDGIIWVASEGALNTPKDHIGTRNPANNAAIVLQLPQGTTLPKGFYAEGSRGGSQASSRSSSRSRNSSRNSTPGSSRGTSPARMAGNGGDAALALLLLDRLNQLESKMSGKGQQQQGQTVTKKSAAEASKKPRQKRTATKAYNVTQAFGRRGPEQTQGNFGDQELIRQGTDYKHWPQIAQFAPSASAFFGMSRIGMEVTPSGTWLTYTGAIKLDDKDPNFKDQVILLNKHIDAYKTFPPTEPKKDKKKKADETQALPQRQKKQQTVTLLPAADLDDFSKQLQQSMSSADSTQA

SEQ ID NO: 696 - protein, 671 aa, Artificial Sequence
  Description of Artificial Sequence: Synthetic polypeptide
MHHHHHHGGSGSPILGYWKIKGLVQPTRLLLEYLEEKYEEHLYERDEGDKWRNKKFELGLEFPNLPYYIDGDVKLTQSMAIIRYIADKHNMLGGCPKERAEISMLEGAVLDIRYGVSRIAYSKDFETLKVDFLSKLPEMLKMFEDRLCHKTYLNGDHVTHPDFMLYDALDVVLYMDPMCLDAFPKLVCFKKRIEAIPQIDKYLKSSKYIAWPLQGWQATFGGGDHPPKSDLVPRGSPGIHRDGGSGENLYFQSSDNGPQNQRNAPRITFGGPSDSTGSNQNGERSGARSKQRRPQGLPNNTASWFTALTQHGKEDLKFPRGQGVPINTNSSPDDQIGYYRRATRRIRGGDGKMKDLSPRWYFYYLGTGPEAGLPYGANKDGIIWVATEGALNTPKDHIGTRNPANNAAIVLQLPQGTTLPKGFYAEGSRGGSQASSRSSSRSRNSSRNSTPGSSRGTSPARMAGNGGDAALALLLLDRLNQLESKMSGKGQQQQGQTVTKKSAAEASKKPRQKRTATKAYNVTQAFGRRGPEQTQGNFGDQELIRQGTDYKHWPQIAQFAPSASAFFGMSRIGSEVTPSGTWLTYTGAIKLDDKDPNFKDQVILLNKHIDAYKTFPPTEPKKDKKKKADETQALPQRQKKQQTVTLLPAADLDDFSKQLQQSMSSADSTQA

SEQ ID NO: 697 - protein, 671 aa, Artificial Sequence
  Description of Artificial Sequence: Synthetic polypeptide
MHHHHHHGGSGSPILGYWKIKGLVQPTRLLLEYLEEKYEEHLYERDEGDKWRNKKFELGLEFPNLPYYIDGDVKLTQSMAIIRYIADKHNMLGGCPKERAEISMLEGAVLDIRYGVSRIAYSKDFETLKVDFLSKLPEMLKMFEDRLCHKTYLNGDHVTHPDFMLYDALDVVLYMDPMCLDAFPKLVCFKKRIEAIPQIDKYLKSSKYIAWPLQGWQATFGGGDHPPKSDLVPRGSPGIHRDGGSGENLYFQSSDNGPQNQRNAPRITFGGPSDSTGSNQNGERSGARSKQRRPQGLPNNTASWFTPLTQFGKEDLKFPPGQGVPINTNSSPDDQIGYYRRATRRIRGGDGKMKDLPPKWYFYYLGTGPHADLPYGHKHDGVVWVARPGALNTPKDHIGTRNPANNAAIPLQLPPGTKLPKGFYAEGSRGGSQASSRSSSRSRNSSRNSTPGSSRGTSPARMAGNGGDAALALLLLDRLNQLESKMSGKGQQQQGQTVTKKSAAEASKKPRQKRTATKAYNVTQAFGRRGPEQTQGNFGDQELIRQGTDYKHWPQIAQFAPSASAFFGMSRIGMEVTPSGTWLTYTGAIKLDDKDPNFKDQVILLNKHIDAYKTFPPTEPKKDKKKKADETQALPQRQKKQQTVTLLPAADLDDFSKQLQQSMSSADSTQA

SEQ ID NO: 698 - protein, 671 aa, Artificial Sequence
  Description of Artificial Sequence: Synthetic polypeptide
MHHHHHHGGSGSPILGYWKIKGLVQPTRLLLEYLEEKYEEHLYERDEGDKWRNKKFELGLEFPNLPYYIDGDVKLTQSMAIIRYIADKHNMLGGCPKERAEISMLEGAVLDIRYGVSRIAYSKDFETLKVDFLSKLPEMLKMFEDRLCHKTYLNGDHVTHPDFMLYDALDVVLYMDPMCLDAFPKLVCFKKRIEAIPQIDKYLKSSKYIAWPLQGWQATFGGGDHPPKSDLVPRGSPGIHRDGGSGENLYFQSSDNGPQNQRNAPRITFGGPSDSTGSNQNGERSGARSKQRRPQGLPNNTASWFTALTQHGKEDLKFPRGQGVPINTNSSPDDQIGYYRRATRRIRGGDGKMKDLSPSWYFYYLGTGPEAGLPYGANKDGIIWVATEGALNTPKDHIGTRNPANNAAIVLQLPQGTTLPKGFYAEGSRGGSQASSRSSSRSRNSSRNSTPGSSRGTSPARMAGNGGDAALALLLLDRLNQLESKMSGKGQQQQGQTVTKKSAAEASKKPRQKRTATKAYNVTQAFGRRGPEQTQGNFGDQELIRQGTDYKHWPQIAQFAPSASAFFGMSRIGMEVTPSGTWLTYTGAIKLDDKDPNFKDQVILLNKHIDAYKTFPPTEPKKDKKKKADETQALPQRQKKQQTVTLLPAADLDDFSKQLQQSMSSADSTQA

SEQ ID NO: 699 - protein, 671 aa, Artificial Sequence
  Description of Artificial Sequence: Synthetic polypeptide
MHHHHHHGGSGSPILGYWKIKGLVQPTRLLLEYLEEKYEEHLYERDEGDKWRNKKFELGLEFPNLPYYIDGDVKLTQSMAIIRYIADKHNMLGGCPKERAEISMLEGAVLDIRYGVSRIAYSKDFETLKVDFLSKLPEMLKMFEDRLCHKTYLNGDHVTHPDFMLYDALDVVLYMDPMCLDAFPKLVCFKKRIEAIPQIDKYLKSSKYIAWPLQGWQATFGGGDHPPKSDLVPRGSPGIHRDGGSGENLYFQSSDNGPQNQRNAPRITFGGPSDSTGSNQNGERSGARSKQRRPQGLPNNTASWFTALTQHGKEDLKFPRGQGVPINTNSSPDDQIGYYRRATRRIRGGDGKMKDLSPRWYFYYLGTGPEAGLPYGANKDGIIWVATNGALNTPKDHIGTRNPANNAAIVLQLPQGTTLPKGFYAEGSRGGSQASSRSSSRSRNSSRNSTPGSSRGTSPARMAGNGGDAALALLLLDRLNQLESKMSGKGQQQQGQTVTKKSAAEASKKPRQKRTATKAYNVTQAFGRRGPEQTQGNFGDQELIRQGTDYKHWPQIAQFAPSASAFFGMSRIGMEVTPSGTWLTYTGAIKLDDKDPNFKDQVILLNKHIDAYKTFPPTEPKKDKKKKADETQALPQRQKKQQTVTLLPAADLDDFSKQLQQSMSSADSTQA

SEQ ID NO: 700 - protein, 671 aa, Artificial Sequence
  Description of Artificial Sequence: Synthetic polypeptide
MHHHHHHGGSGSPILGYWKIKGLVQPTRLLLEYLEEKYEEHLYERDEGDKWRNKKFELGLEFPNLPYYIDGDVKLTQSMAIIRYIADKHNMLGGCPKERAEISMLEGAVLDIRYGVSRIAYSKDFETLKVDFLSKLPEMLKMFEDRLCHKTYLNGDHVTHPDFMLYDALDVVLYMDPMCLDAFPKLVCFKKRIEAIPQIDKYLKSSKYIAWPLQGWQATFGGGDHPPKSDLVPRGSPGIHRDGGSGENLYFQSSDNGPQNQRNAPRITFGGPSDSTGSNQNGERSGARSKQRRPQGLPNNTASWFTALTQHGKEDLKFPRGQGVPINTNSSPDDQIGYYRRATRRIRGGDGKMKDLSPRWYFYYLGTGPEAGLPYGANKDGIIWVAKEGALNTPKDHIGTRNPANNAAIVLQLPQGTTLPKGFYAEGSRGGSQASSRSSSRSRNSSRNSTPGSSRGTSPARMAGNGGDAALALLLLDRLNQLESKMSGKGQQQQGQTVTKKSAAEASKKPRQKRTATKAYNVTQAFGRRGPEQTQGNFGDQELIRQGTDYKHWPQIAQFAPSASAFFGMSRIGMEVTPSGTWLTYTGAIKLDDKDPNFKDQVILLNKHIDAYKTFPPTEPKKDKKKKADETQALPQRQKKQQTVTLLPAADLDDFSKQLQQSMSSADSTQA

SEQ ID NO: 701 - protein, 671 aa, Artificial Sequence
  Description of Artificial Sequence: Synthetic polypeptide
MHHHHHHGGSGSPILGYWKIKGLVQPTRLLLEYLEEKYEEHLYERDEGDKWRNKKFELGLEFPNLPYYIDGDVKLTQSMAIIRYIADKHNMLGGCPKERAEISMLEGAVLDIRYGVSRIAYSKDFETLKVDFLSKLPEMLKMFEDRLCHKTYLNGDHVTHPDFMLYDALDVVLYMDPMCLDAFPKLVCFKKRIEAIPQIDKYLKSSKYIAWPLQGWQATFGGGDHPPKSDLVPRGSPGIHRDGGSGENLYFQSSDNGPQNQRNAPRITFGGPSDSTGSNQNGERSGARSKQRRPQGLPNNTASWFTALTQHGKEDLKFPRGQGVPINTNSSPDDQIGYYRRATRRIRGGDGKMKDLSPRWYFYYLGTGPEAGLPYGANKDGIIWVATEGALNTPKDHIGTRNPANNAAIVLQLPQGTTLPKGFYAEGSRGGSQASSRSSSRSRNSSRNSTPGSSRGTSPARMAGNGGDAALALLLLDRLNQLESKMSGKGQQQQGQTVTKKSAAEASKKPRQKRTATKAYNVTQAFGRRGPEQTQGNFGDQELIRQGTDYKHWPQIAQFVPSASAFFGMSRIGMEVTPSGTWLTYTGAIKLDDKDPNFKDQVILLNKHIDAYKTFPPTEPKKDKKKKADETQALPQRQKKQQTVTLLPAADLDDFSKQLQQSMSSADSTQA

SEQ ID NO: 702 - protein, 671 aa, Artificial Sequence
  Description of Artificial Sequence: Synthetic polypeptide
MHHHHHHGGSGSPILGYWKIKGLVQPTRLLLEYLEEKYEEHLYERDEGDKWRNKKFELGLEFPNLPYYIDGDVKLTQSMAIIRYIADKHNMLGGCPKERAEISMLEGAVLDIRYGVSRIAYSKDFETLKVDFLSKLPEMLKMFEDRLCHKTYLNGDHVTHPDFMLYDALDVVLYMDPMCLDAFPKLVCFKKRIEAIPQIDKYLKSSKYIAWPLQGWQATFGGGDHPPKSDLVPRGSPGIHRDGGSGENLYFQSSDNGPQNQRNAPRITFGGPSDSTGSNQNGERSGARSKQRRPQGLPNNTASWFTALTQHGKEDLKFPRGQGVPINTNSSPDDQIGYYRRATRRIRGGDGKMKDLSPRWYFYYLGTGPEAGLPYGANKDGIIWVATEGALNTPKDHIGTRNPANNAAIVLQLPQGTTLPKGFYAEGSRGGSQASSRSSSRSRNSSRNSTPGSSRGTSPARMAGNGGDAALALLLLDRLNQLESKMSGKGQQQQGQTVTKKSAAEASKKPRQKRTATKGYNVTQAFGRRGPEQTQGNFGDQDLNKLGTDYKHWPQIAQFAPSASAFFGMSRIGMEETPSGTWLTYTGAIKLDKKDPNFKDQVILLNKHIDAYKTFPPTEPKKDKKKKADETQALPQRQKKQQTVTLLPAADLDDFSKQLQQSMSSADSTQA

SEQ ID NO: 703 - protein, 671 aa, Artificial Sequence
  Description of Artificial Sequence: Synthetic polypeptide
MHHHHHHGGSGSPILGYWKIKGLVQPTRLLLEYLEEKYEEHLYERDEGDKWRNKKFELGLEFPNLPYYIDGDVKLTQSMAIIRYIADKHNMLGGCPKERAEISMLEGAVLDIRYGVSRIAYSKDFETLKVDFLSKLPEMLKMFEDRLCHKTYLNGDHVTHPDFMLYDALDVVLYMDPMCLDAFPKLVCFKKRIEAIPQIDKYLKSSKYIAWPLQGWQATFGGGDHPPKSDLVPRGSPGIHRDGGSGENLYFQSSDNGPQNQRNAPRITFGGPSDSTGSNQNGERSGARSKQRRPQGLPNNTASWFTALTQHGKEDLKFPRGQGVPINTNSSPDDQIGYYRRATRRIRGGDGKMKDLSPRWYFYYLGTGPEAGLPYGANKDGIIWVATEGALNTPKDHIGTRNPANNAAIVLQLPQGTTLPKGFYAEGSRGGSQASSRSSSRSRNSSRNSTPGSSRGTSPARMAGNGGDAALALLLLDRLNQLESKMSGKGQQQQGQTVTKKSAAEASKKPRQKRTATKAYNVTQAFGRRGPQQTQGNFGDQELIRQGTDYKHWPQIAQFAPSASAFFGMSRIGMEVTPSGTWLTYTGAIKLDDKDPNFKDQVILLNKHIDAYKTFPPTEPKKDKKKKADETQALPQRQKKQQTVTLLPAADLDDFSKQLQQSMSSADSTQA

SEQ ID NO: 704 - protein, 671 aa, Artificial Sequence
  Description of Artificial Sequence: Synthetic polypeptide
MHHHHHHGGSGSPILGYWKIKGLVQPTRLLLEYLEEKYEEHLYERDEGDKWRNKKFELGLEFPNLPYYIDGDVKLTQSMAIIRYIADKHNMLGGCPKERAEISMLEGAVLDIRYGVSRIAYSKDFETLKVDFLSKLPEMLKMFEDRLCHKTYLNGDHVTHPDFMLYDALDVVLYMDPMCLDAFPKLVCFKKRIEAIPQIDKYLKSSKYIAWPLQGWQATFGGGDHPPKSDLVPRGSPGIHRDGGSGENLYFQSSDNGPQNQRNAPRITFGGPSDSTGSNQNGERSGARSKQRRPQGLPNNTASWFTALTQHGKEDLKFPRGQGVPINTNSSPDDQIGYYRRATRRIRGGDGKMKDLSPRWYFYYLGTGPEAGLPYGANKDGIIWVATEGALNTPKDHIGTRNPANNAAIVLQLPQGTTLPKGFYAEGSRGGSQASSRSSERSRNSSRNSTPGESRGTEPARMAGNGGDAALALLLLDRLNQLESKMSGKGQQQQGQTVTKKSAAEASKKPRQKRTATKAYNVTQAFGRRGPEQTQGNFGDQELIRQGTDYKHWPQIAQFAPSASAFFGMSRIGMEVTPSGTWLTYTGAIKLDDKDPNFKDQVILLNKHIDAYKTFPPTEPKKDKKKKADETQALPQRQKKQQTVTLLPAADLDDFSKQLQQSMSSADSTQA

SEQ ID NO: 705 - protein, 671 aa, Artificial Sequence
  Description of Artificial Sequence: Synthetic polypeptide
MHHHHHHGGSGSPILGYWKIKGLVQPTRLLLEYLEEKYEEHLYERDEGDKWRNKKFELGLEFPNLPYYIDGDVKLTQSMAIIRYIADKHNMLGGCPKERAEISMLEGAVLDIRYGVSRIAYSKDFETLKVDFLSKLPEMLKMFEDRLCHKTYLNGDHVTHPDFMLYDALDVVLYMDPMCLDAFPKLVCFKKRIEAIPQIDKYLKSSKYIAWPLQGWQATFGGGDHPPKSDLVPRGSPGIHRDGGSGENLYFQSSDNGPQNQRNAPRITFGGPSDSTGSNQNGERSGARSKQRRPQGLPNNTASWFTALTQHGKEDLKFPRGQGVPINTNSSPDDQIGYYRRATRRIRGGDGKMKDLSPRWYFYYLGTGPEAGLPYGHNKDGIIWVATEGALNTPKDHIGTRNPANNAAIVLQLPQGTTLPKGFYAEGSRGGSQASSRSSSRSRNSSRNSTPGSSRGTSPARMAGNGGDAALALLLLDRLNQLESKMSGKGQQQQGQTVTKKSAAEASKKPRQKRTATKAYNVTQAFGRRGPEQTQGNFGDQELIRQGTDYKHWPQIAQFAPSASAFFGMSRIGMEVTPSGTWLTYTGAIKLDDKDPNFKDQVILLNKHIDAYKTFPPTEPKKDKKKKADETQALPQRQKKQQTVTLLPAADLDDFSKQLQQSMSSADSTQA

SEQ ID NO: 706 - protein, 671 aa, Artificial Sequence
  Description of Artificial Sequence: Synthetic polypeptide
MHHHHHHGGSGSPILGYWKIKGLVQPTRLLLEYLEEKYEEHLYERDEGDKWRNKKFELGLEFPNLPYYIDGDVKLTQSMAIIRYIADKHNMLGGCPKERAEISMLEGAVLDIRYGVSRIAYSKDFETLKVDFLSKLPEMLKMFEDRLCHKTYLNGDHVTHPDFMLYDALDVVLYMDPMCLDAFPKLVCFKKRIEAIPQIDKYLKSSKYIAWPLQGWQATFGGGDHPPKSDLVPRGSPGIHRDGGSGENLYFQSSDNGPQNQRNAPRITFGGPSDSTGSNQNGERSGARSKQRRPQGLPNNTASWFTALTQHGKEDLKFPRGQGVPINTNSSPDDQIGYYRRATRRIRGGDGKMKDLSPRWYFYYLGTGPEAGLPYGANKDGIIWVATEGALNTPKDHIGTRNPANNAAIVLQLPQGTKLPKGFYAEGSRGGSQASSRSSSRSRNSSRNSTPGSSRGTSPARMAGNGGDAALALLLLDRLNQLESKMSGKGQQQQGQTVTKKSAAEASKKPRQKRTATKAYNVTQAFGRRGPEQTQGNFGDQELIRQGTDYKHWPQIAQFAPSASAFFGMSRIGMEVTPSGTWLTYTGAIKLDDKDPNFKDQVILLNKHIDAYKTFPPTEPKKDKKKKADETQALPQRQKKQQTVTLLPAADLDDFSKQLQQSMSSADSTQA

SEQ ID NO: 707 - protein, 671 aa, Artificial Sequence
  Description of Artificial Sequence: Synthetic polypeptide
MHHHHHHGGSGSPILGYWKIKGLVQPTRLLLEYLEEKYEEHLYERDEGDKWRNKKFELGLEFPNLPYYIDGDVKLTQSMAIIRYIADKHNMLGGCPKERAEISMLEGAVLDIRYGVSRIAYSKDFETLKVDFLSKLPEMLKMFEDRLCHKTYLNGDHVTHPDFMLYDALDVVLYMDPMCLDAFPKLVCFKKRIEAIPQIDKYLKSSKYIAWPLQGWQATFGGGDHPPKSDLVPRGSPGIHRDGGSGENLYFQSSDNGPQNQRNAPRITFGGPSDSTGSNQNGERSGARSKQRRPQGLPNNTASWFTALTQHGKEDLKFPRGQGVPINTNSSPDDQIGYYRRATRRIRGGDGKMKDLSPRWYFYYLGTGPEAGLPYGANKDGIIWVATEGALNTPKDHIGTRNPANNAAIDLQLPQGTTLPKGFYAEGSRGGSQASSRSSSRSRNSSRNSTPGSSRGTSPARMAGNGGDAALALLLLDRLNQLESKMSGKGQQQQGQTVTKKSAAEASKKPRQKRTATKAYNVTQAFGRRGPEQTQGNFGDQELIRQGTDYKHWPQIAQFAPSASAFFGMSRIGMEVTPSGTWLTYTGAIKLDDKDPNFKDQVILLNKHIDAYKTFPPTEPKKDKKKKADETQALPQRQKKQQTVTLLPAADLDDFSKQLQQSMSSADSTQA

SEQ ID NO: 708 - protein, 671 aa, Artificial Sequence
  Description of Artificial Sequence: Synthetic polypeptide
MHHHHHHGGSGSPILGYWKIKGLVQPTRLLLEYLEEKYEEHLYERDEGDKWRNKKFELGLEFPNLPYYIDGDVKLTQSMAIIRYIADKHNMLGGCPKERAEISMLEGAVLDIRYGVSRIAYSKDFETLKVDFLSKLPEMLKMFEDRLCHKTYLNGDHVTHPDFMLYDALDVVLYMDPMCLDAFPKLVCFKKRIEAIPQIDKYLKSSKYIAWPLQGWQATFGGGDHPPKSDLVPRGSPGIHRDGGSGENLYFQSSDNGPQNQRNAPRITFGGPSDSTGSNQNGERSGARSKQRRPQGLPNNTASWFTALTQHGKEDLKFPRGQGVPINTNSSPDDQIGYYRRAVRRIRGGDGKMKDLSPRWYFYYLGTGPEAGLPYGANKDGIIWVATEGALNTPKDHIGTRNPANNAAIVLQLPQGTTLPKGFYAEGSRGGSQASSRSSSRSRNSSRNSTPGSSRGTSPARMAGNGGDAALALLLLDRLNQLESKMSGKGQQQQGQTVTKKSAAEASKKPRQKRTATKAYNVTQAFGRRGPEQTQGNFGDQELIRQGTDYKHWPQIAQFAPSASAFFGMSRIGMEVTPSGTWLTYTGAIKLDDKDPNFKDQVILLNKHIDAYKTFPPTEPKKDKKKKADETQALPQRQKKQQTVTLLPAADLDDFSKQLQQSMSSADSTQA

SEQ ID NO: 709 - protein, 671 aa, Artificial Sequence
  Description of Artificial Sequence: Synthetic polypeptide
MHHHHHHGGSGSPILGYWKIKGLVQPTRLLLEYLEEKYEEHLYERDEGDKWRNKKFELGLEFPNLPYYIDGDVKLTQSMAIIRYIADKHNMLGGCPKERAEISMLEGAVLDIRYGVSRIAYSKDFETLKVDFLSKLPEMLKMFEDRLCHKTYLNGDHVTHPDFMLYDALDVVLYMDPMCLDAFPKLVCFKKRIEAIPQIDKYLKSSKYIAWPLQGWQATFGGGDHPPKSDLVPRGSPGIHRDGGSGENLYFQSSDNGPQNQRNAPRITFGGPSDSTGSNQNGERSGARSKQRRPQGLPNNTASWFTALTQHGKEDLKFPRGQGVPINTNSSPDDQIGYYRRATRRIRGGDGKMKDLSPRWYFYYLGTGPEADLPYGANKDGIVWVATEGALNTPKDHIGTRNPANNAAIVLQLPQGTTLPKGFYAEGSRGGSQASSRSSSRSRNSSRNSTPGSSRGTSPARMAGNGGDAALALLLLDRLNQLESKMSGKGQQQQGQTVTKKSAAEASKKPRQKRTATKAYNVTQAFGRRGPEQTQGNFGDQELIRQGTDYKHWPQIAQFAPSASAFFGMSRIGMEVTPSGTWLTYTGAIKLDDKDPNFKDQVILLNKHIDAYKTFPPTEPKKDKKKKADETQALPQRQKKQQTVTLLPAADLDDFSKQLQQSMSSADSTQA

SEQ ID NO: 710 - protein, 671 aa, Artificial Sequence
  Description of Artificial Sequence: Synthetic polypeptide
MHHHHHHGGSGSPILGYWKIKGLVQPTRLLLEYLEEKYEEHLYERDEGDKWRNKKFELGLEFPNLPYYIDGDVKLTQSMAIIRYIADKHNMLGGCPKERAEISMLEGAVLDIRYGVSRIAYSKDFETLKVDFLSKLPEMLKMFEDRLCHKTYLNGDHVTHPDFMLYDALDVVLYMDPMCLDAFPKLVCFKKRIEAIPQIDKYLKSSKYIAWPLQGWQATFGGGDHPPKSDLVPRGSPGIHRDGGSGENLYFQSSDNGPQNQRNAPRITFGGPSDSTGSNQNGERSGARSKQRRPQGLPNNTASWFTPLTQHGKEDLKFPRGQGVPINTNSSPDDQIGYYRRATRRIRGGDGKMKDLSPRWYFYYLGTGPEAGLPYGANKDGIIWVATEGALNTPKDHIGTRNPANNAAIVLQLPQGTTLPKGFYAEGSRGGSQASSRSSSRSRNSSRNSTPGSSRGTSPARMAGNGGDAALALLLLDRLNQLESKMSGKGQQQQGQTVTKKSAAEASKKPRQKRTATKAYNVTQAFGRRGPEQTQGNFGDQELIRQGTDYKHWPQIAQFAPSASAFFGMSRIGMEVTPSGTWLTYTGAIKLDDKDPNFKDQVILLNKHIDAYKTFPPTEPKKDKKKKADETQALPQRQKKQQTVTLLPAADLDDFSKQLQQSMSSADSTQA

SEQ ID NO: 711 - protein, 671 aa, Artificial Sequence
  Description of Artificial Sequence: Synthetic polypeptide
MHHHHHHGGSGSPILGYWKIKGLVQPTRLLLEYLEEKYEEHLYERDEGDKWRNKKFELGLEFPNLPYYIDGDVKLTQSMAIIRYIADKHNMLGGCPKERAEISMLEGAVLDIRYGVSRIAYSKDFETLKVDFLSKLPEMLKMFEDRLCHKTYLNGDHVTHPDFMLYDALDVVLYMDPMCLDAFPKLVCFKKRIEAIPQIDKYLKSSKYIAWPLQGWQATFGGGDHPPKSDLVPRGSPGIHRDGGSGENLYFQSSDNGPQNQRNAPRITFGGPSDSTGSNQNGERSGARSKQRRPQGLPNNTASWFTALTQHGKEDLKFPRGQGVPINTNSSPDDQIGYYRRATRRIRGGDGKMKDLSPRWYFYYLGTGPEAGLPYGANKDGIIWVATEGALNTPKDHIGTRNPANNAAIVLQLPQGTTLPKGFYAEGSRGGSQASSRSSERSRNSSRNSTPGEERGTSPARMAGNGGDAALALLLLDRLNQLESKMSGKGQQQQGQTVTKKSAAEASKKPRQKRTATKAYNVTQAFGRRGPEQTQGNFGDQELIRQGTDYKHWPQIAQFAPSASAFFGMSRIGMEVTPSGTWLTYTGAIKLDDKDPNFKDQVILLNKHIDAYKTFPPTEPKKDKKKKADETQALPQRQKKQQTVTLLPAADLDDFSKQLQQSMSSADSTQA

SEQ ID NO: 712 - protein, 671 aa, Artificial Sequence
  Description of Artificial Sequence: Synthetic polypeptide
MHHHHHHGGSGSPILGYWKIKGLVQPTRLLLEYLEEKYEEHLYERDEGDKWRNKKFELGLEFPNLPYYIDGDVKLTQSMAIIRYIADKHNMLGGCPKERAEISMLEGAVLDIRYGVSRIAYSKDFETLKVDFLSKLPEMLKMFEDRLCHKTYLNGDHVTHPDFMLYDALDVVLYMDPMCLDAFPKLVCFKKRIEAIPQIDKYLKSSKYIAWPLQGWQATFGGGDHPPKSDLVPRGSPGIHRDGGSGENLYFQSSDNGPQNQRNAPRITFGGPSDSTGSNQNGERSGARSKQRRPQGLPNNTASWFTALTQHGKEDLKFPRGQGVPINTNSSPDDQIGYYRRATRRIRGGDGKMKDLSPRWYFYYLGTGPEAGLPYGANKDGIIWVATEGALNTPKDHIGTRNPANNAAIVLQLPQGTTLPKGFYAEGSRGGSQASSRSSSRSRNSSRNSTPGSSRGTSPARMAGNGGDAALALLLLDRLNQLESKMSGKGQQQQGQTVTKKSAAEASKKPRQKRTATKAYNVTQAFGRRGPEQTQGNFGDQEFIRQGTDYKHWPQIAQFAPSASAFFGMSRIGMEVTPSGTWLTYTGAIKLDDKDPNFKDQVILLNKHIDAYKTFPPTEPKKDKKKKADETQALPQRQKKQQTVTLLPAADLDDFSKQLQQSMSSADSTQA

SEQ ID NO: 713 - protein, 671 aa, Artificial Sequence
  Description of Artificial Sequence: Synthetic polypeptide
MHHHHHHGGSGSPILGYWKIKGLVQPTRLLLEYLEEKYEEHLYERDEGDKWRNKKFELGLEFPNLPYYIDGDVKLTQSMAIIRYIADKHNMLGGCPKERAEISMLEGAVLDIRYGVSRIAYSKDFETLKVDFLSKLPEMLKMFEDRLCHKTYLNGDHVTHPDFMLYDALDVVLYMDPMCLDAFPKLVCFKKRIEAIPQIDKYLKSSKYIAWPLQGWQATFGGGDHPPKSDLVPRGSPGIHRDGGSGENLYFQSSDNGPQNQRNAPRITFGGPSDSTGSNQNGERSGARSKQRRPQGLPNNTASWFTALTQHGKEDLKFPRGQGVPINTNSSPDDQIGYYRRATRRIRGGDGKMKDLSPRWYFYYLGTGPEAGLPYGANKDGIIWVATEGALNTPKDHIGTRNPANNAAIVLQLPQGTTLPKGFYAEGSRGGSQASSRSSSRSRNSSRNSTPGSSRGTSPARMAGNGGDAALALLLLDRLNQLESKMSGKGQQQQGQTVTKKSAAEASKKPRQKRTATKAYNVTQAFGRRGPEQTQGNFGDQELIRQGTDYKHWPQIAQFAPSASAFFGMSRISMEVTPSGTWLTYTGAIKLDDKDPNFKDQVILLNKHIDAYKTFPPTEPKKDKKKKADETQALPQRQKKQQTVTLLPAADLDDFSKQLQQSMSSADSTQA

SEQ ID NO: 714 - protein, 671 aa, Artificial Sequence
  Description of Artificial Sequence: Synthetic polypeptide
MHHHHHHGGSGSPILGYWKIKGLVQPTRLLLEYLEEKYEEHLYERDEGDKWRNKKFELGLEFPNLPYYIDGDVKLTQSMAIIRYIADKHNMLGGCPKERAEISMLEGAVLDIRYGVSRIAYSKDFETLKVDFLSKLPEMLKMFEDRLCHKTYLNGDHVTHPDFMLYDALDVVLYMDPMCLDAFPKLVCFKKRIEAIPQIDKYLKSSKYIAWPLQGWQATFGGGDHPPKSDLVPRGSPGIHRDGGSGENLYFQSSDNGPQNQRNAPRITFGGPSDSTGSNQNGERSGARSKQRRPQGLPNNTASWFTALTQHGKEDLKFPRGQGVPINTNSSPDDQIGYYRRATRRIRGGDGKMKDLSPRWYFYYLGTGPEAGLPYGANKDGIIWVATEGALNTPKDHIGTRNPANNAAIVLQLPQGTTLPKGFYAEGSRGGSQASSRSSSRSRNSSRNSTPGSSRGTSPARMAGNGGDAALALLLLDRLNQLESKMSGKGQQQQGQTVTKKSAAEASKKPRQKRTATKAYNVTQAFGKRGPEQTQGNFGDQELIRQGTDYKHWPQIAQFAPSASAFFGMSRIGMEVTPSGTWLTYTGAIKLDDKDPNFKDQVILLNKHIDAYKTFPPTEPKKDKKKKADETQALPQRQKKQQTVTLLPAADLDDFSKQLQQSMSSADSTQA

SEQ ID NO: 715 - protein, 671 aa, Artificial Sequence
  Description of Artificial Sequence: Synthetic polypeptide
MHHHHHHGGSGSPILGYWKIKGLVQPTRLLLEYLEEKYEEHLYERDEGDKWRNKKFELGLEFPNLPYYIDGDVKLTQSMAIIRYIADKHNMLGGCPKERAEISMLEGAVLDIRYGVSRIAYSKDFETLKVDFLSKLPEMLKMFEDRLCHKTYLNGDHVTHPDFMLYDALDVVLYMDPMCLDAFPKLVCFKKRIEAIPQIDKYLKSSKYIAWPLQGWQATFGGGDHPPKSDLVPRGSPGIHRDGGSGENLYFQSSDNGPQNQRNAPRITFGGPSDSTGSNQNGERSGARSKQRRPQGLPNNTASWFTPLTQHGKEDLKFPPGQGVPINTNSSPDDQIGYYRRATRRIRGGDGKMKDLPPRWYFYYLGTGPEADLPYGAVKPGIVWVAEEGALNTPKDHIGTRNPANNAAIPLQLPPGTTLPKGFYAEGSRGGSQASSRSSSRSRNSSRNSTPGSSRGTSPARMAGNGGDAALALLLLDRLNQLESKMSGKGQQQQGQTVTKKSAAEASKKPRQKRTATKAYNVTQAFGRRGPEQTQGNFGDQELIRQGTDYKHWPQIAQFAPSASAFFGMSRIGMEVTPSGTWLTYTGAIKLDDKDPNFKDQVILLNKHIDAYKTFPPTEPKKDKKKKADETQALPQRQKKQQTVTLLPAADLDDFSKQLQQSMSSADSTQA

SEQ ID NO: 716 - protein, 671 aa, Artificial Sequence
  Description of Artificial Sequence: Synthetic polypeptide
MHHHHHHGGSGSPILGYWKIKGLVQPTRLLLEYLEEKYEEHLYERDEGDKWRNKKFELGLEFPNLPYYIDGDVKLTQSMAIIRYIADKHNMLGGCPKERAEISMLEGAVLDIRYGVSRIAYSKDFETLKVDFLSKLPEMLKMFEDRLCHKTYLNGDHVTHPDFMLYDALDVVLYMDPMCLDAFPKLVCFKKRIEAIPQIDKYLKSSKYIAWPLQGWQATFGGGDHPPKSDLVPRGSPGIHRDGGSGENLYFQSSDNGPQNQRNAPRITFGGPSDSTGSNQNGERSGARSKQRRPQGLPNNTASWFTALTQHGKEDLKFPRGQGVPINTNSSPDDQIGYYRRATRRIRGGDGKMKDLSPRWYFYYLGTGPEAGLPYGANKDGIIWVATEGALNTPKDHIGTRNPANNAAIVLQLPQGTTLPKGFYAEGSRGGSQASSRSSSRSRNSSRNSTPGSSRGTSPARMAGNGGDAALALLLLDRLNQLESKMSGKGQQQQGQTVTKKSAAEASKKPRQKRTATKAYNVTQAYGRRGPEQTQGNFGDQELIRQGTDYKHWPQIAQFAPSASAFFGMSRIGMEVTPSGTWLTYTGAIKLDDKDPNFKDQVILLNKHIDAYKTFPPTEPKKDKKKKADETQALPQRQKKQQTVTLLPAADLDDFSKQLQQSMSSADSTQA

SEQ ID NO: 717 - protein, 671 aa, Artificial Sequence
  Description of Artificial Sequence: Synthetic polypeptide
MHHHHHHGGSGSPILGYWKIKGLVQPTRLLLEYLEEKYEEHLYERDEGDKWRNKKFELGLEFPNLPYYIDGDVKLTQSMAIIRYIADKHNMLGGCPKERAEISMLEGAVLDIRYGVSRIAYSKDFETLKVDFLSKLPEMLKMFEDRLCHKTYLNGDHVTHPDFMLYDALDVVLYMDPMCLDAFPKLVCFKKRIEAIPQIDKYLKSSKYIAWPLQGWQATFGGGDHPPKSDLVPRGSPGIHRDGGSGENLYFQSSDNGPQNQRNAPRITFGGPSDSTGSNQNGERSGARSKQRRPQGLPNNTASWFTALTQHGKEDLKFPRGQGVPINTNSSPDDQIGYYRRATRRIRGGDGKMKDLSPRWYFYYLGTGPEAGLPYGANKDGIIWVATEGALNTPKDHIGTRNPANNAAIVLQLPQGTTLPKGFYAEGSRGGSQASSRSSSRSRNSSRNSTPGSSRGTSPARMAGNGGDAALALLLLDRLNQLESKMSGKGQQQQGQTVTKKSAAEMSKKPRQKRTATKGYNVTQCFGPRGPEQTQGNFGDAELVKKGTDYKHWPQIAQFAPSASAFFGMSRISSKETPSGTWLTYTGAIKLDKDDPNFKDQVILLNKHIDAYKTFPPTEPKKDKKKKADETQALPQRQKKQQTVTLLPAADLDDFSKQLQQSMSSADSTQA

SEQ ID NO: 718 - protein, 671 aa, Artificial Sequence
  Description of Artificial Sequence: Synthetic polypeptide
MHHHHHHGGSGSPILGYWKIKGLVQPTRLLLEYLEEKYEEHLYERDEGDKWRNKKFELGLEFPNLPYYIDGDVKLTQSMAIIRYIADKHNMLGGCPKERAEISMLEGAVLDIRYGVSRIAYSKDFETLKVDFLSKLPEMLKMFEDRLCHKTYLNGDHVTHPDFMLYDALDVVLYMDPMCLDAFPKLVCFKKRIEAIPQIDKYLKSSKYIAWPLQGWQATFGGGDHPPKSDLVPRGSPGIHRDGGSGENLYFQSSDNGPQNQRNAPRITFGGPSDSTGSNQNGERSGARSKQRRPQGLPNNTASWFTALTQHGKEDLKFPRGQGVPINTNSSPDDQIGEYRRATRRIRGGDGKMKDLSPRWYFYYLGTGPEAGLPYGANKDGIIWVATEGALNTPKDHIGTRNPANNAAIVLQLPQGTTLPKGFYAEGSRGGSQASSRSSSRSRNSSRNSTPGSSRGTSPARMAGNGGDAALALLLLDRLNQLESKMSGKGQQQQGQTVTKKSAAEASKKPRQKRTATKAYNVTQAFGRRGPEQTQGNFGDQELIRQGTDYKHWPQIAQFAPSASAFFGMSRIGMEVTPSGTWLTYTGAIKLDDKDPNFKDQVILLNKHIDAYKTFPPTEPKKDKKKKADETQALPQRQKKQQTVTLLPAADLDDFSKQLQQSMSSADSTQA

SEQ ID NO: 719 - protein, 671 aa, Artificial Sequence
  Description of Artificial Sequence: Synthetic polypeptide
MHHHHHHGGSGSPILGYWKIKGLVQPTRLLLEYLEEKYEEHLYERDEGDKWRNKKFELGLEFPNLPYYIDGDVKLTQSMAIIRYIADKHNMLGGCPKERAEISMLEGAVLDIRYGVSRIAYSKDFETLKVDFLSKLPEMLKMFEDRLCHKTYLNGDHVTHPDFMLYDALDVVLYMDPMCLDAFPKLVCFKKRIEAIPQIDKYLKSSKYIAWPLQGWQATFGGGDHPPKSDLVPRGSPGIHRDGGSGENLYFQSSDNGPQNQRNAPRITFGGPSDSTGSNQNGERSGARSKQRRPQGLPNNTASWFTALTQHGKEDLKFPKGQGVPINTNSKPDDQIGYWRRQTRRYRGGDGQMKDLDPRWYFYYLGTGPEAGLPYGANKDGIIWVATEGALNTPKDHIGTRNPANNAAIVLQLPQGTTLPKGFYAEGSRGGSQASSRSSSRSRNSSRNSTPGSSRGTSPARMAGNGGDAALALLLLDRLNQLESKMSGKGQQQQGQTVTKKSAAEASKKPRQKRTATKAYNVTQAFGRRGPEQTQGNFGDQELIRQGTDYKHWPQIAQFAPSASAFFGMSRIGMEVTPSGTWLTYTGAIKLDDKDPNFKDQVILLNKHIDAYKTFPPTEPKKDKKKKADETQALPQRQKKQQTVTLLPAADLDDFSKQLQQSMSSADSTQA

SEQ ID NO: 720 - protein, 671 aa, Artificial Sequence
  Description of Artificial Sequence: Synthetic polypeptide
MHHHHHHGGSGSPILGYWKIKGLVQPTRLLLEYLEEKYEEHLYERDEGDKWRNKKFELGLEFPNLPYYIDGDVKLTQSMAIIRYIADKHNMLGGCPKERAEISMLEGAVLDIRYGVSRIAYSKDFETLKVDFLSKLPEMLKMFEDRLCHKTYLNGDHVTHPDFMLYDALDVVLYMDPMCLDAFPKLVCFKKRIEAIPQIDKYLKSSKYIAWPLQGWQATFGGGDHPPKSDLVPRGSPGIHRDGGSGENLYFQSSDNGPQNQRNAPRITFGGPSDSTGSNQNGERSGARSKQRRPQGLPNNTASWFTALTQHGKEDLKFPRGQGVPINTNSSPDDQIGYYRRATRRIRGGDGKMKDLSPRWYFNYLGTGPEAGLPYGANKDGIIWVATEGALNTPKDHIGTRNPANNAAIVLQLPQGTTLPKGFYAEGSRGGSQASSRSSSRSRNSSRNSTPGSSRGTSPARMAGNGGDAALALLLLDRLNQLESKMSGKGQQQQGQTVTKKSAAEASKKPRQKRTATKAYNVTQAFGRRGPEQTQGNFGDQELIRQGTDYKHWPQIAQFAPSASAFFGMSRIGMEVTPSGTWLTYTGAIKLDDKDPNFKDQVILLNKHIDAYKTFPPTEPKKDKKKKADETQALPQRQKKQQTVTLLPAADLDDFSKQLQQSMSSADSTQA

SEQ ID NO: 721 - protein, 671 aa, Artificial Sequence
  Description of Artificial Sequence: Synthetic polypeptide
MHHHHHHGGSGSPILGYWKIKGLVQPTRLLLEYLEEKYEEHLYERDEGDKWRNKKFELGLEFPNLPYYIDGDVKLTQSMAIIRYIADKHNMLGGCPKERAEISMLEGAVLDIRYGVSRIAYSKDFETLKVDFLSKLPEMLKMFEDRLCHKTYLNGDHVTHPDFMLYDALDVVLYMDPMCLDAFPKLVCFKKRIEAIPQIDKYLKSSKYIAWPLQGWQATFGGGDHPPKSDLVPRGSPGIHRDGGSGENLYFQSSDNGPQNQRNAPRITFGGPSDSTGSNQNGERSGARSKQRRPQGLPNNTASWFTALTQHGKEDLKFPRGQGVPINTNSSPDDQIGYYRRATRRIRGGDGKMKDLSPRWYFYYLGTGPEAGLPYGANKDGIIWVATEGALNTPKDHIGTRNPANNAAIVLQLPQGTTLPKGFYAEGSRGGSQASSRSSSRSRNSSRNSTPGSSRGTSPARMAGNGGDAALALLLLDRLNQLESKMSGKGQQQQGQTVTKKSAAEASKKPRQKRTATKAYNVTQAFGRRGPEQTQGNFGDQELIRQGTDYKHWPQIAQFAPSASAFFGMSRIGMELTPSGTWLTYTGAIKLDDKDPNFKDQVILLNKHIDAYKTFPPTEPKKDKKKKADETQALPQRQKKQQTVTLLPAADLDDFSKQLQQSMSSADSTQA

SEQ ID NO: 722 - protein, 671 aa, Artificial Sequence
  Description of Artificial Sequence: Synthetic polypeptide
MHHHHHHGGSGSPILGYWKIKGLVQPTRLLLEYLEEKYEEHLYERDEGDKWRNKKFELGLEFPNLPYYIDGDVKLTQSMAIIRYIADKHNMLGGCPKERAEISMLEGAVLDIRYGVSRIAYSKDFETLKVDFLSKLPEMLKMFEDRLCHKTYLNGDHVTHPDFMLYDALDVVLYMDPMCLDAFPKLVCFKKRIEAIPQIDKYLKSSKYIAWPLQGWQATFGGGDHPPKSDLVPRGSPGIHRDGGSGENLYFQSSDNGPQNQRNAPRITFGGPSDSTGSNQNGERSGARSKQRRPQGLPNNTASWFTALTQHGKEDLKFPRGQGVPINTNSSPDDQIGYYRRATRRIRGGDGKMKDLSPRWYFYYLGTGPEAGLPYGANKDGIIWVATEGALNTPKDHIGTRNPANNAAIVLQLPQGTSLPKGFYAEGSRGGSQASSRSSSRSRNSSRNSTPGSSRGTSPARMAGNGGDAALALLLLDRLNQLESKMSGKGQQQQGQTVTKKSAAEASKKPRQKRTATKAYNVTQAFGRRGPEQTQGNFGDQELIRQGTDYKHWPQIAQFAPSASAFFGMSRIGMEVTPSGTWLTYTGAIKLDDKDPNFKDQVILLNKHIDAYKTFPPTEPKKDKKKKADETQALPQRQKKQQTVTLLPAADLDDFSKQLQQSMSSADSTQA

SEQ ID NO: 723 - protein, 671 aa, Artificial Sequence
  Description of Artificial Sequence: Synthetic polypeptide
MHHHHHHGGSGSPILGYWKIKGLVQPTRLLLEYLEEKYEEHLYERDEGDKWRNKKFELGLEFPNLPYYIDGDVKLTQSMAIIRYIADKHNMLGGCPKERAEISMLEGAVLDIRYGVSRIAYSKDFETLKVDFLSKLPEMLKMFEDRLCHKTYLNGDHVTHPDFMLYDALDVVLYMDPMCLDAFPKLVCFKKRIEAIPQIDKYLKSSKYIAWPLQGWQATFGGGDHPPKSDLVPRGSPGIHRDGGSGENLYFQSSDNGPQNQRNAPRITFGGPSDSTGSNQNGERSGARSKQRRPQGLPNNTASWFTALTQHGKEDLKFPRGQGVPINTNSSPDDQIGYYRRATRRIRGGDGKMKDLSPRWYFYYLGTGPEAGLPYGANKDGIIWVATEGALNTPKDHIGTRNPANNAAIVLQLPQGTTLPKGFYAEGSRGGSQASSRSSSRSRNSSRNSTPGSSRGTSPARMAGNGGDAALALLLLDRLNQLESKMSGKGQQQQGQTVTKKSAAEMSKKPRQKRTATKGCNVTQCFGPRGPEQTQGNFGDADLIKKGTDYKHWPQIAQFAPSASAFFGMSRISSKETPSGTWLTYTGAIKLDKDDPNFKDQVILLNKHIDAYKTFPPTEPKKDKKKKADETQALPQRQKKQQTVTLLPAADLDDFSKQLQQSMSSADSTQA

SEQ ID NO: 724 - protein, 671 aa, Artificial Sequence
  Description of Artificial Sequence: Synthetic polypeptide
MHHHHHHGGSGSPILGYWKIKGLVQPTRLLLEYLEEKYEEHLYERDEGDKWRNKKFELGLEFPNLPYYIDGDVKLTQSMAIIRYIADKHNMLGGCPKERAEISMLEGAVLDIRYGVSRIAYSKDFETLKVDFLSKLPEMLKMFEDRLCHKTYLNGDHVTHPDFMLYDALDVVLYMDPMCLDAFPKLVCFKKRIEAIPQIDKYLKSSKYIAWPLQGWQATFGGGDHPPKSDLVPRGSPGIHRDGGSGENLYFQSSDNGPQNQRNAPRITFGGPSDSTGSNQNGERSGARSKQRRPQGLPNNTASWFTALTQHGKEDLKFPRGQGVPINTNSSPDDQIGYYRRATRRIRGGDGKMKDLSPRWYFYYLGTGPEAGLPYGANKDGIIWVATEGALNTPKDHIGTRNPANNAAIVLQLPQGTTLPKGFYAEGSRGGSQASSRSSSRSRNSSRNSTPGSSRGTSPARMAGNGGDAALALLLLDRLNQLESKMSGKGQQQQGQTVTKKSAAEMSKKPRQKRTATKGYNVTQCFGPRGPEQTQGNFGDAELNKKGTDYKHWPQIAQFAPSASAFFGMSRISSKEQPSGTWLTYTGAIKLDKDDPNFKDQVILLNKHIDAYKTFPPTEPKKDKKKKADETQALPQRQKKQQTVTLLPAADLDDFSKQLQQSMSSADSTQA

SEQ ID NO: 725 - protein, 671 aa, Artificial Sequence
  Description of Artificial Sequence: Synthetic polypeptide
MHHHHHHGGSGSPILGYWKIKGLVQPTRLLLEYLEEKYEEHLYERDEGDKWRNKKFELGLEFPNLPYYIDGDVKLTQSMAIIRYIADKHNMLGGCPKERAEISMLEGAVLDIRYGVSRIAYSKDFETLKVDFLSKLPEMLKMFEDRLCHKTYLNGDHVTHPDFMLYDALDVVLYMDPMCLDAFPKLVCFKKRIEAIPQIDKYLKSSKYIAWPLQGWQATFGGGDHPPKSDLVPRGSPGIHRDGGSGENLYFQSSDNGPQNQRNAPRITFGGPSDSTGSNQNGERSGARSKQRRPQGLPNNTASWFTALTQHGKEDLKFPRGQGVPINTNSSPDDQIGYYRRATRRIRGGDGKMKDLSPRWYFYYLGTGPEAGLPYGANKDGIIWVATEGALNTPKDHIGTRNPANNAAISLQLPQGTTLPKGFYAEGSRGGSQASSRSSSRSRNSSRNSTPGSSRGTSPARMAGNGGDAALALLLLDRLNQLESKMSGKGQQQQGQTVTKKSAAEASKKPRQKRTATKAYNVTQAFGRRGPEQTQGNFGDQELIRQGTDYKHWPQIAQFAPSASAFFGMSRIGMEVTPSGTWLTYTGAIKLDDKDPNFKDQVILLNKHIDAYKTFPPTEPKKDKKKKADETQALPQRQKKQQTVTLLPAADLDDFSKQLQQSMSSADSTQA

SEQ ID NO: 726 - protein, 671 aa, Artificial Sequence
  Description of Artificial Sequence: Synthetic polypeptide
MHHHHHHGGSGSPILGYWKIKGLVQPTRLLLEYLEEKYEEHLYERDEGDKWRNKKFELGLEFPNLPYYIDGDVKLTQSMAIIRYIADKHNMLGGCPKERAEISMLEGAVLDIRYGVSRIAYSKDFETLKVDFLSKLPEMLKMFEDRLCHKTYLNGDHVTHPDFMLYDALDVVLYMDPMCLDAFPKLVCFKKRIEAIPQIDKYLKSSKYIAWPLQGWQATFGGGDHPPKSDLVPRGSPGIHRDGGSGENLYFQSSDNGPQNQRNAPRITFGGPSDSTGSNQNGERSGARSKQRRPQGLPNNTASWFTALTQHGKEDLKFPRGQGVPINTNSSPDDQIGYYRRATRRIRGGDGKMKDLSPRWYFYYLGTGPEAGLPYGANKDGIIWVATEGALNTPKDHIGTRNPANNAAIVLQLPQGTTLPKGFYAEGSRGGSQASSRSSSRSRNSSRNSTPGSSRGTSPARMAGNGGDAALALLLLDRLNQLESKMSGKGQQQQGQTVTKKSAAEASKKPRQKRTATKAYNVTQAFGRRGPEQTQGNFGDAELIRQGTDYKHWPQIAQFAPSASAFFGMSRIGMEVTPSGTWLTYTGAIKLDDKDPNFKDQVILLNKHIDAYKTFPPTEPKKDKKKKADETQALPQRQKKQQTVTLLPAADLDDFSKQLQQSMSSADSTQA

SEQ ID NO: 727 - protein, 671 aa, Artificial Sequence
  Description of Artificial Sequence: Synthetic polypeptide
MHHHHHHGGSGSPILGYWKIKGLVQPTRLLLEYLEEKYEEHLYERDEGDKWRNKKFELGLEFPNLPYYIDGDVKLTQSMAIIRYIADKHNMLGGCPKERAEISMLEGAVLDIRYGVSRIAYSKDFETLKVDFLSKLPEMLKMFEDRLCHKTYLNGDHVTHPDFMLYDALDVVLYMDPMCLDAFPKLVCFKKRIEAIPQIDKYLKSSKYIAWPLQGWQATFGGGDHPPKSDLVPRGSPGIHRDGGSGENLYFQSSDNGPQNQRNAPRITFGGPSDSTGSNQNGERSGARSKQRRPQGLPNNTASWFTALTQHGKEDLKFPRGQGVPINTNSSPDDQIGYYRRATRRIRGGDGKMKDLSPRWYFYYLGTGPEAGLPYGANKDGIIWVATEGALNTPKDHIGTRNPANNAAILLQLPQGTTLPKGFYAEGSRGGSQASSRSSSRSRNSSRNSTPGSSRGTSPARMAGNGGDAALALLLLDRLNQLESKMSGKGQQQQGQTVTKKSAAEASKKPRQKRTATKAYNVTQAFGRRGPEQTQGNFGDQELIRQGTDYKHWPQIAQFAPSASAFFGMSRIGMEVTPSGTWLTYTGAIKLDDKDPNFKDQVILLNKHIDAYKTFPPTEPKKDKKKKADETQALPQRQKKQQTVTLLPAADLDDFSKQLQQSMSSADSTQA

SEQ ID NO: 728 - protein, 671 aa, Artificial Sequence
  Description of Artificial Sequence: Synthetic polypeptide
MHHHHHHGGSGSPILGYWKIKGLVQPTRLLLEYLEEKYEEHLYERDEGDKWRNKKFELGLEFPNLPYYIDGDVKLTQSMAIIRYIADKHNMLGGCPKERAEISMLEGAVLDIRYGVSRIAYSKDFETLKVDFLSKLPEMLKMFEDRLCHKTYLNGDHVTHPDFMLYDALDVVLYMDPMCLDAFPKLVCFKKRIEAIPQIDKYLKSSKYIAWPLQGWQATFGGGDHPPKSDLVPRGSPGIHRDGGSGENLYFQSSDNGPQNQRNAPRITFGGPSDSTGSNQNGERSGARSKQRRPQGLPNNTASWFTALTQHGKEDLKFPRGQGVPINTNSSPDDQIGYYRRATRRIRGGDGKMKDLSPRWYFYYLGTGPEAGLPYGANKDGIIWVATEGALNTPKDHIGTRNPANNAAIVLQLPQGTTLPKGFYAEGSRGGSQASSRSSSRSRNSSRNSTPGSERGTEPARMAGNGGDAALALLLLDRLNQLESKMSGKGQQQQGQTVTKKSAAEASKKPRQKRTATKAYNVTQAFGRRGPEQTQGNFGDQELIRQGTDYKHWPQIAQFAPSASAFFGMSRIGMEVTPSGTWLTYTGAIKLDDKDPNFKDQVILLNKHIDAYKTFPPTEPKKDKKKKADETQALPQRQKKQQTVTLLPAADLDDFSKQLQQSMSSADSTQA

SEQ ID NO: 729 - protein, 671 aa, Artificial Sequence
  Description of Artificial Sequence: Synthetic polypeptide
MHHHHHHGGSGSPILGYWKIKGLVQPTRLLLEYLEEKYEEHLYERDEGDKWRNKKFELGLEFPNLPYYIDGDVKLTQSMAIIRYIADKHNMLGGCPKERAEISMLEGAVLDIRYGVSRIAYSKDFETLKVDFLSKLPEMLKMFEDRLCHKTYLNGDHVTHPDFMLYDALDVVLYMDPMCLDAFPKLVCFKKRIEAIPQIDKYLKSSKYIAWPLQGWQATFGGGDHPPKSDLVPRGSPGIHRDGGSGENLYFQSSDNGPQNQRNAPRITFGGPSDSTGSNQNGERSGARSKQRRPQGLPNNTASWFTPLTQNGKEDLKFPPGQGVPINTNSSPDDQIGYYRRATRRIRGGDGKMKDLPPKWYFYYLGTGPHADLPYGQKQDGVFWVARPGALNTPKDHIGTRNPANNAAIPLQLPPGTKLPKGFYAEGSRGGSQASSRSSSRSRNSSRNSTPGSSRGTSPARMAGNGGDAALALLLLDRLNQLESKMSGKGQQQQGQTVTKKSAAEASKKPRQKRTATKAYNVTQAFGRRGPEQTQGNFGDQELIRQGTDYKHWPQIAQFAPSASAFFGMSRIGMEVTPSGTWLTYTGAIKLDDKDPNFKDQVILLNKHIDAYKTFPPTEPKKDKKKKADETQALPQRQKKQQTVTLLPAADLDDFSKQLQQSMSSADSTQA

SEQ ID NO: 730 - protein, 671 aa, Artificial Sequence
  Description of Artificial Sequence: Synthetic polypeptide
MHHHHHHGGSGSPILGYWKIKGLVQPTRLLLEYLEEKYEEHLYERDEGDKWRNKKFELGLEFPNLPYYIDGDVKLTQSMAIIRYIADKHNMLGGCPKERAEISMLEGAVLDIRYGVSRIAYSKDFETLKVDFLSKLPEMLKMFEDRLCHKTYLNGDHVTHPDFMLYDALDVVLYMDPMCLDAFPKLVCFKKRIEAIPQIDKYLKSSKYIAWPLQGWQATFGGGDHPPKSDLVPRGSPGIHRDGGSGENLYFQSSDNGPQNQRNAPRITFGGPSDSTGSNQNGERSGARSKQRRPQGLPNNTASWFTALTQHGKEDLKFPRGQGVPINTNSSPDDQIGYYRRATRRIRGGDGKMKDLSPRWYFYYLGTGPEAGLPYGANKDGIIWVATEGALNTPKDHIGTRNPANNAAIVLQLPQGTTLPKGFYAEGSRGGSQASSRSSSRSRNSSRNSTPGSSRGTSPARMAGNGGDAALALLLLDRLNQLESKMSGKGQQQQGQTVTKKSAAEASKKPRQKRTATKAYNVTQAFGRRGPEQTQGNFGDQELIRQGTDYKRWPQIAQFAPSASAFFGMSRIGMEVTPSGTWLTYTGAIKLDDKDPNFKDQVILLNKHIDAYKTFPPTEPKKDKKKKADETQALPQRQKKQQTVTLLPAADLDDFSKQLQQSMSSADSTQA

SEQ ID NO: 731 - protein, 671 aa, Artificial Sequence
  Description of Artificial Sequence: Synthetic polypeptide
MHHHHHHGGSGSPILGYWKIKGLVQPTRLLLEYLEEKYEEHLYERDEGDKWRNKKFELGLEFPNLPYYIDGDVKLTQSMAIIRYIADKHNMLGGCPKERAEISMLEGAVLDIRYGVSRIAYSKDFETLKVDFLSKLPEMLKMFEDRLCHKTYLNGDHVTHPDFMLYDALDVVLYMDPMCLDAFPKLVCFKKRIEAIPQIDKYLKSSKYIAWPLQGWQATFGGGDHPPKSDLVPRGSPGIHRDGGSGENLYFQSSDNGPQNQRNAPRITFGGPSDSTGSNQNGERSGARSKQRRPQGLPNNTASWFTALTQHGKEDLKFPRGQGVPINTNSSPDDQIGNYRRATRRIRGGDGKMKDLSPRWYFYYLGTGPEAGLPYGANKDGIIWVATEGALNTPKDHIGTRNPANNAAIVLQLPQGTTLPKGFYAEGSRGGSQASSRSSSRSRNSSRNSTPGSSRGTSPARMAGNGGDAALALLLLDRLNQLESKMSGKGQQQQGQTVTKKSAAEASKKPRQKRTATKAYNVTQAFGRRGPEQTQGNFGDQELIRQGTDYKHWPQIAQFAPSASAFFGMSRIGMEVTPSGTWLTYTGAIKLDDKDPNFKDQVILLNKHIDAYKTFPPTEPKKDKKKKADETQALPQRQKKQQTVTLLPAADLDDFSKQLQQSMSSADSTQA

SEQ ID NO: 732 - protein, 671 aa, Artificial Sequence
  Description of Artificial Sequence: Synthetic polypeptide
MHHHHHHGGSGSPILGYWKIKGLVQPTRLLLEYLEEKYEEHLYERDEGDKWRNKKFELGLEFPNLPYYIDGDVKLTQSMAIIRYIADKHNMLGGCPKERAEISMLEGAVLDIRYGVSRIAYSKDFETLKVDFLSKLPEMLKMFEDRLCHKTYLNGDHVTHPDFMLYDALDVVLYMDPMCLDAFPKLVCFKKRIEAIPQIDKYLKSSKYIAWPLQGWQATFGGGDHPPKSDLVPRGSPGIHRDGGSGENLYFQSSDNGPQNQRNAPRITFGGPSDSTGSNQNGERSGARSKQRRPQGLPNNTASWFTALVQHGKEDLKFPRGQGVPINTNSSPDDQIGYYRRATRRIRGGDGKMKDLSPRWYFYYLGTGPEAGLPYGANKDGIIWVATEGALNTPKDHIGTRNPANNAAIVLQLPQGTTLPKGFYAEGSRGGSQASSRSSSRSRNSSRNSTPGSSRGTSPARMAGNGGDAALALLLLDRLNQLESKMSGKGQQQQGQTVTKKSAAEASKKPRQKRTATKAYNVTQAFGRRGPEQTQGNFGDQELIRQGTDYKHWPQIAQFAPSASAFFGMSRIGMEVTPSGTWLTYTGAIKLDDKDPNFKDQVILLNKHIDAYKTFPPTEPKKDKKKKADETQALPQRQKKQQTVTLLPAADLDDFSKQLQQSMSSADSTQA

SEQ ID NO: 733 - protein, 671 aa, Artificial Sequence
  Description of Artificial Sequence: Synthetic polypeptide
MHHHHHHGGSGSPILGYWKIKGLVQPTRLLLEYLEEKYEEHLYERDEGDKWRNKKFELGLEFPNLPYYIDGDVKLTQSMAIIRYIADKHNMLGGCPKERAEISMLEGAVLDIRYGVSRIAYSKDFETLKVDFLSKLPEMLKMFEDRLCHKTYLNGDHVTHPDFMLYDALDVVLYMDPMCLDAFPKLVCFKKRIEAIPQIDKYLKSSKYIAWPLQGWQATFGGGDHPPKSDLVPRGSPGIHRDGGSGENLYFQSSDNGPQNQRNAPRITFGGPSDSTGSNQNGERSGARSKQRRPQGLPNNTASWFTPLTQNGKEDLKFPPGQGVPINTNSSPDDQIGYYRRATRRIRGGDGKMKDLPPKWYFYYLGTGPHADLPYGQKHDGVVWVARPGALNTPKDHIGTRNPANNAAIPLQLPPGTKLPKGFYAEGSRGGSQASSRSSSRSRNSSRNSTPGSSRGTSPARMAGNGGDAALALLLLDRLNQLESKMSGKGQQQQGQTVTKKSAAEASKKPRQKRTATKAYNVTQAFGRRGPEQTQGNFGDQELIRQGTDYKHWPQIAQFAPSASAFFGMSRIGMEVTPSGTWLTYTGAIKLDDKDPNFKDQVILLNKHIDAYKTFPPTEPKKDKKKKADETQALPQRQKKQQTVTLLPAADLDDFSKQLQQSMSSADSTQA

SEQ ID NO: 734 - protein, 671 aa, Artificial Sequence
  Description of Artificial Sequence: Synthetic polypeptide
MHHHHHHGGSGSPILGYWKIKGLVQPTRLLLEYLEEKYEEHLYERDEGDKWRNKKFELGLEFPNLPYYIDGDVKLTQSMAIIRYIADKHNMLGGCPKERAEISMLEGAVLDIRYGVSRIAYSKDFETLKVDFLSKLPEMLKMFEDRLCHKTYLNGDHVTHPDFMLYDALDVVLYMDPMCLDAFPKLVCFKKRIEAIPQIDKYLKSSKYIAWPLQGWQATFGGGDHPPKSDLVPRGSPGIHRDGGSGENLYFQSSDNGPQNQRNAPRITFGGPSDSTGSNQNGERSGARSKQRRPQGLPNNTASWFTALTQHGKEDLKFPRGQGVPINTNSSPDDQIGYYRRATRRIRGGDGKMKDLSPRWYFYYLGTGPEAGLPYGANKDGIIWVATEGALNTPKDHIGTRNPANNAAIVLQLPQGTTLPKGFYAEGSRGGSQASSRSSSRSRNSSRNSTPGSSRGTSPARMAGNGGDAALALLLLDRLNQLESKMSGKGQQQQGQTVTKKSAAEASKKPRQKRTATKAYNVTQAFGRRGPEQTQGNFGDQELIRQGTDYKHWPQIAQFAPSASAFFGMSRIGMEVTPSGTWLTYTGAIKLDSKDPNFKDQVILLNKHIDAYKTFPPTEPKKDKKKKADETQALPQRQKKQQTVTLLPAADLDDFSKQLQQSMSSADSTQA

SEQ ID NO: 735 - protein, 671 aa, Artificial Sequence
  Description of Artificial Sequence: Synthetic polypeptide
MHHHHHHGGSGSPILGYWKIKGLVQPTRLLLEYLEEKYEEHLYERDEGDKWRNKKFELGLEFPNLPYYIDGDVKLTQSMAIIRYIADKHNMLGGCPKERAEISMLEGAVLDIRYGVSRIAYSKDFETLKVDFLSKLPEMLKMFEDRLCHKTYLNGDHVTHPDFMLYDALDVVLYMDPMCLDAFPKLVCFKKRIEAIPQIDKYLKSSKYIAWPLQGWQATFGGGDHPPKSDLVPRGSPGIHRDGGSGENLYFQSSDNGPQNQRNAPRITFGGPSDSTGSNQNGERSGARSKQRRPQGLPNNTASWFTALTQHGKEDLKFPRGQGVPINTNSSPDDQIGYYRRATRRIRGGDGKMKDLSPRWYFYYLGTGPEAGLPYGANKDGIIWVATEGALNTPKDHIGTRNPANNAAIVLQLPQGTTLPKGFYAEGSRGGSQASSRSSSRSRNSSRNSTPGESRGTSPARMAGNGGDAALALLLLDRLNQLESKMSGKGQQQQGQTVTKKSAAEASKKPRQKRTATKAYNVTQAFGRRGPEQTQGNFGDQELIRQGTDYKHWPQIAQFAPSASAFFGMSRIGMEVTPSGTWLTYTGAIKLDDKDPNFKDQVILLNKHIDAYKTFPPTEPKKDKKKKADETQALPQRQKKQQTVTLLPAADLDDFSKQLQQSMSSADSTQA

SEQ ID NO: 736 - protein, 671 aa, Artificial Sequence
  Description of Artificial Sequence: Synthetic polypeptide
MHHHHHHGGSGSPILGYWKIKGLVQPTRLLLEYLEEKYEEHLYERDEGDKWRNKKFELGLEFPNLPYYIDGDVKLTQSMAIIRYIADKHNMLGGCPKERAEISMLEGAVLDIRYGVSRIAYSKDFETLKVDFLSKLPEMLKMFEDRLCHKTYLNGDHVTHPDFMLYDALDVVLYMDPMCLDAFPKLVCFKKRIEAIPQIDKYLKSSKYIAWPLQGWQATFGGGDHPPKSDLVPRGSPGIHRDGGSGENLYFQSSDNGPQNQRNAPRITFGGPSDSTGSNQNGERSGARSKQRRPQGLPNNTASWFTALTQHGKEDLKFPRGQGVPINTNSSPDDQIGYYRRATRRIRGGDGKMKDLSPRWYFYYLRTGPEAGLPYGANKDGIIWVATEGALNTPKDHIGTRNPANNAAIVLQLPQGTTLPKGFYAEGSRGGSQASSRSSSRSRNSSRNSTPGSSRGTSPARMAGNGGDAALALLLLDRLNQLESKMSGKGQQQQGQTVTKKSAAEASKKPRQKRTATKAYNVTQAFGRRGPEQTQGNFGDQELIRQGTDYKHWPQIAQFAPSASAFFGMSRIGMEVTPSGTWLTYTGAIKLDDKDPNFKDQVILLNKHIDAYKTFPPTEPKKDKKKKADETQALPQRQKKQQTVTLLPAADLDDFSKQLQQSMSSADSTQA

SEQ ID NO: 737 - protein, 671 aa, Artificial Sequence
  Description of Artificial Sequence: Synthetic polypeptide
MHHHHHHGGSGSPILGYWKIKGLVQPTRLLLEYLEEKYEEHLYERDEGDKWRNKKFELGLEFPNLPYYIDGDVKLTQSMAIIRYIADKHNMLGGCPKERAEISMLEGAVLDIRYGVSRIAYSKDFETLKVDFLSKLPEMLKMFEDRLCHKTYLNGDHVTHPDFMLYDALDVVLYMDPMCLDAFPKLVCFKKRIEAIPQIDKYLKSSKYIAWPLQGWQATFGGGDHPPKSDLVPRGSPGIHRDGGSGENLYFQSSDNGPQNQRNAPRITFGGPSDSTGSNQNGERSGARSKQRRPQGLPNNTASWFTALTQHGKEDLKFPKGQGVPINTNSKPDDQIGYYRREVRRYRGGDGQMKDLDPRWYFYYLGTGPEAGLPYGANKDGIIWVATEGALNTPKDHIGTRNPANNAAIVLQLPQGTTLPKGFYAEGSRGGSQASSRSSSRSRNSSRNSTPGSSRGTSPARMAGNGGDAALALLLLDRLNQLESKMSGKGQQQQGQTVTKKSAAEASKKPRQKRTATKAYNVTQAFGRRGPEQTQGNFGDQELIRQGTDYKHWPQIAQFAPSASAFFGMSRIGMEVTPSGTWLTYTGAIKLDDKDPNFKDQVILLNKHIDAYKTFPPTEPKKDKKKKADETQALPQRQKKQQTVTLLPAADLDDFSKQLQQSMSSADSTQA

SEQ ID NO: 738 - protein, 671 aa, Artificial Sequence
  Description of Artificial Sequence: Synthetic polypeptide
MHHHHHHGGSGSPILGYWKIKGLVQPTRLLLEYLEEKYEEHLYERDEGDKWRNKKFELGLEFPNLPYYIDGDVKLTQSMAIIRYIADKHNMLGGCPKERAEISMLEGAVLDIRYGVSRIAYSKDFETLKVDFLSKLPEMLKMFEDRLCHKTYLNGDHVTHPDFMLYDALDVVLYMDPMCLDAFPKLVCFKKRIEAIPQIDKYLKSSKYIAWPLQGWQATFGGGDHPPKSDLVPRGSPGIHRDGGSGENLYFQSSDNGPQNQRNAPRITFGGPSDSTGSNQNGERSGARSKQRRPQGLPNNTASWFTALTQHGKEDLKFPRGQGVPINTNSSPDDQIGYYRRATRRIRGGDGKMKDLSPRWYFYYLGTGPEAGLPYGANKDGIYWVATEGALNTPKDHIGTRNPANNAAIVLQLPQGTTLPKGFYAEGSRGGSQASSRSSSRSRNSSRNSTPGSSRGTSPARMAGNGGDAALALLLLDRLNQLESKMSGKGQQQQGQTVTKKSAAEASKKPRQKRTATKAYNVTQAFGRRGPEQTQGNFGDQELIRQGTDYKHWPQIAQFAPSASAFFGMSRIGMEVTPSGTWLTYTGAIKLDDKDPNFKDQVILLNKHIDAYKTFPPTEPKKDKKKKADETQALPQRQKKQQTVTLLPAADLDDFSKQLQQSMSSADSTQA

SEQ ID NO: 739 - protein, 671 aa, Artificial Sequence
  Description of Artificial Sequence: Synthetic polypeptide
MHHHHHHGGSGSPILGYWKIKGLVQPTRLLLEYLEEKYEEHLYERDEGDKWRNKKFELGLEFPNLPYYIDGDVKLTQSMAIIRYIADKHNMLGGCPKERAEISMLEGAVLDIRYGVSRIAYSKDFETLKVDFLSKLPEMLKMFEDRLCHKTYLNGDHVTHPDFMLYDALDVVLYMDPMCLDAFPKLVCFKKRIEAIPQIDKYLKSSKYIAWPLQGWQATFGGGDHPPKSDLVPRGSPGIHRDGGSGENLYFQSSDNGPQNQRNAPRITFGGPSDSTGSNQNGERSGARSKQRRPQGLPNNTASWFTALTQHGKEDLKFPRGQGVPINTNSSPDDQIGYYRRATRRIRGGDGKMKDLSPRWYFYYLGTGPEAGLPYGANKNGIIWVATEGALNTPKDHIGTRNPANNAAIVLQLPQGTTLPKGFYAEGSRGGSQASSRSSSRSRNSSRNSTPGSSRGTSPARMAGNGGDAALALLLLDRLNQLESKMSGKGQQQQGQTVTKKSAAEASKKPRQKRTATKAYNVTQAFGRRGPEQTQGNFGDQELIRQGTDYKHWPQIAQFAPSASAFFGMSRIGMEVTPSGTWLTYTGAIKLDDKDPNFKDQVILLNKHIDAYKTFPPTEPKKDKKKKADETQALPQRQKKQQTVTLLPAADLDDFSKQLQQSMSSADSTQA

SEQ ID NO: 740 - protein, 671 aa, Artificial Sequence
  Description of Artificial Sequence: Synthetic polypeptide
MHHHHHHGGSGSPILGYWKIKGLVQPTRLLLEYLEEKYEEHLYERDEGDKWRNKKFELGLEFPNLPYYIDGDVKLTQSMAIIRYIADKHNMLGGCPKERAEISMLEGAVLDIRYGVSRIAYSKDFETLKVDFLSKLPEMLKMFEDRLCHKTYLNGDHVTHPDFMLYDALDVVLYMDPMCLDAFPKLVCFKKRIEAIPQIDKYLKSSKYIAWPLQGWQATFGGGDHPPKSDLVPRGSPGIHRDGGSGENLYFQSSDNGPQNQRNAPRITFGGPSDSTGSNQNGERSGARSKQRRPQGLPNNTASWFTPLTQNGKEDLKFPPGQGVPINTNSSPDDQIGYYRRATRRIRGGDGKMKDLPPKWYFYYLGTGPHADLPYGQKKDGVFWVARPGALNTPKDHIGTRNPANNAAIPLQLPPGTKLPKGFYAEGSRGGSQASSRSSSRSRNSSRNSTPGSSRGTSPARMAGNGGDAALALLLLDRLNQLESKMSGKGQQQQGQTVTKKSAAEASKKPRQKRTATKAYNVTQAFGRRGPEQTQGNFGDQELIRQGTDYKHWPQIAQFAPSASAFFGMSRIGMEVTPSGTWLTYTGAIKLDDKDPNFKDQVILLNKHIDAYKTFPPTEPKKDKKKKADETQALPQRQKKQQTVTLLPAADLDDFSKQLQQSMSSADSTQA

SEQ ID NO: 741 - protein, 671 aa, Artificial Sequence
  Description of Artificial Sequence: Synthetic polypeptide
MHHHHHHGGSGSPILGYWKIKGLVQPTRLLLEYLEEKYEEHLYERDEGDKWRNKKFELGLEFPNLPYYIDGDVKLTQSMAIIRYIADKHNMLGGCPKERAEISMLEGAVLDIRYGVSRIAYSKDFETLKVDFLSKLPEMLKMFEDRLCHKTYLNGDHVTHPDFMLYDALDVVLYMDPMCLDAFPKLVCFKKRIEAIPQIDKYLKSSKYIAWPLQGWQATFGGGDHPPKSDLVPRGSPGIHRDGGSGENLYFQSSDNGPQNQRNAPRITFGGPSDSTGSNQNGERSGARSKQRRPQGLPNNTASWFTALTQHGKEDLKFPKGQGVPINTNSKPDDQIGYWRRETRRYRGGDGQMKDLDPRWYFYYLGTGPEAGLPYGANKDGIIWVATEGALNTPKDHIGTRNPANNAAIVLQLPQGTTLPKGFYAEGSRGGSQASSRSSSRSRNSSRNSTPGSSRGTSPARMAGNGGDAALALLLLDRLNQLESKMSGKGQQQQGQTVTKKSAAEASKKPRQKRTATKAYNVTQAFGRRGPEQTQGNFGDQELIRQGTDYKHWPQIAQFAPSASAFFGMSRIGMEVTPSGTWLTYTGAIKLDDKDPNFKDQVILLNKHIDAYKTFPPTEPKKDKKKKADETQALPQRQKKQQTVTLLPAADLDDFSKQLQQSMSSADSTQA

SEQ ID NO: 742 - protein, 671 aa, Artificial Sequence
  Description of Artificial Sequence: Synthetic polypeptide
MHHHHHHGGSGSPILGYWKIKGLVQPTRLLLEYLEEKYEEHLYERDEGDKWRNKKFELGLEFPNLPYYIDGDVKLTQSMAIIRYIADKHNMLGGCPKERAEISMLEGAVLDIRYGVSRIAYSKDFETLKVDFLSKLPEMLKMFEDRLCHKTYLNGDHVTHPDFMLYDALDVVLYMDPMCLDAFPKLVCFKKRIEAIPQIDKYLKSSKYIAWPLQGWQATFGGGDHPPKSDLVPRGSPGIHRDGGSGENLYFQSSDNGPQNQRNAPRITFGGPSDSTGSNQNGERSGARSKQRRPQGLPNNTASWFTPLTQHGKEDLKFPPGQGVPINTNSSPDDQIGYYRRATRRIRGGDGKMKDLPPRWYFYYLGTGPEADLPYGQVKDGIFWVAEEGALNTPKDHIGTRNPANNAAIPLQLPPGTTLPKGFYAEGSRGGSQASSRSSSRSRNSSRNSTPGSSRGTSPARMAGNGGDAALALLLLDRLNQLESKMSGKGQQQQGQTVTKKSAAEASKKPRQKRTATKAYNVTQAFGRRGPEQTQGNFGDQELIRQGTDYKHWPQIAQFAPSASAFFGMSRIGMEVTPSGTWLTYTGAIKLDDKDPNFKDQVILLNKHIDAYKTFPPTEPKKDKKKKADETQALPQRQKKQQTVTLLPAADLDDFSKQLQQSMSSADSTQA

SEQ ID NO: 743 - protein, 671 aa, Artificial Sequence
  Description of Artificial Sequence: Synthetic polypeptide
MHHHHHHGGSGSPILGYWKIKGLVQPTRLLLEYLEEKYEEHLYERDEGDKWRNKKFELGLEFPNLPYYIDGDVKLTQSMAIIRYIADKHNMLGGCPKERAEISMLEGAVLDIRYGVSRIAYSKDFETLKVDFLSKLPEMLKMFEDRLCHKTYLNGDHVTHPDFMLYDALDVVLYMDPMCLDAFPKLVCFKKRIEAIPQIDKYLKSSKYIAWPLQGWQATFGGGDHPPKSDLVPRGSPGIHRDGGSGENLYFQSSDNGPQNQRNAPRITFGGPSDSTGSNQNGERSGARSKQRRPQGLPNNTASWFTALTQHGKEDLKFPRGQGVPINTNSSPDDQIGYYRRATRRIRGGDGKMKDLSPRWYFYYLGTGPEAGLPYGANKDGIIWVATEGALNTPKDHIGTRNPANNAAIVLQLPQGTTLPKGFYAEGSRGGSQASSRSSSRSRNSSRNSTPGSSRGTSPARMAGNGGDAALALLLLDRLNQLESKMSGKGQQQQGQTVTKKSAAEASKKPRWKRTATKAYNVTQAFGRRGPEQTQGNFGDQELIRQGTDYKHWPQIAQFAPSASAFFGMSRIGMEVTPSGTWLTYTGAIKLDDKDPNFKDQVILLNKHIDAYKTFPPTEPKKDKKKKADETQALPQRQKKQQTVTLLPAADLDDFSKQLQQSMSSADSTQA

SEQ ID NO: 744 - protein, 671 aa, Artificial Sequence
  Description of Artificial Sequence: Synthetic polypeptide
MHHHHHHGGSGSPILGYWKIKGLVQPTRLLLEYLEEKYEEHLYERDEGDKWRNKKFELGLEFPNLPYYIDGDVKLTQSMAIIRYIADKHNMLGGCPKERAEISMLEGAVLDIRYGVSRIAYSKDFETLKVDFLSKLPEMLKMFEDRLCHKTYLNGDHVTHPDFMLYDALDVVLYMDPMCLDAFPKLVCFKKRIEAIPQIDKYLKSSKYIAWPLQGWQATFGGGDHPPKSDLVPRGSPGIHRDGGSGENLYFQSSDNGPQNQRNAPRITFGGPSDSTGSNQNGERSGARSKQRRPQGLPNNTASWFTALTQHGKEDLKFPRGQGVPINTNSSPDDQIGYYRRATRRIRGGDGKMKDLSPRWYFYYLGTGPEAGLPYGANKDGIIWVATEGALNTPKDHIGTRNPANNAAIVLQLPPGTTLPKGFYAEGSRGGSQASSRSSSRSRNSSRNSTPGSSRGTSPARMAGNGGDAALALLLLDRLNQLESKMSGKGQQQQGQTVTKKSAAEASKKPRQKRTATKAYNVTQAFGRRGPEQTQGNFGDQELIRQGTDYKHWPQIAQFAPSASAFFGMSRIGMEVTPSGTWLTYTGAIKLDDKDPNFKDQVILLNKHIDAYKTFPPTEPKKDKKKKADETQALPQRQKKQQTVTLLPAADLDDFSKQLQQSMSSADSTQA

SEQ ID NO: 745 - protein, 671 aa, Artificial Sequence
  Description of Artificial Sequence: Synthetic polypeptide
MHHHHHHGGSGSPILGYWKIKGLVQPTRLLLEYLEEKYEEHLYERDEGDKWRNKKFELGLEFPNLPYYIDGDVKLTQSMAIIRYIADKHNMLGGCPKERAEISMLEGAVLDIRYGVSRIAYSKDFETLKVDFLSKLPEMLKMFEDRLCHKTYLNGDHVTHPDFMLYDALDVVLYMDPMCLDAFPKLVCFKKRIEAIPQIDKYLKSSKYIAWPLQGWQATFGGGDHPPKSDLVPRGSPGIHRDGGSGENLYFQSSDNGPQNQRNAPRITFGGPSDSTGSNQNGERSGARSKQRRPQGLPNNTASWFTALTQHGKEDLKFPRGQGVPINTNSSPDDQIGYYRRATRRIRGGDGKMKDLSPRWYFYYLGTGPEAGLPYGANKDGIIWVATEGALNTPKDHIGTRNPANNAAIVLQLPQGTQLPKGFYAEGSRGGSQASSRSSSRSRNSSRNSTPGSSRGTSPARMAGNGGDAALALLLLDRLNQLESKMSGKGQQQQGQTVTKKSAAEASKKPRQKRTATKAYNVTQAFGRRGPEQTQGNFGDQELIRQGTDYKHWPQIAQFAPSASAFFGMSRIGMEVTPSGTWLTYTGAIKLDDKDPNFKDQVILLNKHIDAYKTFPPTEPKKDKKKKADETQALPQRQKKQQTVTLLPAADLDDFSKQLQQSMSSADSTQA

SEQ ID NO: 746 - protein, 671 aa, Artificial Sequence
  Description of Artificial Sequence: Synthetic polypeptide
MHHHHHHGGSGSPILGYWKIKGLVQPTRLLLEYLEEKYEEHLYERDEGDKWRNKKFELGLEFPNLPYYIDGDVKLTQSMAIIRYIADKHNMLGGCPKERAEISMLEGAVLDIRYGVSRIAYSKDFETLKVDFLSKLPEMLKMFEDRLCHKTYLNGDHVTHPDFMLYDALDVVLYMDPMCLDAFPKLVCFKKRIEAIPQIDKYLKSSKYIAWPLQGWQATFGGGDHPPKSDLVPRGSPGIHRDGGSGENLYFQSSDNGPQNQRNAPRITFGGPSDSTGSNQNGERSGARSKQRRPQGLPNNTASWFTALTQHGKEDLKFPRGQGVPINTNSSPDDQIGYYRRATRRIRGGDGKMKDLSPRWYFYYLGTGPEAGLPYGANKDGIIWVATEGALNTPKDHIGTRNPANNAAIVLQLPQGTTLPKGFYAEGSRGGSQASSRSSSRSRNSSRNSTPGSSRGTSPARMAGNGGDAALALLLLDRLNQLESKMSGKGQQQQGQTVTKKSAAEASKKPRQKRTATKGYNVTQAFGRRGPEQTQGNFGDQDLIKEGTDYKHWPQIAQFAPSASAFFGMSRISTEETPSGTWLTYTGAIKLDKKDPNFKDQVILLNKHIDAYKTFPPTEPKKDKKKKADETQALPQRQKKQQTVTLLPAADLDDFSKQLQQSMSSADSTQA

SEQ ID NO: 747 - protein, 671 aa, Artificial Sequence
  Description of Artificial Sequence: Synthetic polypeptide
MHHHHHHGGSGSPILGYWKIKGLVQPTRLLLEYLEEKYEEHLYERDEGDKWRNKKFELGLEFPNLPYYIDGDVKLTQSMAIIRYIADKHNMLGGCPKERAEISMLEGAVLDIRYGVSRIAYSKDFETLKVDFLSKLPEMLKMFEDRLCHKTYLNGDHVTHPDFMLYDALDVVLYMDPMCLDAFPKLVCFKKRIEAIPQIDKYLKSSKYIAWPLQGWQATFGGGDHPPKSDLVPRGSPGIHRDGGSGENLYFQSSDNGPQNQRNAPRITFGGPSDSTGSNQNGERSGARSKQRRPQGLPNNTASWFTALTQHGKEDLKFPRGQGVPINTNSSPDDQIGYYRRATRRIRGGDGKMKDLSPRWYFYYLGTGPEAGLPYGANKDGIIWVATEGALNTPKDHIGTRDPANNAAIVLQLPQGTTLPKGFYAEGSRGGSQASSRSSSRSRNSSRNSTPGSSRGTSPARMAGNGGDAALALLLLDRLNQLESKMSGKGQQQQGQTVTKKSAAEASKKPRQKRTATKAYNVTQAFGRRGPEQTQGNFGDQELIRQGTDYKHWPQIAQFAPSASAFFGMSRIGMEVTPSGTWLTYTGAIKLDDKDPNFKDQVILLNKHIDAYKTFPPTEPKKDKKKKADETQALPQRQKKQQTVTLLPAADLDDFSKQLQQSMSSADSTQA

SEQ ID NO: 748 - protein, 671 aa, Artificial Sequence
  Description of Artificial Sequence: Synthetic polypeptide
MHHHHHHGGSGSPILGYWKIKGLVQPTRLLLEYLEEKYEEHLYERDEGDKWRNKKFELGLEFPNLPYYIDGDVKLTQSMAIIRYIADKHNMLGGCPKERAEISMLEGAVLDIRYGVSRIAYSKDFETLKVDFLSKLPEMLKMFEDRLCHKTYLNGDHVTHPDFMLYDALDVVLYMDPMCLDAFPKLVCFKKRIEAIPQIDKYLKSSKYIAWPLQGWQATFGGGDHPPKSDLVPRGSPGIHRDGGSGENLYFQSSDNGPQNQRNAPRITFGGPSDSTGSNQNGERSGARSKQRRPQGLPNNTASWFTALTQHGKEDLKFPRGQGVPINTNSSPDDQIGYYRRATRRIRGGDGKMKDLSPRWYFYYLGTGPEAGLPYGANKDGIIWVATEGALNTPKDHIGDRNPANNAAIVLQLPQGTTLPKGFYAEGSRGGSQASSRSSSRSRNSSRNSTPGSSRGTSPARMAGNGGDAALALLLLDRLNQLESKMSGKGQQQQGQTVTKKSAAEASKKPRQKRTATKAYNVTQAFGRRGPEQTQGNFGDQELIRQGTDYKHWPQIAQFAPSASAFFGMSRIGMEVTPSGTWLTYTGAIKLDDKDPNFKDQVILLNKHIDAYKTFPPTEPKKDKKKKADETQALPQRQKKQQTVTLLPAADLDDFSKQLQQSMSSADSTQA

SEQ ID NO: 749 - protein, 671 aa, Artificial Sequence
  Description of Artificial Sequence: Synthetic polypeptide
MHHHHHHGGSGSPILGYWKIKGLVQPTRLLLEYLEEKYEEHLYERDEGDKWRNKKFELGLEFPNLPYYIDGDVKLTQSMAIIRYIADKHNMLGGCPKERAEISMLEGAVLDIRYGVSRIAYSKDFETLKVDFLSKLPEMLKMFEDRLCHKTYLNGDHVTHPDFMLYDALDVVLYMDPMCLDAFPKLVCFKKRIEAIPQIDKYLKSSKYIAWPLQGWQATFGGGDHPPKSDLVPRGSPGIHRDGGSGENLYFQSSDNGPQNQRNAPRITFGGPSDSTGSNQNGERSGARSKQRRPQGLPNNTASWFTPLTQHGKEDLKFPPGQGVPINTNSSPDDQIGYYRRATRRIRGGDGKMKDLPPRWYFYYLGTGPEADLPYGAVKDGIFWVAAEGALNTPKDHIGTRNPANNAAIPLQLPPGTTLPKGFYAEGSRGGSQASSRSSSRSRNSSRNSTPGSSRGTSPARMAGNGGDAALALLLLDRLNQLESKMSGKGQQQQGQTVTKKSAAEASKKPRQKRTATKAYNVTQAFGRRGPEQTQGNFGDQELIRQGTDYKHWPQIAQFAPSASAFFGMSRIGMEVTPSGTWLTYTGAIKLDDKDPNFKDQVILLNKHIDAYKTFPPTEPKKDKKKKADETQALPQRQKKQQTVTLLPAADLDDFSKQLQQSMSSADSTQA

SEQ ID NO: 750 - protein, 671 aa, Artificial Sequence
  Description of Artificial Sequence: Synthetic polypeptide
MHHHHHHGGSGSPILGYWKIKGLVQPTRLLLEYLEEKYEEHLYERDEGDKWRNKKFELGLEFPNLPYYIDGDVKLTQSMAIIRYIADKHNMLGGCPKERAEISMLEGAVLDIRYGVSRIAYSKDFETLKVDFLSKLPEMLKMFEDRLCHKTYLNGDHVTHPDFMLYDALDVVLYMDPMCLDAFPKLVCFKKRIEAIPQIDKYLKSSKYIAWPLQGWQATFGGGDHPPKSDLVPRGSPGIHRDGGSGENLYFQSSDNGPQNQRNAPRITFGGPSDSTGSNQNGERSGARSKQRRPQGLPNNTASWFTALTQHGKEDLKFPRGQGVPINTNSSPDDQIGYYRRATRRIRGGDGKMKDLSPRWYFYYLGTGPEAGLPYGANKDGIIWVATEGALNTPKDHIGTRNPANNAAIVLQLPQGTTLPKGFYAEGSRGGSQASSRSSSRSRNSSRNSTPGSSRGTSPARMAGNGGDAALALLLLDRLNQLESKMSGKGQQQQGQTVTKKSAAEASKKPRQKRTATKAYNVTQAFGRRGPEQTQGNFGDQELIRQGTDYKHWPQIAQFAPSASAFFGMSRIGMEWTPSGTWLTYTGAIKLDDKDPNFKDQVILLNKHIDAYKTFPPTEPKKDKKKKADETQALPQRQKKQQTVTLLPAADLDDFSKQLQQSMSSADSTQA

SEQ ID NO: 751 - protein, 671 aa, Artificial Sequence
  Description of Artificial Sequence: Synthetic polypeptide
MHHHHHHGGSGSPILGYWKIKGLVQPTRLLLEYLEEKYEEHLYERDEGDKWRNKKFELGLEFPNLPYYIDGDVKLTQSMAIIRYIADKHNMLGGCPKERAEISMLEGAVLDIRYGVSRIAYSKDFETLKVDFLSKLPEMLKMFEDRLCHKTYLNGDHVTHPDFMLYDALDVVLYMDPMCLDAFPKLVCFKKRIEAIPQIDKYLKSSKYIAWPLQGWQATFGGGDHPPKSDLVPRGSPGIHRDGGSGENLYFQSSDNGPQNQRNAPRITFGGPSDSTGSNQNGERSGARSKQRRPQGLPNNTASWFTALTQHGKEDLKFPRGQGVPINTNSSPDDQIGYYRRATRRIRGGDGKMKDLSPRWYFYYLGHGPEAGLPYGANKDGIIWVATEGALNTPKDHIGTRNPANNAAIVLQLPQGTTLPKGFYAEGSRGGSQASSRSSSRSRNSSRNSTPGSSRGTSPARMAGNGGDAALALLLLDRLNQLESKMSGKGQQQQGQTVTKKSAAEASKKPRQKRTATKAYNVTQAFGRRGPEQTQGNFGDQELIRQGTDYKHWPQIAQFAPSASAFFGMSRIGMEVTPSGTWLTYTGAIKLDDKDPNFKDQVILLNKHIDAYKTFPPTEPKKDKKKKADETQALPQRQKKQQTVTLLPAADLDDFSKQLQQSMSSADSTQA

SEQ ID NO: 752 - protein, 671 aa, Artificial Sequence
  Description of Artificial Sequence: Synthetic polypeptide
MHHHHHHGGSGSPILGYWKIKGLVQPTRLLLEYLEEKYEEHLYERDEGDKWRNKKFELGLEFPNLPYYIDGDVKLTQSMAIIRYIADKHNMLGGCPKERAEISMLEGAVLDIRYGVSRIAYSKDFETLKVDFLSKLPEMLKMFEDRLCHKTYLNGDHVTHPDFMLYDALDVVLYMDPMCLDAFPKLVCFKKRIEAIPQIDKYLKSSKYIAWPLQGWQATFGGGDHPPKSDLVPRGSPGIHRDGGSGENLYFQSSDNGPQNQRNAPRITFGGPSDSTGSNQNGERSGARSKQRRPQGLPNNTASWFTALTQHGKEDLKFPRGQGVPINTNSSPDDQIGYYRRATRRIRGGDGKMKDLSPRWYFYYLGTGPEAGLPYGANKDGIIWVAGEGALNTPKDHIGTRNPANNAAIVLQLPQGTTLPKGFYAEGSRGGSQASSRSSSRSRNSSRNSTPGSSRGTSPARMAGNGGDAALALLLLDRLNQLESKMSGKGQQQQGQTVTKKSAAEASKKPRQKRTATKAYNVTQAFGRRGPEQTQGNFGDQELIRQGTDYKHWPQIAQFAPSASAFFGMSRIGMEVTPSGTWLTYTGAIKLDDKDPNFKDQVILLNKHIDAYKTFPPTEPKKDKKKKADETQALPQRQKKQQTVTLLPAADLDDFSKQLQQSMSSADSTQA

SEQ ID NO: 753 - protein, 671 aa, Artificial Sequence
  Description of Artificial Sequence: Synthetic polypeptide
MHHHHHHGGSGSPILGYWKIKGLVQPTRLLLEYLEEKYEEHLYERDEGDKWRNKKFELGLEFPNLPYYIDGDVKLTQSMAIIRYIADKHNMLGGCPKERAEISMLEGAVLDIRYGVSRIAYSKDFETLKVDFLSKLPEMLKMFEDRLCHKTYLNGDHVTHPDFMLYDALDVVLYMDPMCLDAFPKLVCFKKRIEAIPQIDKYLKSSKYIAWPLQGWQATFGGGDHPPKSDLVPRGSPGIHRDGGSGENLYFQSSDNGPQNQRNAPRITFGGPSDSTGSNQNGERSGARSKQRRPQGLPNNTASWFTALTQHGKEDLKFPRGQGVPINTNSSPDDQIGYYRRATRRIRGGDGKMKDLSPRWYFYYLGTGPEAGLPYGANKDGIIWVATEGALNTPKDHIGTRNPANNAAIVLQLPQGTTLPKGFYAEGSRGGSQASSRSSSRSRNSSRNSTPGSSRGTSPARMAGNGGDAALALLLLDRLNQLESKMSGKGQQQQGQTVTKKSAAEMSKKPRQKRTATKGYNVTQCFGPRGPEQTQGNFGDAELNKKGVDYKHWPQIAQFAPSASAFFGMSRISSKETPSGTWLTYTGAIKLDKDDPNFKDQVILLNKHIDAYKTFPPTEPKKDKKKKADETQALPQRQKKQQTVTLLPAADLDDFSKQLQQSMSSADSTQA

SEQ ID NO: 754 - protein, 671 aa, Artificial Sequence
  Description of Artificial Sequence: Synthetic polypeptide
MHHHHHHGGSGSPILGYWKIKGLVQPTRLLLEYLEEKYEEHLYERDEGDKWRNKKFELGLEFPNLPYYIDGDVKLTQSMAIIRYIADKHNMLGGCPKERAEISMLEGAVLDIRYGVSRIAYSKDFETLKVDFLSKLPEMLKMFEDRLCHKTYLNGDHVTHPDFMLYDALDVVLYMDPMCLDAFPKLVCFKKRIEAIPQIDKYLKSSKYIAWPLQGWQATFGGGDHPPKSDLVPRGSPGIHRDGGSGENLYFQSSDNGPQNQRNAPRITFGGPSDSTGSNQNGERSGARSKQRRPQGLPNNTASWFTALTQHGKEDLKFPRGQGVPINTNSKPDDQIGYYRRATRRIRGGDGKMKDLSPRWYFYYLGTGPEAGLPYGANKDGIIWVATEGALNTPKDHIGTRNPANNAAIVLQLPQGTTLPKGFYAEGSRGGSQASSRSSSRSRNSSRNSTPGSSRGTSPARMAGNGGDAALALLLLDRLNQLESKMSGKGQQQQGQTVTKKSAAEASKKPRQKRTATKAYNVTQAFGRRGPEQTQGNFGDQELIRQGTDYKHWPQIAQFAPSASAFFGMSRIGMEVTPSGTWLTYTGAIKLDDKDPNFKDQVILLNKHIDAYKTFPPTEPKKDKKKKADETQALPQRQKKQQTVTLLPAADLDDFSKQLQQSMSSADSTQA

SEQ ID NO: 755 - protein, 671 aa, Artificial Sequence
  Description of Artificial Sequence: Synthetic polypeptide
MHHHHHHGGSGSPILGYWKIKGLVQPTRLLLEYLEEKYEEHLYERDEGDKWRNKKFELGLEFPNLPYYIDGDVKLTQSMAIIRYIADKHNMLGGCPKERAEISMLEGAVLDIRYGVSRIAYSKDFETLKVDFLSKLPEMLKMFEDRLCHKTYLNGDHVTHPDFMLYDALDVVLYMDPMCLDAFPKLVCFKKRIEAIPQIDKYLKSSKYIAWPLQGWQATFGGGDHPPKSDLVPRGSPGIHRDGGSGENLYFQSSDNGPQNQRNAPRITFGGPSDSTGSNQNGERSGARSKQRRPQGLPNNTASWFTALTQHGKEDLKFPRGQGVPINTNSSPDDQIGYYRRATRRIRGGDGKMKDLSPRWYFYYLGTGPEAGLPYGANKDGIIWVATEGALNTPKDHIGTRNPANNAAIVLQLPQGTTLPKGFYAEGSRGGSQASSRSSSRSRNSSRNSTPGSSRGTSPARMAGNGGDAALALLLLDRLNQLESKMSGKGQQQQGQTVTKKSAAEMSKKPRQKRTATKGCNVTQCFGPRGPEQTQGNFGDADLNKKGTDYKHWPQIAQFAPSASAFFGMSRISSKEQPSGTWLTYTGAIKLDKDDPNFKDQVILLNKHIDAYKTFPPTEPKKDKKKKADETQALPQRQKKQQTVTLLPAADLDDFSKQLQQSMSSADSTQA

SEQ ID NO: 756 - protein, 671 aa, Artificial Sequence
  Description of Artificial Sequence: Synthetic polypeptide
MHHHHHHGGSGSPILGYWKIKGLVQPTRLLLEYLEEKYEEHLYERDEGDKWRNKKFELGLEFPNLPYYIDGDVKLTQSMAIIRYIADKHNMLGGCPKERAEISMLEGAVLDIRYGVSRIAYSKDFETLKVDFLSKLPEMLKMFEDRLCHKTYLNGDHVTHPDFMLYDALDVVLYMDPMCLDAFPKLVCFKKRIEAIPQIDKYLKSSKYIAWPLQGWQATFGGGDHPPKSDLVPRGSPGIHRDGGSGENLYFQSSDNGPQNQRNAPRITFGGPSDSTGSNQNGERSGARSKQRRPQGLPNNTASWFTALTQHGKEDLKFPRGQGVPINTNSSPDDQIGYYRRATRRIRGGDGKMKDLSPRWYFYYLGTGPEAGLPYGANKDGIIWVATEGALNTPKDHIGTRNPANNAAIVLQLPQGTTLPKGFYAEGSRGGSQASSRSSSRSRNSSRNSTPGSSRGTSPARMAGNGGDAALALLLLDRLNQLESKMSGKGQQQQGQTVTKKSAAEASKKPRQKRTPTKAYNVTQAFGRRGPEQTQGNFGDQELIRQGTDYKHWPQIAQFAPSASAFFGMSRIGMEVTPSGTWLTYTGAIKLDDKDPNFKDQVILLNKHIDAYKTFPPTEPKKDKKKKADETQALPQRQKKQQTVTLLPAADLDDFSKQLQQSMSSADSTQA

SEQ ID NO: 757 - protein, 671 aa, Artificial Sequence
  Description of Artificial Sequence: Synthetic polypeptide
MHHHHHHGGSGSPILGYWKIKGLVQPTRLLLEYLEEKYEEHLYERDEGDKWRNKKFELGLEFPNLPYYIDGDVKLTQSMAIIRYIADKHNMLGGCPKERAEISMLEGAVLDIRYGVSRIAYSKDFETLKVDFLSKLPEMLKMFEDRLCHKTYLNGDHVTHPDFMLYDALDVVLYMDPMCLDAFPKLVCFKKRIEAIPQIDKYLKSSKYIAWPLQGWQATFGGGDHPPKSDLVPRGSPGIHRDGGSGENLYFQSSDNGPQNQRNAPRITFGGPSDSTGSNQNGERSGARSKQRRPQGLPNNTASWFTALTQHGKEDLKFPRGQGVPINTNSSPDDQIGYYRRATRRIRGGDGKMKDLSPRWYFYYLGTGPEAGLPYGANKDGIIWVATEGALNTPKDHIGTRNPANNAARVLQLPQGTTLPKGFYAEGSRGGSQASSRSSSRSRNSSRNSTPGSSRGTSPARMAGNGGDAALALLLLDRLNQLESKMSGKGQQQQGQTVTKKSAAEASKKPRQKRTATKAYNVTQAFGRRGPEQTQGNFGDQELIRQGTDYKHWPQIAQFAPSASAFFGMSRIGMEVTPSGTWLTYTGAIKLDDKDPNFKDQVILLNKHIDAYKTFPPTEPKKDKKKKADETQALPQRQKKQQTVTLLPAADLDDFSKQLQQSMSSADSTQA

SEQ ID NO: 758 - protein, 671 aa, Artificial Sequence
  Description of Artificial Sequence: Synthetic polypeptide
MHHHHHHGGSGSPILGYWKIKGLVQPTRLLLEYLEEKYEEHLYERDEGDKWRNKKFELGLEFPNLPYYIDGDVKLTQSMAIIRYIADKHNMLGGCPKERAEISMLEGAVLDIRYGVSRIAYSKDFETLKVDFLSKLPEMLKMFEDRLCHKTYLNGDHVTHPDFMLYDALDVVLYMDPMCLDAFPKLVCFKKRIEAIPQIDKYLKSSKYIAWPLQGWQATFGGGDHPPKSDLVPRGSPGIHRDGGSGENLYFQSSDNGPQNQRNAPRITFGGPSDSTGSNQNGERSGARSKQRRPQGLPNNTASWFTGLTQNGKEDLKFPPGQGVPINTNSSPDDQIGYYRRATRRIRGGDGKMKDLPPKWYFYYLGTGPHADLPYGQKHDGVFWVARPGALNTPKDHIGTRNPANNAAIPLQLPPGTKLPKGFYAEGSRGGSQASSRSSSRSRNSSRNSTPGSSRGTSPARMAGNGGDAALALLLLDRLNQLESKMSGKGQQQQGQTVTKKSAAEASKKPRQKRTATKAYNVTQAFGRRGPEQTQGNFGDQELIRQGTDYKHWPQIAQFAPSASAFFGMSRIGMEVTPSGTWLTYTGAIKLDDKDPNFKDQVILLNKHIDAYKTFPPTEPKKDKKKKADETQALPQRQKKQQTVTLLPAADLDDFSKQLQQSMSSADSTQA

SEQ ID NO: 759 - protein, 671 aa, Artificial Sequence
  Description of Artificial Sequence: Synthetic polypeptide
MHHHHHHGGSGSPILGYWKIKGLVQPTRLLLEYLEEKYEEHLYERDEGDKWRNKKFELGLEFPNLPYYIDGDVKLTQSMAIIRYIADKHNMLGGCPKERAEISMLEGAVLDIRYGVSRIAYSKDFETLKVDFLSKLPEMLKMFEDRLCHKTYLNGDHVTHPDFMLYDALDVVLYMDPMCLDAFPKLVCFKKRIEAIPQIDKYLKSSKYIAWPLQGWQATFGGGDHPPKSDLVPRGSPGIHRDGGSGENLYFQSSDNGPQNQRNAPRITFGGPSDSTGSNQNGERSGARSKQRRPQGLPNNTASWFTALTQHGKEDLKFPRGQGVPINTNSSPDDQIGYYRRATRRIRGGDGKMKDLSPRWYFYYLGTGPEAGLPYGANKDGIIWVATEGALNTPKDHIGTRNPANNAAIVLQLPQGTTLPKGFYAEGSRGGSQASSRSSSRSRNSSRNSTPGSSRGTSPARMAGNGGDAALALLLLDRLNQLESKMSGKGQQQQGQTVTKKSAAEMSKKPRQKRTATKECNVTQCFGPRGPEQTQGNFGDAELIKKGTDYKHWPQIAQFAPSASAFFGMSRISSKEQPSGTWLTYTGAIKLDKDDPNFKDQVILLNKHIDAYKTFPPTEPKKDKKKKADETQALPQRQKKQQTVTLLPAADLDDFSKQLQQSMSSADSTQA

SEQ ID NO: 760 - protein, 671 aa, Artificial Sequence
  Description of Artificial Sequence: Synthetic polypeptide
MHHHHHHGGSGSPILGYWKIKGLVQPTRLLLEYLEEKYEEHLYERDEGDKWRNKKFELGLEFPNLPYYIDGDVKLTQSMAIIRYIADKHNMLGGCPKERAEISMLEGAVLDIRYGVSRIAYSKDFETLKVDFLSKLPEMLKMFEDRLCHKTYLNGDHVTHPDFMLYDALDVVLYMDPMCLDAFPKLVCFKKRIEAIPQIDKYLKSSKYIAWPLQGWQATFGGGDHPPKSDLVPRGSPGIHRDGGSGENLYFQSSDNGPQNQRNAPRITFGGPSDSTGSNQNGERSGARSKQRRPQGLPNNTASWFTALTQHGKEDLKFPRGQGVPVNTNSSPDDQIGYYRRATRRIRGGDGKMKDLSPRWYFYYLGTGPEAGLPYGANKDGIIWVATEGALNTPKDHIGTRNPANNAAIVLQLPQGTTLPKGFYAEGSRGGSQASSRSSSRSRNSSRNSTPGSSRGTSPARMAGNGGDAALALLLLDRLNQLESKMSGKGQQQQGQTVTKKSAAEASKKPRQKRTATKAYNVTQAFGRRGPEQTQGNFGDQELIRQGTDYKHWPQIAQFAPSASAFFGMSRIGMEVTPSGTWLTYTGAIKLDDKDPNFKDQVILLNKHIDAYKTFPPTEPKKDKKKKADETQALPQRQKKQQTVTLLPAADLDDFSKQLQQSMSSADSTQA

SEQ ID NO: 761 - protein, 671 aa, Artificial Sequence
  Description of Artificial Sequence: Synthetic polypeptide
MHHHHHHGGSGSPILGYWKIKGLVQPTRLLLEYLEEKYEEHLYERDEGDKWRNKKFELGLEFPNLPYYIDGDVKLTQSMAIIRYIADKHNMLGGCPKERAEISMLEGAVLDIRYGVSRIAYSKDFETLKVDFLSKLPEMLKMFEDRLCHKTYLNGDHVTHPDFMLYDALDVVLYMDPMCLDAFPKLVCFKKRIEAIPQIDKYLKSSKYIAWPLQGWQATFGGGDHPPKSDLVPRGSPGIHRDGGSGENLYFQSSDNGPQNQRNAPRITFGGPSDSTGSNQNGERSGARSKQRRPQGLPNNTASWFTPLTQNGKEDLKFPPGQGVPINTNSSPDDQIGYYRRATRRIRGGDGKMKDLPPKWYFYYLGTGPHADLPYGQKQDGVVWVARPGALNTPKDHIGTRNPANNAAIPLQLPPGTKLPKGFYAEGSRGGSQASSRSSSRSRNSSRNSTPGSSRGTSPARMAGNGGDAALALLLLDRLNQLESKMSGKGQQQQGQTVTKKSAAEASKKPRQKRTATKAYNVTQAFGRRGPEQTQGNFGDQELIRQGTDYKHWPQIAQFAPSASAFFGMSRIGMEVTPSGTWLTYTGAIKLDDKDPNFKDQVILLNKHIDAYKTFPPTEPKKDKKKKADETQALPQRQKKQQTVTLLPAADLDDFSKQLQQSMSSADSTQA

SEQ ID NO: 762 - protein, 671 aa, Artificial Sequence
  Description of Artificial Sequence: Synthetic polypeptide
MHHHHHHGGSGSPILGYWKIKGLVQPTRLLLEYLEEKYEEHLYERDEGDKWRNKKFELGLEFPNLPYYIDGDVKLTQSMAIIRYIADKHNMLGGCPKERAEISMLEGAVLDIRYGVSRIAYSKDFETLKVDFLSKLPEMLKMFEDRLCHKTYLNGDHVTHPDFMLYDALDVVLYMDPMCLDAFPKLVCFKKRIEAIPQIDKYLKSSKYIAWPLQGWQATFGGGDHPPKSDLVPRGSPGIHRDGGSGENLYFQSSDNGPQNQRNAPRITFGGPSDSTGSNQNGERSGARSKQRRPQGLPNNTASWFTALTQHGKEDLKFPRGQGVPINTNSSPDDQIGYYRRATRRIRGGDGKMKDLSPRWYFYYLGTGPEAGLPYGANKDGIIWVATEGALNTPKDHIGTRNPANNAAIVLQLPQGTTLPKGFYAEGSRGGSQASSRSSSRSRNSSRNSTPGSSRGTSPARMAGNGGDAALALLLLDRLNQLESKMSGKGQQQQGQTVTKKSAAEASKKPRQKRTATKAYNVTQAFGRRGPEQTQGNFGDQELIRQGTDYKHWPQIAQFAPSASAFFGMSRIGMEVTPSGTWLTYTGAIKLDDKDPNFEDQVILLNKHIDAYKTFPPTEPKKDKKKKADETQALPQRQKKQQTVTLLPAADLDDFSKQLQQSMSSADSTQA

SEQ ID NO: 763 - protein, 671 aa, Artificial Sequence
  Description of Artificial Sequence: Synthetic polypeptide
MHHHHHHGGSGSPILGYWKIKGLVQPTRLLLEYLEEKYEEHLYERDEGDKWRNKKFELGLEFPNLPYYIDGDVKLTQSMAIIRYIADKHNMLGGCPKERAEISMLEGAVLDIRYGVSRIAYSKDFETLKVDFLSKLPEMLKMFEDRLCHKTYLNGDHVTHPDFMLYDALDVVLYMDPMCLDAFPKLVCFKKRIEAIPQIDKYLKSSKYIAWPLQGWQATFGGGDHPPKSDLVPRGSPGIHRDGGSGENLYFQSSDNGPQNQRNAPRITFGGPSDSTGSNQNGERSGARSKQRRPQGLPNNTASWFTPLTQFGKEDLKFPPGQGVPINTNSSPDDQIGYYRRATRRIRGGDGKMKDLPPKWYFYYLGTGPHADLPYGQKHDGVVWVARPGALNTPKDHIGTRNPANNAAIPLQLPPGTKLPKGFYAEGSRGGSQASSRSSSRSRNSSRNSTPGSSRGTSPARMAGNGGDAALALLLLDRLNQLESKMSGKGQQQQGQTVTKKSAAEASKKPRQKRTATKAYNVTQAFGRRGPEQTQGNFGDQELIRQGTDYKHWPQIAQFAPSASAFFGMSRIGMEVTPSGTWLTYTGAIKLDDKDPNFKDQVILLNKHIDAYKTFPPTEPKKDKKKKADETQALPQRQKKQQTVTLLPAADLDDFSKQLQQSMSSADSTQA

SEQ ID NO: 764 - protein, 671 aa, Artificial Sequence
  Description of Artificial Sequence: Synthetic polypeptide
MHHHHHHGGSGSPILGYWKIKGLVQPTRLLLEYLEEKYEEHLYERDEGDKWRNKKFELGLEFPNLPYYIDGDVKLTQSMAIIRYIADKHNMLGGCPKERAEISMLEGAVLDIRYGVSRIAYSKDFETLKVDFLSKLPEMLKMFEDRLCHKTYLNGDHVTHPDFMLYDALDVVLYMDPMCLDAFPKLVCFKKRIEAIPQIDKYLKSSKYIAWPLQGWQATFGGGDHPPKSDLVPRGSPGIHRDGGSGENLYFQSSDNGPQNQRNAPRITFGGPSDSTGSNQNGERSGARSKQRRPQGLPNNTASWFTALTQHGKEDLKFPRGQGVPINTNSSPDDQIGYYRRTTRRIRGGDGKMKDLSPRWYFYYLGTGPEAGLPYGANKDGIIWVATEGALNTPKDHIGTRNPANNAAIVLQLPQGTTLPKGFYAEGSRGGSQASSRSSSRSRNSSRNSTPGSSRGTSPARMAGNGGDAALALLLLDRLNQLESKMSGKGQQQQGQTVTKKSAAEASKKPRQKRTATKAYNVTQAFGRRGPEQTQGNFGDQELIRQGTDYKHWPQIAQFAPSASAFFGMSRIGMEVTPSGTWLTYTGAIKLDDKDPNFKDQVILLNKHIDAYKTFPPTEPKKDKKKKADETQALPQRQKKQQTVTLLPAADLDDFSKQLQQSMSSADSTQA

SEQ ID NO: 765 - protein, 671 aa, Artificial Sequence
  Description of Artificial Sequence: Synthetic polypeptide
MHHHHHHGGSGSPILGYWKIKGLVQPTRLLLEYLEEKYEEHLYERDEGDKWRNKKFELGLEFPNLPYYIDGDVKLTQSMAIIRYIADKHNMLGGCPKERAEISMLEGAVLDIRYGVSRIAYSKDFETLKVDFLSKLPEMLKMFEDRLCHKTYLNGDHVTHPDFMLYDALDVVLYMDPMCLDAFPKLVCFKKRIEAIPQIDKYLKSSKYIAWPLQGWQATFGGGDHPPKSDLVPRGSPGIHRDGGSGENLYFQSSDNGPQNQRNAPRITFGGPSDSTGSNQNGERSGARSKQRRPQGLPNNTASWFTALTQHGKEDLKFPRGQGVPINTNSSPDDQIGYYRRATRRIRGGDGKMKDLSPRWYFYYLGTGPEAGLPYGANKDGIIWVATEGALNTPKDHIGTRNPANNAAIVLQLPQGTTLPKGFYAEGSRGGSQASSRSSSRSRNSSRNSTPGSSRGTSPARMAGNGGDAALALLLLDRLNQLESKMSGKGQQQQGQTVTKKSAAEMSKKPRWKRTPTKGYNVTQAFGPRGPKDTQGNFGDAELIKQGTDYKHWPQIAQFVPSAAAFFFMSRISMKETPDGVWLTYTGTIKLDKDDPNFDDQVKLLNKHIDAYKTFPPTEPKKDKKKKADETQALPQRQKKQQTVTLLPAADLDDFSKQLQQSMSSADSTQA

SEQ ID NO: 766 - protein, 671 aa, Artificial Sequence
  Description of Artificial Sequence: Synthetic polypeptide
MHHHHHHGGSGSPILGYWKIKGLVQPTRLLLEYLEEKYEEHLYERDEGDKWRNKKFELGLEFPNLPYYIDGDVKLTQSMAIIRYIADKHNMLGGCPKERAEISMLEGAVLDIRYGVSRIAYSKDFETLKVDFLSKLPEMLKMFEDRLCHKTYLNGDHVTHPDFMLYDALDVVLYMDPMCLDAFPKLVCFKKRIEAIPQIDKYLKSSKYIAWPLQGWQATFGGGDHPPKSDLVPRGSPGIHRDGGSGENLYFQSSDNGPQNQRNAPRITFGGPSDSTGSNQNGERSGARSKQRRPQGLPNNTASWFTALTQHGKEDLKFPRGQGVPINTNSSPDDQIGYYRRATRRIRGGDGKMKDLSPRWYFYYLGTGPEAGLPYGANKDGIIWVATEGALNTPKDHIGTRNPANNAAIVLQLPQGTTLPKGFYAEGSRGGSQASSRSSSRSRNSSRNSTPGSSRGTSPARMAGNGGDAALALLLLDRLNQLESKMSGKGQQQQGQTVTKKSAAEASKKPRQKRTATKEYNVTQAFGRRGPEQTQGNFGDQDLNKLGTDYKHWPQIAQFAPSASAFFGMSRISTEETPSGTWLTYTGAIKLDKKDPNFKDQVILLNKHIDAYKTFPPTEPKKDKKKKADETQALPQRQKKQQTVTLLPAADLDDFSKQLQQSMSSADSTQA

SEQ ID NO: 767 - protein, 671 aa, Artificial Sequence
  Description of Artificial Sequence: Synthetic polypeptide
MHHHHHHGGSGSPILGYWKIKGLVQPTRLLLEYLEEKYEEHLYERDEGDKWRNKKFELGLEFPNLPYYIDGDVKLTQSMAIIRYIADKHNMLGGCPKERAEISMLEGAVLDIRYGVSRIAYSKDFETLKVDFLSKLPEMLKMFEDRLCHKTYLNGDHVTHPDFMLYDALDVVLYMDPMCLDAFPKLVCFKKRIEAIPQIDKYLKSSKYIAWPLQGWQATFGGGDHPPKSDLVPRGSPGIHRDGGSGENLYFQSSDNGPQNQRNAPRITFGGPSDSTGSNQNGERSGARSKQRRPQGLPNNTASWFTALTQHGKEDLKFPRGQGVPINTNSSPDDQIGTYRRATRRIRGGDGKMKDLSPRWYFYYLGTGPEAGLPYGANKDGIIWVATEGALNTPKDHIGTRNPANNAAIVLQLPQGTTLPKGFYAEGSRGGSQASSRSSSRSRNSSRNSTPGSSRGTSPARMAGNGGDAALALLLLDRLNQLESKMSGKGQQQQGQTVTKKSAAEASKKPRQKRTATKAYNVTQAFGRRGPEQTQGNFGDQELIRQGTDYKHWPQIAQFAPSASAFFGMSRIGMEVTPSGTWLTYTGAIKLDDKDPNFKDQVILLNKHIDAYKTFPPTEPKKDKKKKADETQALPQRQKKQQTVTLLPAADLDDFSKQLQQSMSSADSTQA

SEQ ID NO: 768 - protein, 671 aa, Artificial Sequence
  Description of Artificial Sequence: Synthetic polypeptide
MHHHHHHGGSGSPILGYWKIKGLVQPTRLLLEYLEEKYEEHLYERDEGDKWRNKKFELGLEFPNLPYYIDGDVKLTQSMAIIRYIADKHNMLGGCPKERAEISMLEGAVLDIRYGVSRIAYSKDFETLKVDFLSKLPEMLKMFEDRLCHKTYLNGDHVTHPDFMLYDALDVVLYMDPMCLDAFPKLVCFKKRIEAIPQIDKYLKSSKYIAWPLQGWQATFGGGDHPPKSDLVPRGSPGIHRDGGSGENLYFQSSDNGPQNQRNAPRITFGGPSDSTGSNQNGERSGARSKQRRPQGLPNNTASWFTALTQHGKEDLKFPRGQGVPINTNSSPDDQIGYYRRATRRIRGGDGKMKDLSPRWYFYYLGTGPEAGLPYGANKDGIIWVATEGALNTPKDHIGTRNPANNAAIVLQLPQGTTLPKGFYAEGSRGGSQASSRSSSRSRNSSRNSTPGSSRGTSPARMAGNGGDAALALLLLDRLNQLESKMSGKGQQQQGQTVTKKSAAEASKKPRQKRTATKAYNVTQAFGRRGPEQTQGNFGDQELNRQGTDYKHWPQIAQFAPSASAFFGMSRIGMEVTPSGTWLTYTGAIKLDDKDPNFKDQVILLNKHIDAYKTFPPTEPKKDKKKKADETQALPQRQKKQQTVTLLPAADLDDFSKQLQQSMSSADSTQA

SEQ ID NO: 769 - protein, 671 aa, Artificial Sequence
  Description of Artificial Sequence: Synthetic polypeptide
MHHHHHHGGSGSPILGYWKIKGLVQPTRLLLEYLEEKYEEHLYERDEGDKWRNKKFELGLEFPNLPYYIDGDVKLTQSMAIIRYIADKHNMLGGCPKERAEISMLEGAVLDIRYGVSRIAYSKDFETLKVDFLSKLPEMLKMFEDRLCHKTYLNGDHVTHPDFMLYDALDVVLYMDPMCLDAFPKLVCFKKRIEAIPQIDKYLKSSKYIAWPLQGWQATFGGGDHPPKSDLVPRGSPGIHRDGGSGENLYFQSSDNGPQNQRNAPRITFGGPSDSTGSNQNGERSGARSKQRRPQGLPNNTASWFTALTQHGKEDLKFPRGQGVPINTNSSPDDQIGPYRRATRRIRGGDGKMKDLSPRWYFYYLGTGPEAGLPYGANKDGIIWVATEGALNTPKDHIGTRNPANNAAIVLQLPQGTTLPKGFYAEGSRGGSQASSRSSSRSRNSSRNSTPGSSRGTSPARMAGNGGDAALALLLLDRLNQLESKMSGKGQQQQGQTVTKKSAAEASKKPRQKRTATKAYNVTQAFGRRGPEQTQGNFGDQELIRQGTDYKHWPQIAQFAPSASAFFGMSRIGMEVTPSGTWLTYTGAIKLDDKDPNFKDQVILLNKHIDAYKTFPPTEPKKDKKKKADETQALPQRQKKQQTVTLLPAADLDDFSKQLQQSMSSADSTQA

SEQ ID NO: 770 - protein, 671 aa, Artificial Sequence
  Description of Artificial Sequence: Synthetic polypeptide
MHHHHHHGGSGSPILGYWKIKGLVQPTRLLLEYLEEKYEEHLYERDEGDKWRNKKFELGLEFPNLPYYIDGDVKLTQSMAIIRYIADKHNMLGGCPKERAEISMLEGAVLDIRYGVSRIAYSKDFETLKVDFLSKLPEMLKMFEDRLCHKTYLNGDHVTHPDFMLYDALDVVLYMDPMCLDAFPKLVCFKKRIEAIPQIDKYLKSSKYIAWPLQGWQATFGGGDHPPKSDLVPRGSPGIHRDGGSGENLYFQSSDNGPQNQRNAPRITFGGPSDSTGSNQNGERSGARSKQRRPQGLPNNTASWFTALTQHGKEDLKFPRGQGVPINTNSSPDDQIGYYRRATRRIRGGDGKMKDLSPRWYFYYLGTGPEAGLPYGANKDGIIWVATEGALNTPKDHIGTRNPANNAAIVLQLPQGTTLPKGFYAEGSRGGSQASSRSSSRSRNSSRNSTPGSSRGTSPARMAGNGGDAALALLLLDRLNQLESKMSGKGQQQQGQTVTKKSAAEASKKPRQKRTATKNYNVTQAFGRRGPEQTQGNFGDQELIRQGTDYKHWPQIAQFAPSASAFFGMSRIGMEVTPSGTWLTYTGAIKLDDKDPNFKDQVILLNKHIDAYKTFPPTEPKKDKKKKADETQALPQRQKKQQTVTLLPAADLDDFSKQLQQSMSSADSTQA

SEQ ID NO: 771 - protein, 671 aa, Artificial Sequence
  Description of Artificial Sequence: Synthetic polypeptide
MHHHHHHGGSGSPILGYWKIKGLVQPTRLLLEYLEEKYEEHLYERDEGDKWRNKKFELGLEFPNLPYYIDGDVKLTQSMAIIRYIADKHNMLGGCPKERAEISMLEGAVLDIRYGVSRIAYSKDFETLKVDFLSKLPEMLKMFEDRLCHKTYLNGDHVTHPDFMLYDALDVVLYMDPMCLDAFPKLVCFKKRIEAIPQIDKYLKSSKYIAWPLQGWQATFGGGDHPPKSDLVPRGSPGIHRDGGSGENLYFQSSDNGPQNQRNAPRITFGGPSDSTGSNQNGERSGARSKQRRPQGLPNNTASWFTALTQHGKEDLKFPRGQGVPINTNSSPDDQIGYYRRATRRIRGGDGKMKDLSPRWYFYYLGTGPEAGLPYGANKDGIIWVATEGALNTPKDHIGTRNPANNAAIVLQLPQGTTLPKGFYAEGSRGGSQASSRSSSRSRNSSRNSTPGSSRGTSPARMAGNGGDAALALLLLDRLNQLESKMSGKGQQQQGQTVTKKSAAEASKKPRQKRTATKAYNVTQAFGRRGPEQTQGNFGDQELIRQGTDYKHWPQIAQFAPSASAFFGMSRIGMEVTPSGTWLTYTGAIKLDEKDPNFKDQVILLNKHIDAYKTFPPTEPKKDKKKKADETQALPQRQKKQQTVTLLPAADLDDFSKQLQQSMSSADSTQA

SEQ ID NO: 772 - protein, 671 aa, Artificial Sequence
  Description of Artificial Sequence: Synthetic polypeptide
MHHHHHHGGSGSPILGYWKIKGLVQPTRLLLEYLEEKYEEHLYERDEGDKWRNKKFELGLEFPNLPYYIDGDVKLTQSMAIIRYIADKHNMLGGCPKERAEISMLEGAVLDIRYGVSRIAYSKDFETLKVDFLSKLPEMLKMFEDRLCHKTYLNGDHVTHPDFMLYDALDVVLYMDPMCLDAFPKLVCFKKRIEAIPQIDKYLKSSKYIAWPLQGWQATFGGGDHPPKSDLVPRGSPGIHRDGGSGENLYFQSSDNGPQNQRNAPRITFGGPSDSTGSNQNGERSGARSKQRRPQGLPNNTASWFTALTQHGKEDLKFPRGQGVPINTNSSPDDQIGYYRRATRRIRGGDGKMKDLSPRWYFYYLGTGPEAGLPYGANKDGIIWVATEGALNTPKDHIGTRNPANNAAIVLQLPQGTTLPKGFYAEGSRGGSQASSRSSSRSRNSSRNSTPGSSRGTSPARMAGNGGDAALALLLLDRLNQLESKMSGKGQQQQGQTVTKKSAAEMSKKPRQKRTATKGYNVTQCFGPRGPEQTQGNFGDAELIKKGTDYKHWPQIAQFAPSASAFFGMSRISSKETPSGTWLTYTGAIKLDKDDPNFKDQVILLNKHIDAYKTFPPTEPKKDKKKKADETQALPQRQKKQQTVTLLPAADLDDFSKQLQQSMSSADSTQA

SEQ ID NO: 773 - protein, 671 aa, Artificial Sequence
  Description of Artificial Sequence: Synthetic polypeptide
MHHHHHHGGSGSPILGYWKIKGLVQPTRLLLEYLEEKYEEHLYERDEGDKWRNKKFELGLEFPNLPYYIDGDVKLTQSMAIIRYIADKHNMLGGCPKERAEISMLEGAVLDIRYGVSRIAYSKDFETLKVDFLSKLPEMLKMFEDRLCHKTYLNGDHVTHPDFMLYDALDVVLYMDPMCLDAFPKLVCFKKRIEAIPQIDKYLKSSKYIAWPLQGWQATFGGGDHPPKSDLVPRGSPGIHRDGGSGENLYFQSSDNGPQNQRNAPRITFGGPSDSTGSNQNGERSGARSKQRRPQGLPNNTASWFTALTQHGKEDLKFPRGQGVPINTNSSPDDQIGYYRRATRRIRGGDGKMKDLSPRWYFYYLGTGPEAGLPYGANKDGIIWVATEGALNTPKDHIGTRNPANNAASVLQLPQGTTLPKGFYAEGSRGGSQASSRSSSRSRNSSRNSTPGSSRGTSPARMAGNGGDAALALLLLDRLNQLESKMSGKGQQQQGQTVTKKSAAEASKKPRQKRTATKAYNVTQAFGRRGPEQTQGNFGDQELIRQGTDYKHWPQIAQFAPSASAFFGMSRIGMEVTPSGTWLTYTGAIKLDDKDPNFKDQVILLNKHIDAYKTFPPTEPKKDKKKKADETQALPQRQKKQQTVTLLPAADLDDFSKQLQQSMSSADSTQA

SEQ ID NO: 774 - protein, 671 aa, Artificial Sequence
  Description of Artificial Sequence: Synthetic polypeptide
MHHHHHHGGSGSPILGYWKIKGLVQPTRLLLEYLEEKYEEHLYERDEGDKWRNKKFELGLEFPNLPYYIDGDVKLTQSMAIIRYIADKHNMLGGCPKERAEISMLEGAVLDIRYGVSRIAYSKDFETLKVDFLSKLPEMLKMFEDRLCHKTYLNGDHVTHPDFMLYDALDVVLYMDPMCLDAFPKLVCFKKRIEAIPQIDKYLKSSKYIAWPLQGWQATFGGGDHPPKSDLVPRGSPGIHRDGGSGENLYFQSSDNGPQNQRNAPRITFGGPSDSTGSNQNGERSGARSKQRRPQGLPNNTASWFTALTQHGKEDLKFPRGQGVPINTNSSPDDQIGYYRRATRRIRGGDGKMKDLSPRWYFYYLGTGPEAGLPYGANKDGIIWVATEGALNTPKDHIGTRNPANNPAIVLQLPQGTTLPKGFYAEGSRGGSQASSRSSSRSRNSSRNSTPGSSRGTSPARMAGNGGDAALALLLLDRLNQLESKMSGKGQQQQGQTVTKKSAAEASKKPRQKRTATKAYNVTQAFGRRGPEQTQGNFGDQELIRQGTDYKHWPQIAQFAPSASAFFGMSRIGMEVTPSGTWLTYTGAIKLDDKDPNFKDQVILLNKHIDAYKTFPPTEPKKDKKKKADETQALPQRQKKQQTVTLLPAADLDDFSKQLQQSMSSADSTQA

SEQ ID NO: 775 - protein, 671 aa, Artificial Sequence
  Description of Artificial Sequence: Synthetic polypeptide
MHHHHHHGGSGSPILGYWKIKGLVQPTRLLLEYLEEKYEEHLYERDEGDKWRNKKFELGLEFPNLPYYIDGDVKLTQSMAIIRYIADKHNMLGGCPKERAEISMLEGAVLDIRYGVSRIAYSKDFETLKVDFLSKLPEMLKMFEDRLCHKTYLNGDHVTHPDFMLYDALDVVLYMDPMCLDAFPKLVCFKKRIEAIPQIDKYLKSSKYIAWPLQGWQATFGGGDHPPKSDLVPRGSPGIHRDGGSGENLYFQSSDNGPQNQRNAPRITFGGPSDSTGSNQNGERSGARSKQRRPQGLPNNTASWFTALTQHGKEDLKFPRGQGVPINTNSSPDDQIGYYRRATRRIRGGDGKMKDLSPRWYFYYLGTGPEAGLPYGANKDGIIWVATEGALNTPKDHIGTRNPANNAAKVLQLPQGTTLPKGFYAEGSRGGSQASSRSSSRSRNSSRNSTPGSSRGTSPARMAGNGGDAALALLLLDRLNQLESKMSGKGQQQQGQTVTKKSAAEASKKPRQKRTATKAYNVTQAFGRRGPEQTQGNFGDQELIRQGTDYKHWPQIAQFAPSASAFFGMSRIGMEVTPSGTWLTYTGAIKLDDKDPNFKDQVILLNKHIDAYKTFPPTEPKKDKKKKADETQALPQRQKKQQTVTLLPAADLDDFSKQLQQSMSSADSTQA

SEQ ID NO: 776 - protein, 671 aa, Artificial Sequence
  Description of Artificial Sequence: Synthetic polypeptide
MHHHHHHGGSGSPILGYWKIKGLVQPTRLLLEYLEEKYEEHLYERDEGDKWRNKKFELGLEFPNLPYYIDGDVKLTQSMAIIRYIADKHNMLGGCPKERAEISMLEGAVLDIRYGVSRIAYSKDFETLKVDFLSKLPEMLKMFEDRLCHKTYLNGDHVTHPDFMLYDALDVVLYMDPMCLDAFPKLVCFKKRIEAIPQIDKYLKSSKYIAWPLQGWQATFGGGDHPPKSDLVPRGSPGIHRDGGSGENLYFQSSDNGPQNQRNAPRITFGGPSDSTGSNQNGERSGARSKQRRPQGLPNNTASWFTALTQHGKEDLKFPRGQGVPINTNSSPDDQIGYYRRATRRIRGGDGKRKDLSPRWYFYYLGTGPEAGLPYGANKDGIIWVATEGALNTPKDHIGTRNPANNAAIVLQLPQGTTLPKGFYAEGSRGGSQASSRSSSRSRNSSRNSTPGSSRGTSPARMAGNGGDAALALLLLDRLNQLESKMSGKGQQQQGQTVTKKSAAEASKKPRQKRTATKAYNVTQAFGRRGPEQTQGNFGDQELIRQGTDYKHWPQIAQFAPSASAFFGMSRIGMEVTPSGTWLTYTGAIKLDDKDPNFKDQVILLNKHIDAYKTFPPTEPKKDKKKKADETQALPQRQKKQQTVTLLPAADLDDFSKQLQQSMSSADSTQA

SEQ ID NO: 777 - protein, 671 aa, Artificial Sequence
  Description of Artificial Sequence: Synthetic polypeptide
MHHHHHHGGSGSPILGYWKIKGLVQPTRLLLEYLEEKYEEHLYERDEGDKWRNKKFELGLEFPNLPYYIDGDVKLTQSMAIIRYIADKHNMLGGCPKERAEISMLEGAVLDIRYGVSRIAYSKDFETLKVDFLSKLPEMLKMFEDRLCHKTYLNGDHVTHPDFMLYDALDVVLYMDPMCLDAFPKLVCFKKRIEAIPQIDKYLKSSKYIAWPLQGWQATFGGGDHPPKSDLVPRGSPGIHRDGGSGENLYFQSSDNGPQNQRNAPRITFGGPSDSTGSNQNGERSGARSKQRRPQGLPNNTASWFTALTQHGKEDLKFPRGQGVPINTNSSPDDQIGYYRRATRRIRGGDGKMKDLSPRWYFYYLGTGPEAGLPYGANKDGIIWVATEGALNTPKDHIGTRNPANNAAIVLQLPQGTTLPKGFYAEGSRGGSQASSRSSSRSRNSSRNSTPGSSRGTSPARMAGNGGDAALALLLLDRLNQLESKMSGKGQQQQGQTVTKKSAAEASKKPRQKRTATKAYNVTQAFGRRGPEQTQGNFGDQELIRQGTDYKHWPQIAQFAPSASAFFGMSRIGMEVTPSGTWLTYTGAIKLDDKNPNFKDQVILLNKHIDAYKTFPPTEPKKDKKKKADETQALPQRQKKQQTVTLLPAADLDDFSKQLQQSMSSADSTQA

SEQ ID NO: 778 - protein, 671 aa, Artificial Sequence
  Description of Artificial Sequence: Synthetic polypeptide
MHHHHHHGGSGSPILGYWKIKGLVQPTRLLLEYLEEKYEEHLYERDEGDKWRNKKFELGLEFPNLPYYIDGDVKLTQSMAIIRYIADKHNMLGGCPKERAEISMLEGAVLDIRYGVSRIAYSKDFETLKVDFLSKLPEMLKMFEDRLCHKTYLNGDHVTHPDFMLYDALDVVLYMDPMCLDAFPKLVCFKKRIEAIPQIDKYLKSSKYIAWPLQGWQATFGGGDHPPKSDLVPRGSPGIHRDGGSGENLYFQSSDNGPQNQRNAPRITFGGPSDSTGSNQNGERSGARSKQRRPQGLPNNTASWFTALTQHGKEDLKFPRGQGVPINTNSSPDDQIGYYRRATRRIRGGDGKMKDLSPRWYFYYLGTGPEAELPYGANKDGIIWVATEGALNTPKDHIGTRNPANNAAIVLQLPQGTTLPKGFYAEGSRGGSQASSRSSSRSRNSSRNSTPGSSRGTSPARMAGNGGDAALALLLLDRLNQLESKMSGKGQQQQGQTVTKKSAAEASKKPRQKRTATKAYNVTQAFGRRGPEQTQGNFGDQELIRQGTDYKHWPQIAQFAPSASAFFGMSRIGMEVTPSGTWLTYTGAIKLDDKDPNFKDQVILLNKHIDAYKTFPPTEPKKDKKKKADETQALPQRQKKQQTVTLLPAADLDDFSKQLQQSMSSADSTQA

SEQ ID NO: 779 - protein, 671 aa, Artificial Sequence
  Description of Artificial Sequence: Synthetic polypeptide
MHHHHHHGGSGSPILGYWKIKGLVQPTRLLLEYLEEKYEEHLYERDEGDKWRNKKFELGLEFPNLPYYIDGDVKLTQSMAIIRYIADKHNMLGGCPKERAEISMLEGAVLDIRYGVSRIAYSKDFETLKVDFLSKLPEMLKMFEDRLCHKTYLNGDHVTHPDFMLYDALDVVLYMDPMCLDAFPKLVCFKKRIEAIPQIDKYLKSSKYIAWPLQGWQATFGGGDHPPKSDLVPRGSPGIHRDGGSGENLYFQSSDNGPQNQRNAPRITFGGPSDSTGSNQNGERSGARSKQRRPQGLPNNTASWFTALTQHGKEDLKFPRGQGVPINTNSSPDDQIGYYRRAQRRIRGGDGKMKDLSPRWYFYYLGTGPEAGLPYGANKDGIIWVATEGALNTPKDHIGTRNPANNAAIVLQLPQGTTLPKGFYAEGSRGGSQASSRSSSRSRNSSRNSTPGSSRGTSPARMAGNGGDAALALLLLDRLNQLESKMSGKGQQQQGQTVTKKSAAEASKKPRQKRTATKAYNVTQAFGRRGPEQTQGNFGDQELIRQGTDYKHWPQIAQFAPSASAFFGMSRIGMEVTPSGTWLTYTGAIKLDDKDPNFKDQVILLNKHIDAYKTFPPTEPKKDKKKKADETQALPQRQKKQQTVTLLPAADLDDFSKQLQQSMSSADSTQA

SEQ ID NO: 780 - protein, 671 aa, Artificial Sequence
  Description of Artificial Sequence: Synthetic polypeptide
MHHHHHHGGSGSPILGYWKIKGLVQPTRLLLEYLEEKYEEHLYERDEGDKWRNKKFELGLEFPNLPYYIDGDVKLTQSMAIIRYIADKHNMLGGCPKERAEISMLEGAVLDIRYGVSRIAYSKDFETLKVDFLSKLPEMLKMFEDRLCHKTYLNGDHVTHPDFMLYDALDVVLYMDPMCLDAFPKLVCFKKRIEAIPQIDKYLKSSKYIAWPLQGWQATFGGGDHPPKSDLVPRGSPGIHRDGGSGENLYFQSSDNGPQNQRNAPRITFGGPSDSTGSNQNGERSGARSKQRRPQGLPNNTASWFTALTQHGKEDLKFPRGQGVPINTNSSPDDQIGYYRRATRRIRGGDGKMKDLSPRWYFYYLGTGPEAGLPYGANKDGIIWVATEGALNTPKDHIGTRNPANNAAIVLQLPQGTTLPKGFYAEGSRGGSQASSRSSSRSRNSSRNSTPGSSRGTSPARMAGNGGDAALALLLLDRLNQLESKMSGKGQQQQGQTVTKKSAAEASKKPRQKRTATKAYNVTQAFGRRGPEQTQGNFGDQELIRQGTDYKHWPQIAQFAPSASAFFGMSRIGMEVTPSGTWLTYTGAIKLDDKDPNFRDQVILLNKHIDAYKTFPPTEPKKDKKKKADETQALPQRQKKQQTVTLLPAADLDDFSKQLQQSMSSADSTQA

SEQ ID NO: 781 - protein, 671 aa, Artificial Sequence
  Description of Artificial Sequence: Synthetic polypeptide
MHHHHHHGGSGSPILGYWKIKGLVQPTRLLLEYLEEKYEEHLYERDEGDKWRNKKFELGLEFPNLPYYIDGDVKLTQSMAIIRYIADKHNMLGGCPKERAEISMLEGAVLDIRYGVSRIAYSKDFETLKVDFLSKLPEMLKMFEDRLCHKTYLNGDHVTHPDFMLYDALDVVLYMDPMCLDAFPKLVCFKKRIEAIPQIDKYLKSSKYIAWPLQGWQATFGGGDHPPKSDLVPRGSPGIHRDGGSGENLYFQSSDNGPQNQRNAPRITFGGPSDSTGSNQNGERSGARSKQRRPQGLPNNTASWFTALTQHGKEDLKFPRGQGVPINTNSSPDDQIGYYRRATRRIRGGDGKMKDLSPRWYFYYLGTGPEAGLPYGANKDGIIWVATEGALNTPKDHIGTRNPANNQAIVLQLPQGTTLPKGFYAEGSRGGSQASSRSSSRSRNSSRNSTPGSSRGTSPARMAGNGGDAALALLLLDRLNQLESKMSGKGQQQQGQTVTKKSAAEASKKPRQKRTATKAYNVTQAFGRRGPEQTQGNFGDQELIRQGTDYKHWPQIAQFAPSASAFFGMSRIGMEVTPSGTWLTYTGAIKLDDKDPNFKDQVILLNKHIDAYKTFPPTEPKKDKKKKADETQALPQRQKKQQTVTLLPAADLDDFSKQLQQSMSSADSTQA

SEQ ID NO: 782 - protein, 671 aa, Artificial Sequence
  Description of Artificial Sequence: Synthetic polypeptide
MHHHHHHGGSGSPILGYWKIKGLVQPTRLLLEYLEEKYEEHLYERDEGDKWRNKKFELGLEFPNLPYYIDGDVKLTQSMAIIRYIADKHNMLGGCPKERAEISMLEGAVLDIRYGVSRIAYSKDFETLKVDFLSKLPEMLKMFEDRLCHKTYLNGDHVTHPDFMLYDALDVVLYMDPMCLDAFPKLVCFKKRIEAIPQIDKYLKSSKYIAWPLQGWQATFGGGDHPPKSDLVPRGSPGIHRDGGSGENLYFQSSDNGPQNQRNAPRITFGGPSDSTGSNQNGERSGARSKQRRPQGLPNNTASWFTALTQHGKEDLKFPRGQGVPINTNSSPDDQIGYYRRATRRIRGGDGKMKDLSPRWYFYYLGTGPEAGLPYGANKDGIIWVATEGALNTPKDHIGTRNPANNAAIVLQLPQGTTLPKGFYAEGSRGGSQASSRSSSRSRNSSRNSTPGSSRGTSPARMAGNGGDAALALLLLDRLNQLESKMSGKGQQQQGQTVTKKSAAEASKKPRQKRTATKAYNVTQAFGLRGPEQTQGNFGDQELIRQGTDYKHWPQIAQFAPSASAFFGMSRIGMEVTPSGTWLTYTGAIKLDDKDPNFKDQVILLNKHIDAYKTFPPTEPKKDKKKKADETQALPQRQKKQQTVTLLPAADLDDFSKQLQQSMSSADSTQA

SEQ ID NO: 783 - protein, 671 aa, Artificial Sequence
  Description of Artificial Sequence: Synthetic polypeptide
MHHHHHHGGSGSPILGYWKIKGLVQPTRLLLEYLEEKYEEHLYERDEGDKWRNKKFELGLEFPNLPYYIDGDVKLTQSMAIIRYIADKHNMLGGCPKERAEISMLEGAVLDIRYGVSRIAYSKDFETLKVDFLSKLPEMLKMFEDRLCHKTYLNGDHVTHPDFMLYDALDVVLYMDPMCLDAFPKLVCFKKRIEAIPQIDKYLKSSKYIAWPLQGWQATFGGGDHPPKSDLVPRGSPGIHRDGGSGENLYFQSSDNGPQNQRNAPRITFGGPSDSTGSNQNGERSGARSKQRRPQGLPNNTASWFTALTQHGKEDLKFPRGQGVPINTNSSPDDQIGYYRRATRRIRGGDGKMKDLSPRWYFYYLGTGPEAGLPYGENKDGIIWVATEGALNTPKDHIGTRNPANNAAIVLQLPQGTTLPKGFYAEGSRGGSQASSRSSSRSRNSSRNSTPGSSRGTSPARMAGNGGDAALALLLLDRLNQLESKMSGKGQQQQGQTVTKKSAAEASKKPRQKRTATKAYNVTQAFGRRGPEQTQGNFGDQELIRQGTDYKHWPQIAQFAPSASAFFGMSRIGMEVTPSGTWLTYTGAIKLDDKDPNFKDQVILLNKHIDAYKTFPPTEPKKDKKKKADETQALPQRQKKQQTVTLLPAADLDDFSKQLQQSMSSADSTQA

SEQ ID NO: 784 - protein, 671 aa, Artificial Sequence
  Description of Artificial Sequence: Synthetic polypeptide
MHHHHHHGGSGSPILGYWKIKGLVQPTRLLLEYLEEKYEEHLYERDEGDKWRNKKFELGLEFPNLPYYIDGDVKLTQSMAIIRYIADKHNMLGGCPKERAEISMLEGAVLDIRYGVSRIAYSKDFETLKVDFLSKLPEMLKMFEDRLCHKTYLNGDHVTHPDFMLYDALDVVLYMDPMCLDAFPKLVCFKKRIEAIPQIDKYLKSSKYIAWPLQGWQATFGGGDHPPKSDLVPRGSPGIHRDGGSGENLYFQSSDNGPQNQRNAPRITFGGPSDSTGSNQNGERSGARSKQRRPQGLPNNTASWFTALTQHGKEDLKFPRGQGVPINTNSSPDDQIGYYRRATRRVRGGDGKMKDLSPRWYFYYLGTGPEAGLPYGANKDGIIWVATEGALNTPKDHIGTRNPANNAAIVLQLPQGTTLPKGFYAEGSRGGSQASSRSSSRSRNSSRNSTPGSSRGTSPARMAGNGGDAALALLLLDRLNQLESKMSGKGQQQQGQTVTKKSAAEASKKPRQKRTATKAYNVTQAFGRRGPEQTQGNFGDQELIRQGTDYKHWPQIAQFAPSASAFFGMSRIGMEVTPSGTWLTYTGAIKLDDKDPNFKDQVILLNKHIDAYKTFPPTEPKKDKKKKADETQALPQRQKKQQTVTLLPAADLDDFSKQLQQSMSSADSTQA

SEQ ID NO: 785 - protein, 671 aa, Artificial Sequence
  Description of Artificial Sequence: Synthetic polypeptide
MHHHHHHGGSGSPILGYWKIKGLVQPTRLLLEYLEEKYEEHLYERDEGDKWRNKKFELGLEFPNLPYYIDGDVKLTQSMAIIRYIADKHNMLGGCPKERAEISMLEGAVLDIRYGVSRIAYSKDFETLKVDFLSKLPEMLKMFEDRLCHKTYLNGDHVTHPDFMLYDALDVVLYMDPMCLDAFPKLVCFKKRIEAIPQIDKYLKSSKYIAWPLQGWQATFGGGDHPPKSDLVPRGSPGIHRDGGSGENLYFQSSDNGPQNQRNAPRITFGGPSDSTGSNQNGERSGARSKQRRPQGLPNNTASWFTALTQHGKEDLKFPRGQGVPINTNSSPDDQIGYYRRATRRIRGGDGKMKDLSPRWYFYYLGTGPEAGLPYGANKDGIIWVATEGAKNTPKDHIGTRNPANNAAIVLQLPQGTTLPKGFYAEGSRGGSQASSRSSSRSRNSSRNSTPGSSRGTSPARMAGNGGDAALALLLLDRLNQLESKMSGKGQQQQGQTVTKKSAAEASKKPRQKRTATKAYNVTQAFGRRGPEQTQGNFGDQELIRQGTDYKHWPQIAQFAPSASAFFGMSRIGMEVTPSGTWLTYTGAIKLDDKDPNFKDQVILLNKHIDAYKTFPPTEPKKDKKKKADETQALPQRQKKQQTVTLLPAADLDDFSKQLQQSMSSADSTQA

SEQ ID NO: 786 - protein, 671 aa, Artificial Sequence
  Description of Artificial Sequence: Synthetic polypeptide
MHHHHHHGGSGSPILGYWKIKGLVQPTRLLLEYLEEKYEEHLYERDEGDKWRNKKFELGLEFPNLPYYIDGDVKLTQSMAIIRYIADKHNMLGGCPKERAEISMLEGAVLDIRYGVSRIAYSKDFETLKVDFLSKLPEMLKMFEDRLCHKTYLNGDHVTHPDFMLYDALDVVLYMDPMCLDAFPKLVCFKKRIEAIPQIDKYLKSSKYIAWPLQGWQATFGGGDHPPKSDLVPRGSPGIHRDGGSGENLYFQSSDNGPQNQRNAPRITFGGPSDSTGSNQNGERSGARSKQRRPQGLPNNTASWFTALTQHGKEDLKFPRGQGVPINTNSSPDDQIGYYRRATRRIRGGDGKMKDLSPRWYFYYLGTGPEAGLPYGANKDGIIWVATEGALNTPKDHIGTRNPANNAAIVLQLPQGTTLPKGFYAEGSRGGSQASSRSSSRSRNSSRNSTPGSSRGTSPARMAGNGGDAALALLLLDRLNQLESKMSGKGQQQQGQTVTKKSAAEASKKPRQKRTATKDYNVTQAFGRRGPEQTQGNFGDQDLNKLGTDYKHWPQIAQFAPSASAFFGMSRISTRETPSGTWLTYTGAIKLDKKDPNFKDQVILLNKHIDAYKTFPPTEPKKDKKKKADETQALPQRQKKQQTVTLLPAADLDDFSKQLQQSMSSADSTQA

SEQ ID NO: 787 - protein, 671 aa, Artificial Sequence
  Description of Artificial Sequence: Synthetic polypeptide
MHHHHHHGGSGSPILGYWKIKGLVQPTRLLLEYLEEKYEEHLYERDEGDKWRNKKFELGLEFPNLPYYIDGDVKLTQSMAIIRYIADKHNMLGGCPKERAEISMLEGAVLDIRYGVSRIAYSKDFETLKVDFLSKLPEMLKMFEDRLCHKTYLNGDHVTHPDFMLYDALDVVLYMDPMCLDAFPKLVCFKKRIEAIPQIDKYLKSSKYIAWPLQGWQATFGGGDHPPKSDLVPRGSPGIHRDGGSGENLYFQSSDNGPQNQRNAPRITFGGPSDSTGSNQNGERSGARSKQRRPQGLPNNTASWFTALTQHGKEDLKFPRGQGVPINTNSSPDDQIGRYRRATRRIRGGDGKMKDLSPRWYFYYLGTGPEAGLPYGANKDGIIWVATEGALNTPKDHIGTRNPANNAAIVLQLPQGTTLPKGFYAEGSRGGSQASSRSSSRSRNSSRNSTPGSSRGTSPARMAGNGGDAALALLLLDRLNQLESKMSGKGQQQQGQTVTKKSAAEASKKPRQKRTATKAYNVTQAFGRRGPEQTQGNFGDQELIRQGTDYKHWPQIAQFAPSASAFFGMSRIGMEVTPSGTWLTYTGAIKLDDKDPNFKDQVILLNKHIDAYKTFPPTEPKKDKKKKADETQALPQRQKKQQTVTLLPAADLDDFSKQLQQSMSSADSTQA

SEQ ID NO: 788 - protein, 671 aa, Artificial Sequence
  Description of Artificial Sequence: Synthetic polypeptide
MHHHHHHGGSGSPILGYWKIKGLVQPTRLLLEYLEEKYEEHLYERDEGDKWRNKKFELGLEFPNLPYYIDGDVKLTQSMAIIRYIADKHNMLGGCPKERAEISMLEGAVLDIRYGVSRIAYSKDFETLKVDFLSKLPEMLKMFEDRLCHKTYLNGDHVTHPDFMLYDALDVVLYMDPMCLDAFPKLVCFKKRIEAIPQIDKYLKSSKYIAWPLQGWQATFGGGDHPPKSDLVPRGSPGIHRDGGSGENLYFQSSDNGPQNQRNAPRITFGGPSDSTGSNQNGERSGARSKQRRPQGLPNNTASWFTPLTQHGKEDLKFPPGQGVPINTNSSPDDQIGYYRRATRRIRGGDGKMKDLPPRWYFYYLGTGPEADLPYGQVKPGIFWVAEEGALNTPKDHIGTRNPANNAAIPLQLPPGTTLPKGFYAEGSRGGSQASSRSSSRSRNSSRNSTPGSSRGTSPARMAGNGGDAALALLLLDRLNQLESKMSGKGQQQQGQTVTKKSAAEASKKPRQKRTATKAYNVTQAFGRRGPEQTQGNFGDQELIRQGTDYKHWPQIAQFAPSASAFFGMSRIGMEVTPSGTWLTYTGAIKLDDKDPNFKDQVILLNKHIDAYKTFPPTEPKKDKKKKADETQALPQRQKKQQTVTLLPAADLDDFSKQLQQSMSSADSTQA

SEQ ID NO: 789 - protein, 671 aa, Artificial Sequence
  Description of Artificial Sequence: Synthetic polypeptide
MHHHHHHGGSGSPILGYWKIKGLVQPTRLLLEYLEEKYEEHLYERDEGDKWRNKKFELGLEFPNLPYYIDGDVKLTQSMAIIRYIADKHNMLGGCPKERAEISMLEGAVLDIRYGVSRIAYSKDFETLKVDFLSKLPEMLKMFEDRLCHKTYLNGDHVTHPDFMLYDALDVVLYMDPMCLDAFPKLVCFKKRIEAIPQIDKYLKSSKYIAWPLQGWQATFGGGDHPPKSDLVPRGSPGIHRDGGSGENLYFQSSDNGPQNQRNAPRITFGGPSDSTGSNQNGERSGARSKQRRPQGLPNNTASWFTALTQHGKEDLKFPRGQGVPINTNSSPDDQIGYYRRATRRIRGGDGKMKDLSPRWYFYYLGTGPEAGLPYGANKDGIIWVATEGALNTPKDHIGTRNPANNAAIVLQLPQGTTLPKGFYAEGSRGGSQASSRSSSRSRNSSRNSTPGSSRGTSPARMAGNGGDAALALLLLDRLNQLESKMSGKGQQQQGQTVTKKSAAEASKKPRQKRTATKAYNVTQAFGRRGPEQTQGNFGDQELIRQGTDYKQWPQIAQFAPSASAFFGMSRIGMEVTPSGTWLTYTGAIKLDDKDPNFKDQVILLNKHIDAYKTFPPTEPKKDKKKKADETQALPQRQKKQQTVTLLPAADLDDFSKQLQQSMSSADSTQA

SEQ ID NO: 790 - protein, 671 aa, Artificial Sequence
  Description of Artificial Sequence: Synthetic polypeptide
MHHHHHHGGSGSPILGYWKIKGLVQPTRLLLEYLEEKYEEHLYERDEGDKWRNKKFELGLEFPNLPYYIDGDVKLTQSMAIIRYIADKHNMLGGCPKERAEISMLEGAVLDIRYGVSRIAYSKDFETLKVDFLSKLPEMLKMFEDRLCHKTYLNGDHVTHPDFMLYDALDVVLYMDPMCLDAFPKLVCFKKRIEAIPQIDKYLKSSKYIAWPLQGWQATFGGGDHPPKSDLVPRGSPGIHRDGGSGENLYFQSSDNGPQNQRNAPRITFGGPSDSTGSNQNGERSGARSKQRRPQGLPNNTASWFTALTQHGKEDLKFPRGQGVPINTNSSPDDQIGYYRRATRRIRGGDGKMKDLSPRWYFYYLGTGPEAGLPYGANKDGIIWVATEGALNTPKDHIGTRNPANNAAQVLQLPQGTTLPKGFYAEGSRGGSQASSRSSSRSRNSSRNSTPGSSRGTSPARMAGNGGDAALALLLLDRLNQLESKMSGKGQQQQGQTVTKKSAAEASKKPRQKRTATKAYNVTQAFGRRGPEQTQGNFGDQELIRQGTDYKHWPQIAQFAPSASAFFGMSRIGMEVTPSGTWLTYTGAIKLDDKDPNFKDQVILLNKHIDAYKTFPPTEPKKDKKKKADETQALPQRQKKQQTVTLLPAADLDDFSKQLQQSMSSADSTQA

SEQ ID NO: 791 - protein, 671 aa, Artificial Sequence
  Description of Artificial Sequence: Synthetic polypeptide
MHHHHHHGGSGSPILGYWKIKGLVQPTRLLLEYLEEKYEEHLYERDEGDKWRNKKFELGLEFPNLPYYIDGDVKLTQSMAIIRYIADKHNMLGGCPKERAEISMLEGAVLDIRYGVSRIAYSKDFETLKVDFLSKLPEMLKMFEDRLCHKTYLNGDHVTHPDFMLYDALDVVLYMDPMCLDAFPKLVCFKKRIEAIPQIDKYLKSSKYIAWPLQGWQATFGGGDHPPKSDLVPRGSPGIHRDGGSGENLYFQSSDNGPQNQRNAPRITFGGPSDSTGSNQNGERSGARSKQRRPQGLPNNTASWFTALTQHGKEDLKFPRGQGVPINTNSSPDDQIGYYRRATRRIRGGDGKMKDLSPAWYFYYLGTGPEAGLPYGANKDGIIWVATEGALNTPKDHIGTRNPANNAAIVLQLPQGTTLPKGFYAEGSRGGSQASSRSSSRSRNSSRNSTPGSSRGTSPARMAGNGGDAALALLLLDRLNQLESKMSGKGQQQQGQTVTKKSAAEASKKPRQKRTATKAYNVTQAFGRRGPEQTQGNFGDQELIRQGTDYKHWPQIAQFAPSASAFFGMSRIGMEVTPSGTWLTYTGAIKLDDKDPNFKDQVILLNKHIDAYKTFPPTEPKKDKKKKADETQALPQRQKKQQTVTLLPAADLDDFSKQLQQSMSSADSTQA

SEQ ID NO: 792 - protein, 671 aa, Artificial Sequence
  Description of Artificial Sequence: Synthetic polypeptide
MHHHHHHGGSGSPILGYWKIKGLVQPTRLLLEYLEEKYEEHLYERDEGDKWRNKKFELGLEFPNLPYYIDGDVKLTQSMAIIRYIADKHNMLGGCPKERAEISMLEGAVLDIRYGVSRIAYSKDFETLKVDFLSKLPEMLKMFEDRLCHKTYLNGDHVTHPDFMLYDALDVVLYMDPMCLDAFPKLVCFKKRIEAIPQIDKYLKSSKYIAWPLQGWQATFGGGDHPPKSDLVPRGSPGIHRDGGSGENLYFQSSDNGPQNQRNAPRITFGGPSDSTGSNQNGERSGARSKQRRPQGLPNNTASWFTPLTQHGKEDLKFPPGQGVPINTNSSPDDQIGYYRRATRRIRGGDGKMKDLPPRWYFYYLGTGPEADLPYGQVKDGIFWVAAEGALNTPKDHIGTRNPANNAAIPLQLPPGTTLPKGFYAEGSRGGSQASSRSSSRSRNSSRNSTPGSSRGTSPARMAGNGGDAALALLLLDRLNQLESKMSGKGQQQQGQTVTKKSAAEASKKPRQKRTATKAYNVTQAFGRRGPEQTQGNFGDQELIRQGTDYKHWPQIAQFAPSASAFFGMSRIGMEVTPSGTWLTYTGAIKLDDKDPNFKDQVILLNKHIDAYKTFPPTEPKKDKKKKADETQALPQRQKKQQTVTLLPAADLDDFSKQLQQSMSSADSTQA

SEQ ID NO: 793 - protein, 671 aa, Artificial Sequence
  Description of Artificial Sequence: Synthetic polypeptide
MHHHHHHGGSGSPILGYWKIKGLVQPTRLLLEYLEEKYEEHLYERDEGDKWRNKKFELGLEFPNLPYYIDGDVKLTQSMAIIRYIADKHNMLGGCPKERAEISMLEGAVLDIRYGVSRIAYSKDFETLKVDFLSKLPEMLKMFEDRLCHKTYLNGDHVTHPDFMLYDALDVVLYMDPMCLDAFPKLVCFKKRIEAIPQIDKYLKSSKYIAWPLQGWQATFGGGDHPPKSDLVPRGSPGIHRDGGSGENLYFQSSDNGPQNQRNAPRITFGGPSDSTGSNQNGERSGARSKQRRPQGLPNNTASWFTALTQHGKEDLKFPRGQGVPINTNSSPDDQIGYYRRATRRFRGGDGKMKDLSPRWYFYYLGTGPEAGLPYGANKDGIIWVATEGALNTPKDHIGTRNPANNAAIVLQLPQGTTLPKGFYAEGSRGGSQASSRSSSRSRNSSRNSTPGSSRGTSPARMAGNGGDAALALLLLDRLNQLESKMSGKGQQQQGQTVTKKSAAEASKKPRQKRTATKAYNVTQAFGRRGPEQTQGNFGDQELIRQGTDYKHWPQIAQFAPSASAFFGMSRIGMEVTPSGTWLTYTGAIKLDDKDPNFKDQVILLNKHIDAYKTFPPTEPKKDKKKKADETQALPQRQKKQQTVTLLPAADLDDFSKQLQQSMSSADSTQA

SEQ ID NO: 794 - protein, 671 aa, Artificial Sequence
  Description of Artificial Sequence: Synthetic polypeptide
MHHHHHHGGSGSPILGYWKIKGLVQPTRLLLEYLEEKYEEHLYERDEGDKWRNKKFELGLEFPNLPYYIDGDVKLTQSMAIIRYIADKHNMLGGCPKERAEISMLEGAVLDIRYGVSRIAYSKDFETLKVDFLSKLPEMLKMFEDRLCHKTYLNGDHVTHPDFMLYDALDVVLYMDPMCLDAFPKLVCFKKRIEAIPQIDKYLKSSKYIAWPLQGWQATFGGGDHPPKSDLVPRGSPGIHRDGGSGENLYFQSSDNGPQNQRNAPRITFGGPSDSTGSNQNGERSGARSKQRRPQGLPNNTASWFTGLVQFGKEDLKFPPGQGVPINTNSSPDDQIGYYRRATRRIRGGDGKMKDLPPKWYFYYLGTGPHADLPYGQKQDGVFWVARPGALNTPKDHIGTRNPANNAAIPLQLPPGTKLPKGFYAEGSRGGSQASSRSSSRSRNSSRNSTPGSSRGTSPARMAGNGGDAALALLLLDRLNQLESKMSGKGQQQQGQTVTKKSAAEASKKPRQKRTATKAYNVTQAFGRRGPEQTQGNFGDQELIRQGTDYKHWPQIAQFAPSASAFFGMSRIGMEVTPSGTWLTYTGAIKLDDKDPNFKDQVILLNKHIDAYKTFPPTEPKKDKKKKADETQALPQRQKKQQTVTLLPAADLDDFSKQLQQSMSSADSTQA

SEQ ID NO: 795 - protein, 671 aa, Artificial Sequence
  Description of Artificial Sequence: Synthetic polypeptide
MHHHHHHGGSGSPILGYWKIKGLVQPTRLLLEYLEEKYEEHLYERDEGDKWRNKKFELGLEFPNLPYYIDGDVKLTQSMAIIRYIADKHNMLGGCPKERAEISMLEGAVLDIRYGVSRIAYSKDFETLKVDFLSKLPEMLKMFEDRLCHKTYLNGDHVTHPDFMLYDALDVVLYMDPMCLDAFPKLVCFKKRIEAIPQIDKYLKSSKYIAWPLQGWQATFGGGDHPPKSDLVPRGSPGIHRDGGSGENLYFQSSDNGPQNQRNAPRITFGGPSDSTGSNQNGERSGARSKQRRPQGLPNNTASWFTALTQHGKEDLKFPRGQGVPINTNSSPDDQIGYYRRATRRIRGGDGKMKDLSPRWYFYYLGTGPEAGLPYGANKDGIIWVATEGALNTPKDHIGTRNPANNAAMVLQLPQGTTLPKGFYAEGSRGGSQASSRSSSRSRNSSRNSTPGSSRGTSPARMAGNGGDAALALLLLDRLNQLESKMSGKGQQQQGQTVTKKSAAEASKKPRQKRTATKAYNVTQAFGRRGPEQTQGNFGDQELIRQGTDYKHWPQIAQFAPSASAFFGMSRIGMEVTPSGTWLTYTGAIKLDDKDPNFKDQVILLNKHIDAYKTFPPTEPKKDKKKKADETQALPQRQKKQQTVTLLPAADLDDFSKQLQQSMSSADSTQA

SEQ ID NO: 796 - protein, 671 aa, Artificial Sequence
  Description of Artificial Sequence: Synthetic polypeptide
MHHHHHHGGSGSPILGYWKIKGLVQPTRLLLEYLEEKYEEHLYERDEGDKWRNKKFELGLEFPNLPYYIDGDVKLTQSMAIIRYIADKHNMLGGCPKERAEISMLEGAVLDIRYGVSRIAYSKDFETLKVDFLSKLPEMLKMFEDRLCHKTYLNGDHVTHPDFMLYDALDVVLYMDPMCLDAFPKLVCFKKRIEAIPQIDKYLKSSKYIAWPLQGWQATFGGGDHPPKSDLVPRGSPGIHRDGGSGENLYFQSSDNGPQNQRNAPRITFGGPSDSTGSNQNGERSGARSKQRRPQGLPNNTASWFTALTQHGKEDLKFPRGQGVPINTNSSPDDQIGYYRRATRRIRGGDGKMKDLSPRWYFYYLGTGPEAGLPYGANKPGIIWVATEGALNTPKDHIGTRNPANNAAIVLQLPQGTTLPKGFYAEGSRGGSQASSRSSSRSRNSSRNSTPGSSRGTSPARMAGNGGDAALALLLLDRLNQLESKMSGKGQQQQGQTVTKKSAAEASKKPRQKRTATKAYNVTQAFGRRGPEQTQGNFGDQELIRQGTDYKHWPQIAQFAPSASAFFGMSRIGMEVTPSGTWLTYTGAIKLDDKDPNFKDQVILLNKHIDAYKTFPPTEPKKDKKKKADETQALPQRQKKQQTVTLLPAADLDDFSKQLQQSMSSADSTQA

SEQ ID NO: 797 - protein, 671 aa, Artificial Sequence
  Description of Artificial Sequence: Synthetic polypeptide
MHHHHHHGGSGSPILGYWKIKGLVQPTRLLLEYLEEKYEEHLYERDEGDKWRNKKFELGLEFPNLPYYIDGDVKLTQSMAIIRYIADKHNMLGGCPKERAEISMLEGAVLDIRYGVSRIAYSKDFETLKVDFLSKLPEMLKMFEDRLCHKTYLNGDHVTHPDFMLYDALDVVLYMDPMCLDAFPKLVCFKKRIEAIPQIDKYLKSSKYIAWPLQGWQATFGGGDHPPKSDLVPRGSPGIHRDGGSGENLYFQSSDNGPQNQRNAPRITFGGPSDSTGSNQNGERSGARSKQRRPQGLPNNTASWFTALTQHGKEDLKFPRGQGVPINTNSSPDDQIGYYRRATRRIRGGDGKMKDLSPRWYFYYLGTGPEAGLPYGANKDGIIWVATEGALNTPKDHIGTRNPANNAAIVLQLPQGTTLPKGFYAEGSRGGSQASSRSSSRSRNSSRNSTPGSSRGTSPARMAGNGGDAALALLLLDRLNQLESKMSGKGQQQQGQTVTKKSAAEASKKPRQKRTATKAYNVTQAFGRRGPEQTQGNFGDQELIRQGTDYKNWPQIAQFAPSASAFFGMSRIGMEVTPSGTWLTYTGAIKLDDKDPNFKDQVILLNKHIDAYKTFPPTEPKKDKKKKADETQALPQRQKKQQTVTLLPAADLDDFSKQLQQSMSSADSTQA

SEQ ID NO: 798 - protein, 671 aa, Artificial Sequence
  Description of Artificial Sequence: Synthetic polypeptide
MHHHHHHGGSGSPILGYWKIKGLVQPTRLLLEYLEEKYEEHLYERDEGDKWRNKKFELGLEFPNLPYYIDGDVKLTQSMAIIRYIADKHNMLGGCPKERAEISMLEGAVLDIRYGVSRIAYSKDFETLKVDFLSKLPEMLKMFEDRLCHKTYLNGDHVTHPDFMLYDALDVVLYMDPMCLDAFPKLVCFKKRIEAIPQIDKYLKSSKYIAWPLQGWQATFGGGDHPPKSDLVPRGSPGIHRDGGSGENLYFQSSDNGPQNQRNAPRITFGGPSDSTGSNQNGERSGARSKQRRPQGLPNNTASWFTALTQHGKEDLKFPKGQGVPINTNSKPDDQIGYYRRQTRRYRGGDGQMKDLDPRWYFYYLGTGPEAGLPYGANKDGIIWVATEGALNTPKDHIGTRNPANNAAIVLQLPQGTTLPKGFYAEGSRGGSQASSRSSSRSRNSSRNSTPGSSRGTSPARMAGNGGDAALALLLLDRLNQLESKMSGKGQQQQGQTVTKKSAAEASKKPRQKRTATKAYNVTQAFGRRGPEQTQGNFGDQELIRQGTDYKHWPQIAQFAPSASAFFGMSRIGMEVTPSGTWLTYTGAIKLDDKDPNFKDQVILLNKHIDAYKTFPPTEPKKDKKKKADETQALPQRQKKQQTVTLLPAADLDDFSKQLQQSMSSADSTQA

SEQ ID NO: 799 - protein, 671 aa, Artificial Sequence
  Description of Artificial Sequence: Synthetic polypeptide
MHHHHHHGGSGSPILGYWKIKGLVQPTRLLLEYLEEKYEEHLYERDEGDKWRNKKFELGLEFPNLPYYIDGDVKLTQSMAIIRYIADKHNMLGGCPKERAEISMLEGAVLDIRYGVSRIAYSKDFETLKVDFLSKLPEMLKMFEDRLCHKTYLNGDHVTHPDFMLYDALDVVLYMDPMCLDAFPKLVCFKKRIEAIPQIDKYLKSSKYIAWPLQGWQATFGGGDHPPKSDLVPRGSPGIHRDGGSGENLYFQSSDNGPQNQRNAPRITFGGPSDSTGSNQNGERSGARSKQRRPQGLPNNTASWFTALTQHGKEDLKFPRGQGVPINTNSSPDDQIGYYRRATRRIRGGDGKMKDLSPRWYFYYLGTGPEAGLPYGANKDGIIWVATEGALNTPKDHIGTRNPANNAAIVLQLPQGTTLPKGFYAEGSRGGSQASSRSSSRSRNSSRNSTPGSSRGTSPARMAGNGGDAALALLLLDRLNQLESKMSGKGQQQQGQTVTKKSAAEASKKPRQKRTATKAYNVTQAFGRRGPEQTQGNFGDQELIRQGTDYKHWPQIAQFAPSASAFFGMSRIGMECTPSGTWLTYTGAIKLDDKDPNFKDQVILLNKHIDAYKTFPPTEPKKDKKKKADETQALPQRQKKQQTVTLLPAADLDDFSKQLQQSMSSADSTQA

SEQ ID NO: 800 - protein, 671 aa, Artificial Sequence
  Description of Artificial Sequence: Synthetic polypeptide
MHHHHHHGGSGSPILGYWKIKGLVQPTRLLLEYLEEKYEEHLYERDEGDKWRNKKFELGLEFPNLPYYIDGDVKLTQSMAIIRYIADKHNMLGGCPKERAEISMLEGAVLDIRYGVSRIAYSKDFETLKVDFLSKLPEMLKMFEDRLCHKTYLNGDHVTHPDFMLYDALDVVLYMDPMCLDAFPKLVCFKKRIEAIPQIDKYLKSSKYIAWPLQGWQATFGGGDHPPKSDLVPRGSPGIHRDGGSGENLYFQSSDNGPQNQRNAPRITFGGPSDSTGSNQNGERSGARSKQRRPQGLPNNTASWFTPLTQFGKEDLKFPPGQGVPINTNSSPDDQIGYYRRATRRIRGGDGKMKDLPPKWYFYYLGTGPHADLPYGHKMDGVVWVARPGALNTPKDHIGTRNPANNAAIPLQLPPGTKLPKGFYAEGSRGGSQASSRSSSRSRNSSRNSTPGSSRGTSPARMAGNGGDAALALLLLDRLNQLESKMSGKGQQQQGQTVTKKSAAEASKKPRQKRTATKAYNVTQAFGRRGPEQTQGNFGDQELIRQGTDYKHWPQIAQFAPSASAFFGMSRIGMEVTPSGTWLTYTGAIKLDDKDPNFKDQVILLNKHIDAYKTFPPTEPKKDKKKKADETQALPQRQKKQQTVTLLPAADLDDFSKQLQQSMSSADSTQA

SEQ ID NO: 801 - protein, 671 aa, Artificial Sequence
  Description of Artificial Sequence: Synthetic polypeptide
MHHHHHHGGSGSPILGYWKIKGLVQPTRLLLEYLEEKYEEHLYERDEGDKWRNKKFELGLEFPNLPYYIDGDVKLTQSMAIIRYIADKHNMLGGCPKERAEISMLEGAVLDIRYGVSRIAYSKDFETLKVDFLSKLPEMLKMFEDRLCHKTYLNGDHVTHPDFMLYDALDVVLYMDPMCLDAFPKLVCFKKRIEAIPQIDKYLKSSKYIAWPLQGWQATFGGGDHPPKSDLVPRGSPGIHRDGGSGENLYFQSSDNGPQNQRNAPRITFGGPSDSTGSNQNGERSGARSKQRRPQGLPNNTASWFTALTQHGKEDLKFPRGQGVPINTNSSPDDQIGYYRRVTRRIRGGDGKMKDLSPRWYFYYLGTGPEAGLPYGANKDGIIWVATEGALNTPKDHIGTRNPANNAAIVLQLPQGTTLPKGFYAEGSRGGSQASSRSSSRSRNSSRNSTPGSSRGTSPARMAGNGGDAALALLLLDRLNQLESKMSGKGQQQQGQTVTKKSAAEASKKPRQKRTATKAYNVTQAFGRRGPEQTQGNFGDQELIRQGTDYKHWPQIAQFAPSASAFFGMSRIGMEVTPSGTWLTYTGAIKLDDKDPNFKDQVILLNKHIDAYKTFPPTEPKKDKKKKADETQALPQRQKKQQTVTLLPAADLDDFSKQLQQSMSSADSTQA

SEQ ID NO: 802 - protein, 671 aa, Artificial Sequence
  Description of Artificial Sequence: Synthetic polypeptide
MHHHHHHGGSGSPILGYWKIKGLVQPTRLLLEYLEEKYEEHLYERDEGDKWRNKKFELGLEFPNLPYYIDGDVKLTQSMAIIRYIADKHNMLGGCPKERAEISMLEGAVLDIRYGVSRIAYSKDFETLKVDFLSKLPEMLKMFEDRLCHKTYLNGDHVTHPDFMLYDALDVVLYMDPMCLDAFPKLVCFKKRIEAIPQIDKYLKSSKYIAWPLQGWQATFGGGDHPPKSDLVPRGSPGIHRDGGSGENLYFQSSDNGPQNQRNAPRITFGGPSDSTGSNQNGERSGARSKQRRPQGLPNNTASWFTALTQHGKEDLKFPRGQGVPINTNSSPDDQIGYYRRATRRIRGGDGKMKDLSPYWYFYYLGTGPEAGLPYGANKDGIIWVATEGALNTPKDHIGTRNPANNAAIVLQLPQGTTLPKGFYAEGSRGGSQASSRSSSRSRNSSRNSTPGSSRGTSPARMAGNGGDAALALLLLDRLNQLESKMSGKGQQQQGQTVTKKSAAEASKKPRQKRTATKAYNVTQAFGRRGPEQTQGNFGDQELIRQGTDYKHWPQIAQFAPSASAFFGMSRIGMEVTPSGTWLTYTGAIKLDDKDPNFKDQVILLNKHIDAYKTFPPTEPKKDKKKKADETQALPQRQKKQQTVTLLPAADLDDFSKQLQQSMSSADSTQA

SEQ ID NO: 803 - protein, 671 aa, Artificial Sequence
  Description of Artificial Sequence: Synthetic polypeptide
MHHHHHHGGSGSPILGYWKIKGLVQPTRLLLEYLEEKYEEHLYERDEGDKWRNKKFELGLEFPNLPYYIDGDVKLTQSMAIIRYIADKHNMLGGCPKERAEISMLEGAVLDIRYGVSRIAYSKDFETLKVDFLSKLPEMLKMFEDRLCHKTYLNGDHVTHPDFMLYDALDVVLYMDPMCLDAFPKLVCFKKRIEAIPQIDKYLKSSKYIAWPLQGWQATFGGGDHPPKSDLVPRGSPGIHRDGGSGENLYFQSSDNGPQNQRNAPRITFGGPSDSTGSNQNGERSGARSKQRRPQGLPNNTASWFTALTQHGKEDLKFPPGQGVPINPNSKPDDQIGYYRREVRRYRGGDGQMKDLPPRWYFYYLGTGPEAGLPYGANKDGIIWVATEGALNTPKDHIGTRNPANNAAIVLQLPQGTTLPKGFYAEGSRGGSQASSRSSSRSRNSSRNSTPGSSRGTSPARMAGNGGDAALALLLLDRLNQLESKMSGKGQQQQGQTVTKKSAAEASKKPRQKRTATKAYNVTQAFGRRGPEQTQGNFGDQELIRQGTDYKHWPQIAQFAPSASAFFGMSRIGMEVTPSGTWLTYTGAIKLDDKDPNFKDQVILLNKHIDAYKTFPPTEPKKDKKKKADETQALPQRQKKQQTVTLLPAADLDDFSKQLQQSMSSADSTQA

SEQ ID NO: 804 - protein, 671 aa, Artificial Sequence
  Description of Artificial Sequence: Synthetic polypeptide
MHHHHHHGGSGSPILGYWKIKGLVQPTRLLLEYLEEKYEEHLYERDEGDKWRNKKFELGLEFPNLPYYIDGDVKLTQSMAIIRYIADKHNMLGGCPKERAEISMLEGAVLDIRYGVSRIAYSKDFETLKVDFLSKLPEMLKMFEDRLCHKTYLNGDHVTHPDFMLYDALDVVLYMDPMCLDAFPKLVCFKKRIEAIPQIDKYLKSSKYIAWPLQGWQATFGGGDHPPKSDLVPRGSPGIHRDGGSGENLYFQSSDNGPQNQRNAPRITFGGPSDSTGSNQNGERSGARSKQRRPQGLPNNTASWFTALTQHGKEDLKFPRGQGVPINTNSSPDDQIGYYRRATRRIRGGDGKMKDLSPRWYFYYLGTGPEAGLPYGANKDGIIWVATEGALNTPKDHIGTRNPANNAAIVLQLPQGTTLPKGFYAEGSRGGSQASSRSSSRSRNSSRNSTPGSSRGTSPARMAGNGGDAALALLLLDRLNQLESKMSGKGQQQQGQTVTKKSAAEMSKKPRQKRTATKGCNVTQCFGPRGPEQTQGNFGDAELIKKGTDYKHWPQIAQFAPSASAFFGMSRISSKEQPSGTWLTYTGAIKLDKDDPNFKDQVILLNKHIDAYKTFPPTEPKKDKKKKADETQALPQRQKKQQTVTLLPAADLDDFSKQLQQSMSSADSTQA

SEQ ID NO: 805 - protein, 671 aa, Artificial Sequence
  Description of Artificial Sequence: Synthetic polypeptide
MHHHHHHGGSGSPILGYWKIKGLVQPTRLLLEYLEEKYEEHLYERDEGDKWRNKKFELGLEFPNLPYYIDGDVKLTQSMAIIRYIADKHNMLGGCPKERAEISMLEGAVLDIRYGVSRIAYSKDFETLKVDFLSKLPEMLKMFEDRLCHKTYLNGDHVTHPDFMLYDALDVVLYMDPMCLDAFPKLVCFKKRIEAIPQIDKYLKSSKYIAWPLQGWQATFGGGDHPPKSDLVPRGSPGIHRDGGSGENLYFQSSDNGPQNQRNAPRITFGGPSDSTGSNQNGERSGARSKQRRPQGLPNNTASWFTALTQHGKEDLKFPRGQGVPINTNSSPDDQIGYYRRATRRIRGGDGKMKDLSPRWYFYYLGTGPEASLPYGANKDGIIWVATEGALNTPKDHIGTRNPANNAAIVLQLPQGTTLPKGFYAEGSRGGSQASSRSSSRSRNSSRNSTPGSSRGTSPARMAGNGGDAALALLLLDRLNQLESKMSGKGQQQQGQTVTKKSAAEASKKPRQKRTATKAYNVTQAFGRRGPEQTQGNFGDQELIRQGTDYKHWPQIAQFAPSASAFFGMSRIGMEVTPSGTWLTYTGAIKLDDKDPNFKDQVILLNKHIDAYKTFPPTEPKKDKKKKADETQALPQRQKKQQTVTLLPAADLDDFSKQLQQSMSSADSTQA

SEQ ID NO: 806 - protein, 671 aa, Artificial Sequence
  Description of Artificial Sequence: Synthetic polypeptide
MHHHHHHGGSGSPILGYWKIKGLVQPTRLLLEYLEEKYEEHLYERDEGDKWRNKKFELGLEFPNLPYYIDGDVKLTQSMAIIRYIADKHNMLGGCPKERAEISMLEGAVLDIRYGVSRIAYSKDFETLKVDFLSKLPEMLKMFEDRLCHKTYLNGDHVTHPDFMLYDALDVVLYMDPMCLDAFPKLVCFKKRIEAIPQIDKYLKSSKYIAWPLQGWQATFGGGDHPPKSDLVPRGSPGIHRDGGSGENLYFQSSDNGPQNQRNAPRITFGGPSDSTGSNQNGERSGARSKQRRPQGLPNNTASWFTALTQHGKEDLKFPRGQGVPINTNSSPDDQIGYYRRATRRIRGGDGKMKDLSPRWYFYYLGTGPEAGLPYGANKDGIIWVATEGALNTPKDHIGTRNPANNAAIVIQLPQGTTLPKGFYAEGSRGGSQASSRSSSRSRNSSRNSTPGSSRGTSPARMAGNGGDAALALLLLDRLNQLESKMSGKGQQQQGQTVTKKSAAEASKKPRQKRTATKAYNVTQAFGRRGPEQTQGNFGDQELIRQGTDYKHWPQIAQFAPSASAFFGMSRIGMEVTPSGTWLTYTGAIKLDDKDPNFKDQVILLNKHIDAYKTFPPTEPKKDKKKKADETQALPQRQKKQQTVTLLPAADLDDFSKQLQQSMSSADSTQA

SEQ ID NO: 807 - protein, 671 aa, Artificial Sequence
  Description of Artificial Sequence: Synthetic polypeptide
MHHHHHHGGSGSPILGYWKIKGLVQPTRLLLEYLEEKYEEHLYERDEGDKWRNKKFELGLEFPNLPYYIDGDVKLTQSMAIIRYIADKHNMLGGCPKERAEISMLEGAVLDIRYGVSRIAYSKDFETLKVDFLSKLPEMLKMFEDRLCHKTYLNGDHVTHPDFMLYDALDVVLYMDPMCLDAFPKLVCFKKRIEAIPQIDKYLKSSKYIAWPLQGWQATFGGGDHPPKSDLVPRGSPGIHRDGGSGENLYFQSSDNGPQNQRNAPRITFGGPSDSTGSNQNGERSGARSKQRRPQGLPNNTASWFTALTQHGKEDLKFPRGQGVPINTNSSPDDQIGYYRRATRRIRGGDGKMKDLSPRWYFYYLGTGPEAGLPYGANKDGIIWVATEGALNTPKDHIGTRNPANNAAIVLQLPQGTTLPKGFYAEGSRGGSQASSRSSSRSRNSSRNSTPGSSRGTSPARMAGNGGDAALALLLLDRLNQLESKMSGKGQQQQGQTVTKKSAAEMSKKPRQKRTATKGCNVTQCFGPRGPEQTQGNFGDAELNKKGVDYKHWPQIAQFAPSASAFFGMSRISSKEQPSGTWLTYTGAIKLDKDDPNFKDQVILLNKHIDAYKTFPPTEPKKDKKKKADETQALPQRQKKQQTVTLLPAADLDDFSKQLQQSMSSADSTQA

SEQ ID NO: 808 - protein, 671 aa, Artificial Sequence
  Description of Artificial Sequence: Synthetic polypeptide
MHHHHHHGGSGSPILGYWKIKGLVQPTRLLLEYLEEKYEEHLYERDEGDKWRNKKFELGLEFPNLPYYIDGDVKLTQSMAIIRYIADKHNMLGGCPKERAEISMLEGAVLDIRYGVSRIAYSKDFETLKVDFLSKLPEMLKMFEDRLCHKTYLNGDHVTHPDFMLYDALDVVLYMDPMCLDAFPKLVCFKKRIEAIPQIDKYLKSSKYIAWPLQGWQATFGGGDHPPKSDLVPRGSPGIHRDGGSGENLYFQSSDNGPQNQRNAPRITFGGPSDSTGSNQNGERSGARSKQRRPQGLPNNTASWFTALTQHGKEDLKFPRGQGVPINTNSSPDDQIGYYRRATRRIRGGDGKMKDLSPRWYFYYLGTGPEAGLPYGANKDGIIWVATEGALNTPKDHIGTRNPANNAAIVLQLPQGTTLPKGFYAEGSRGGSQASSRSSSRSRNSSRNSTPGSSRGTSPARMAGNGGDAALALLLLDRLNQLESKMSGKGQQQQGQTVTKKSAAEASKKPRQKRTATKAYNVTQAFGRRGPEQTQGNFGDQDLIRQGTDYKHWPQIAQFAPSASAFFGMSRIGMEVTPSGTWLTYTGAIKLDDKDPNFKDQVILLNKHIDAYKTFPPTEPKKDKKKKADETQALPQRQKKQQTVTLLPAADLDDFSKQLQQSMSSADSTQA

SEQ ID NO: 809 - protein, 671 aa, Artificial Sequence
  Description of Artificial Sequence: Synthetic polypeptide
MHHHHHHGGSGSPILGYWKIKGLVQPTRLLLEYLEEKYEEHLYERDEGDKWRNKKFELGLEFPNLPYYIDGDVKLTQSMAIIRYIADKHNMLGGCPKERAEISMLEGAVLDIRYGVSRIAYSKDFETLKVDFLSKLPEMLKMFEDRLCHKTYLNGDHVTHPDFMLYDALDVVLYMDPMCLDAFPKLVCFKKRIEAIPQIDKYLKSSKYIAWPLQGWQATFGGGDHPPKSDLVPRGSPGIHRDGGSGENLYFQSSDNGPQNQRNAPRITFGGPSDSTGSNQNGERSGARSKQRRPQGLPNNTASWFTALTQHGKEDLKFPRGQGVPINTNSSPDDQIGYYRRATRRIRGGDGKMKDLSPRWYFYYLGTGPEAGLPYGANKDGIIWVATEGALNTPKDHIGTRNPANNAAIVLQLPQGTTLPKGFYAEGSRGGSQASSRSSSRSRNSSRNSTPGSSRGTSPARMAGNGGDAALALLLLDRLNQLESKMSGKGQQQQGQTVTKKSAAEASKKPRQKRTATKAYNVTQAFGRRGPEQTQGNFGDQELIRQGTDYKHWPQIAQFAPSASAFFGMSRIGMEGTPSGTWLTYTGAIKLDDKDPNFKDQVILLNKHIDAYKTFPPTEPKKDKKKKADETQALPQRQKKQQTVTLLPAADLDDFSKQLQQSMSSADSTQA

SEQ ID NO: 810 - protein, 671 aa, Artificial Sequence
  Description of Artificial Sequence: Synthetic polypeptide
MHHHHHHGGSGSPILGYWKIKGLVQPTRLLLEYLEEKYEEHLYERDEGDKWRNKKFELGLEFPNLPYYIDGDVKLTQSMAIIRYIADKHNMLGGCPKERAEISMLEGAVLDIRYGVSRIAYSKDFETLKVDFLSKLPEMLKMFEDRLCHKTYLNGDHVTHPDFMLYDALDVVLYMDPMCLDAFPKLVCFKKRIEAIPQIDKYLKSSKYIAWPLQGWQATFGGGDHPPKSDLVPRGSPGIHRDGGSGENLYFQSSDNGPQNQRNAPRITFGGPSDSTGSNQNGERSGARSKQRRPQGLPNNTASWFTALTQHGKEDLKFPRGQGVPINTNSSPDDQIGYYRRATRRWRGGDGKMKDLSPRWYFYYLGTGPEAGLPYGANKDGIIWVATEGALNTPKDHIGTRNPANNAAIVLQLPQGTTLPKGFYAEGSRGGSQASSRSSSRSRNSSRNSTPGSSRGTSPARMAGNGGDAALALLLLDRLNQLESKMSGKGQQQQGQTVTKKSAAEASKKPRQKRTATKAYNVTQAFGRRGPEQTQGNFGDQELIRQGTDYKHWPQIAQFAPSASAFFGMSRIGMEVTPSGTWLTYTGAIKLDDKDPNFKDQVILLNKHIDAYKTFPPTEPKKDKKKKADETQALPQRQKKQQTVTLLPAADLDDFSKQLQQSMSSADSTQA

SEQ ID NO: 811 - protein, 671 aa, Artificial Sequence
  Description of Artificial Sequence: Synthetic polypeptide
MHHHHHHGGSGSPILGYWKIKGLVQPTRLLLEYLEEKYEEHLYERDEGDKWRNKKFELGLEFPNLPYYIDGDVKLTQSMAIIRYIADKHNMLGGCPKERAEISMLEGAVLDIRYGVSRIAYSKDFETLKVDFLSKLPEMLKMFEDRLCHKTYLNGDHVTHPDFMLYDALDVVLYMDPMCLDAFPKLVCFKKRIEAIPQIDKYLKSSKYIAWPLQGWQATFGGGDHPPKSDLVPRGSPGIHRDGGSGENLYFQSSDNGPQNQRNAPRITFGGPSDSTGSNQNGERSGARSKQRRPQGLPNNTASWFTGLTQFGKEDLKFPPGQGVPINTNSSPDDQIGYYRRATRRIRGGDGKMKDLPPRWYFYYLGTGPHADLPYGQKQPGVVWVARPGALNTPKDHIGTRNPANNAAIPLQLPPGTKLPKGFYAEGSRGGSQASSRSSSRSRNSSRNSTPGSSRGTSPARMAGNGGDAALALLLLDRLNQLESKMSGKGQQQQGQTVTKKSAAEASKKPRQKRTATKAYNVTQAFGRRGPEQTQGNFGDQELIRQGTDYKHWPQIAQFAPSASAFFGMSRIGMEVTPSGTWLTYTGAIKLDDKDPNFKDQVILLNKHIDAYKTFPPTEPKKDKKKKADETQALPQRQKKQQTVTLLPAADLDDFSKQLQQSMSSADSTQA

SEQ ID NO: 812 - protein, 671 aa, Artificial Sequence
  Description of Artificial Sequence: Synthetic polypeptide
MHHHHHHGGSGSPILGYWKIKGLVQPTRLLLEYLEEKYEEHLYERDEGDKWRNKKFELGLEFPNLPYYIDGDVKLTQSMAIIRYIADKHNMLGGCPKERAEISMLEGAVLDIRYGVSRIAYSKDFETLKVDFLSKLPEMLKMFEDRLCHKTYLNGDHVTHPDFMLYDALDVVLYMDPMCLDAFPKLVCFKKRIEAIPQIDKYLKSSKYIAWPLQGWQATFGGGDHPPKSDLVPRGSPGIHRDGGSGENLYFQSSDNGPQNQRNAPRITFGGPSDSTGSNQNGERSGARSKQRRPQGLPNNTASWFTALTQHGKEDLKFPRGQGVPINTNSSPDDQIGYYRRATRRIRGGDGKMKDLSPRWYFYYLGTGPEAGLPYGANKDGIIWVATEGALNTPKDHIGTRNPANNAAIVLQLPQGTTLPKGFYAEGSRGGSQASSRSSSRSRNSSRNSTPGSSRGTSPARMAGNGGDAALALLLLDRLNQLESKMSGKGQQQQGQTVTKKSAAEASKKPRQKRTATKEYNVTQAFGRRGPEQTQGNFGDQELIRQGTDYKHWPQIAQFAPSASAFFGMSRIGMEVTPSGTWLTYTGAIKLDDKDPNFKDQVILLNKHIDAYKTFPPTEPKKDKKKKADETQALPQRQKKQQTVTLLPAADLDDFSKQLQQSMSSADSTQA

SEQ ID NO: 813 - protein, 671 aa, Artificial Sequence
  Description of Artificial Sequence: Synthetic polypeptide
MHHHHHHGGSGSPILGYWKIKGLVQPTRLLLEYLEEKYEEHLYERDEGDKWRNKKFELGLEFPNLPYYIDGDVKLTQSMAIIRYIADKHNMLGGCPKERAEISMLEGAVLDIRYGVSRIAYSKDFETLKVDFLSKLPEMLKMFEDRLCHKTYLNGDHVTHPDFMLYDALDVVLYMDPMCLDAFPKLVCFKKRIEAIPQIDKYLKSSKYIAWPLQGWQATFGGGDHPPKSDLVPRGSPGIHRDGGSGENLYFQSSDNGPQNQRNAPRITFGGPSDSTGSNQNGERSGARSKQRRPQGLPNNTASWFTGLTQKGKEDLKFPPGQGVPINTNSSPDDQIGYYRRATRRIRGGDGKMKDLPPRWYFYYLGTGPHADLPYGQKQDGVFWVARPGALNTPKDHIGTRNPANNAAIPLQLPPGTKLPKGFYAEGSRGGSQASSRSSSRSRNSSRNSTPGSSRGTSPARMAGNGGDAALALLLLDRLNQLESKMSGKGQQQQGQTVTKKSAAEASKKPRQKRTATKAYNVTQAFGRRGPEQTQGNFGDQELIRQGTDYKHWPQIAQFAPSASAFFGMSRIGMEVTPSGTWLTYTGAIKLDDKDPNFKDQVILLNKHIDAYKTFPPTEPKKDKKKKADETQALPQRQKKQQTVTLLPAADLDDFSKQLQQSMSSADSTQA

SEQ ID NO: 814 - protein, 671 aa, Artificial Sequence
  Description of Artificial Sequence: Synthetic polypeptide
MHHHHHHGGSGSPILGYWKIKGLVQPTRLLLEYLEEKYEEHLYERDEGDKWRNKKFELGLEFPNLPYYIDGDVKLTQSMAIIRYIADKHNMLGGCPKERAEISMLEGAVLDIRYGVSRIAYSKDFETLKVDFLSKLPEMLKMFEDRLCHKTYLNGDHVTHPDFMLYDALDVVLYMDPMCLDAFPKLVCFKKRIEAIPQIDKYLKSSKYIAWPLQGWQATFGGGDHPPKSDLVPRGSPGIHRDGGSGENLYFQSSDNGPQNQRNAPRITFGGPSDSTGSNQNGERSGARSKQRRPQGLPNNTASWFTALTQHGKEDLKFPRGQGVPINTNSSPDDQIGYYRRATRRIRGGDGKMKDLSPRWYFYYLGTGPEAGLPYGANKDGIIWVATEGALNTPKDHIGTRNPANNAAIVLQLPQGTTLPKGFYAEGSRGGSQASSRSSSRSRNSSRNSTPGSSRGTSPARMAGNGGDAALALLLLDRLNQLESKMSGKGQQQQGQTVTKKSAAEASKKPRQKRTATKAYNVTQAFGRRGPEQTQGNFGDLELIRQGTDYKHWPQIAQFAPSASAFFGMSRIGMEVTPSGTWLTYTGAIKLDDKDPNFKDQVILLNKHIDAYKTFPPTEPKKDKKKKADETQALPQRQKKQQTVTLLPAADLDDFSKQLQQSMSSADSTQA

SEQ ID NO: 815 - protein, 671 aa, Artificial Sequence
  Description of Artificial Sequence: Synthetic polypeptide
MHHHHHHGGSGSPILGYWKIKGLVQPTRLLLEYLEEKYEEHLYERDEGDKWRNKKFELGLEFPNLPYYIDGDVKLTQSMAIIRYIADKHNMLGGCPKERAEISMLEGAVLDIRYGVSRIAYSKDFETLKVDFLSKLPEMLKMFEDRLCHKTYLNGDHVTHPDFMLYDALDVVLYMDPMCLDAFPKLVCFKKRIEAIPQIDKYLKSSKYIAWPLQGWQATFGGGDHPPKSDLVPRGSPGIHRDGGSGENLYFQSSDNGPQNQRNAPRITFGGPSDSTGSNQNGERSGARSKQRRPQGLPNNTASWFTALTQHGKEDLKFPRGQGVPINTNSSPDDQIGYYRRATRRIRGGDGKMKDLSPRWYFYYLGTGPEAGLPYGANKDGIIWVATEGALNTPKDHIGTRNPANNAAIVLQLPQGTTLPKGFYAEGSRGGSQASSRSSSRSRNSSRNSTPGSSRGTSPARMAGNGGDAALALLLLDRLNQLESKMSGKGQQQQGQTVTKKSAAEASKKPRQKRTATKAYNVTQAFGRRGPEQTQGNFGDQELIRQGVDYKHWPQIAQFAPSASAFFGMSRIGMEVTPSGTWLTYTGAIKLDDKDPNFKDQVILLNKHIDAYKTFPPTEPKKDKKKKADETQALPQRQKKQQTVTLLPAADLDDFSKQLQQSMSSADSTQA

SEQ ID NO: 816 - protein, 671 aa, Artificial Sequence
  Description of Artificial Sequence: Synthetic polypeptide
MHHHHHHGGSGSPILGYWKIKGLVQPTRLLLEYLEEKYEEHLYERDEGDKWRNKKFELGLEFPNLPYYIDGDVKLTQSMAIIRYIADKHNMLGGCPKERAEISMLEGAVLDIRYGVSRIAYSKDFETLKVDFLSKLPEMLKMFEDRLCHKTYLNGDHVTHPDFMLYDALDVVLYMDPMCLDAFPKLVCFKKRIEAIPQIDKYLKSSKYIAWPLQGWQATFGGGDHPPKSDLVPRGSPGIHRDGGSGENLYFQSSDNGPQNQRNAPRITFGGPSDSTGSNQNGERSGARSKQRRPQGLPNNTASWFTALTQHGKEDLKFPRGQGVPINTNSSPDDQIGYYRRATRRIRGGDGKMKDLSPRWYFYYLGTGPEAGLPYGANKDGIIWVATEGALNTPKDHIGTRNPANNAAIHLQLPQGTTLPKGFYAEGSRGGSQASSRSSSRSRNSSRNSTPGSSRGTSPARMAGNGGDAALALLLLDRLNQLESKMSGKGQQQQGQTVTKKSAAEASKKPRQKRTATKAYNVTQAFGRRGPEQTQGNFGDQELIRQGTDYKHWPQIAQFAPSASAFFGMSRIGMEVTPSGTWLTYTGAIKLDDKDPNFKDQVILLNKHIDAYKTFPPTEPKKDKKKKADETQALPQRQKKQQTVTLLPAADLDDFSKQLQQSMSSADSTQA

SEQ ID NO: 817 - protein, 671 aa, Artificial Sequence
  Description of Artificial Sequence: Synthetic polypeptide
MHHHHHHGGSGSPILGYWKIKGLVQPTRLLLEYLEEKYEEHLYERDEGDKWRNKKFELGLEFPNLPYYIDGDVKLTQSMAIIRYIADKHNMLGGCPKERAEISMLEGAVLDIRYGVSRIAYSKDFETLKVDFLSKLPEMLKMFEDRLCHKTYLNGDHVTHPDFMLYDALDVVLYMDPMCLDAFPKLVCFKKRIEAIPQIDKYLKSSKYIAWPLQGWQATFGGGDHPPKSDLVPRGSPGIHRDGGSGENLYFQSSDNGPQNQRNAPRITFGGPSDSTGSNQNGERSGARSKQRRPQGLPNNTASWFTALTQHGKEDLKFPRGQGVPINTNSSPDDQIGYYRRATRRIRGGDGKMKDLSPRWYFYYLGTGPEAGLPYGANKDGIIWVATEGALNTPKDHIGTRNPANNAAIVLQLPQGTTLPKGFYAEGSRGGSQASSRSSSRSRNSSRNSTPGSSRGTSPARMAGNGGDAALALLLLDRLNQLESKMSGKGQQQQGQTVTKKSAAEASKKPRQKRTATKGYNVTQAFGRRGPEQTQGNFGDQDLIKLGTDYKHWPQIAQFAPSASAFFGMSRISMEETPSGTWLTYTGAIKLDKKDPNFKDQVILLNKHIDAYKTFPPTEPKKDKKKKADETQALPQRQKKQQTVTLLPAADLDDFSKQLQQSMSSADSTQA

SEQ ID NO: 818 - protein, 671 aa, Artificial Sequence
  Description of Artificial Sequence: Synthetic polypeptide
MHHHHHHGGSGSPILGYWKIKGLVQPTRLLLEYLEEKYEEHLYERDEGDKWRNKKFELGLEFPNLPYYIDGDVKLTQSMAIIRYIADKHNMLGGCPKERAEISMLEGAVLDIRYGVSRIAYSKDFETLKVDFLSKLPEMLKMFEDRLCHKTYLNGDHVTHPDFMLYDALDVVLYMDPMCLDAFPKLVCFKKRIEAIPQIDKYLKSSKYIAWPLQGWQATFGGGDHPPKSDLVPRGSPGIHRDGGSGENLYFQSSDNGPQNQRNAPRITFGGPSDSTGSNQNGERSGARSKQRRPQGLPNNTASWFTALTQHGKEDLKFPRGQGVPINTNSSPDDQIGYYRRATRRIRGGDGKMKDLSPRWYFYYLGTGPEAGLPYGANKDGIIWVATEGALNTPKDHIGTRNPANNAAIVLQLPQGTTLPKGFYAEGSRGGSQASSRSSSRSRNSSRNSTPGSSRGTSPARMAGNGGDAALALLLLDRLNQLESKMSGKGQQQQGQTVTKKSAAEASKKPRQKRTATKAYNVTQAFGRRGPEQTQGNFGDQELIRQGTDYKHWPQIAQFAPSASAFFGMSRIGMEVTPSGTWLTYTGAIKLDDKDPNFDDQVILLNKHIDAYKTFPPTEPKKDKKKKADETQALPQRQKKQQTVTLLPAADLDDFSKQLQQSMSSADSTQA

SEQ ID NO: 819 - protein, 671 aa, Artificial Sequence
  Description of Artificial Sequence: Synthetic polypeptide
MHHHHHHGGSGSPILGYWKIKGLVQPTRLLLEYLEEKYEEHLYERDEGDKWRNKKFELGLEFPNLPYYIDGDVKLTQSMAIIRYIADKHNMLGGCPKERAEISMLEGAVLDIRYGVSRIAYSKDFETLKVDFLSKLPEMLKMFEDRLCHKTYLNGDHVTHPDFMLYDALDVVLYMDPMCLDAFPKLVCFKKRIEAIPQIDKYLKSSKYIAWPLQGWQATFGGGDHPPKSDLVPRGSPGIHRDGGSGENLYFQSSDNGPQNQRNAPRITFGGPSDSTGSNQNGERSGARSKQRRPQGLPNNTASWFTALTQHGKEDLKFPRGQGVPINTNSSPDDQIGYYRRATRRIRGGDGKMKDLSPRWYFYYLGTGPEAGLPFGANKDGIIWVATEGALNTPKDHIGTRNPANNAAIVLQLPQGTTLPKGFYAEGSRGGSQASSRSSSRSRNSSRNSTPGSSRGTSPARMAGNGGDAALALLLLDRLNQLESKMSGKGQQQQGQTVTKKSAAEASKKPRQKRTATKAYNVTQAFGRRGPEQTQGNFGDQELIRQGTDYKHWPQIAQFAPSASAFFGMSRIGMEVTPSGTWLTYTGAIKLDDKDPNFKDQVILLNKHIDAYKTFPPTEPKKDKKKKADETQALPQRQKKQQTVTLLPAADLDDFSKQLQQSMSSADSTQA

SEQ ID NO: 820 - protein, 671 aa, Artificial Sequence
  Description of Artificial Sequence: Synthetic polypeptide
MHHHHHHGGSGSPILGYWKIKGLVQPTRLLLEYLEEKYEEHLYERDEGDKWRNKKFELGLEFPNLPYYIDGDVKLTQSMAIIRYIADKHNMLGGCPKERAEISMLEGAVLDIRYGVSRIAYSKDFETLKVDFLSKLPEMLKMFEDRLCHKTYLNGDHVTHPDFMLYDALDVVLYMDPMCLDAFPKLVCFKKRIEAIPQIDKYLKSSKYIAWPLQGWQATFGGGDHPPKSDLVPRGSPGIHRDGGSGENLYFQSSDNGPQNQRNAPRITFGGPSDSTGSNQNGERSGARSKQRRPQGLPNNTASWFTALTQHGKEDLKFPRGQGIPINTNSSPDDQIGYYRRATRRIRGGDGKMKDLSPRWYFYYLGTGPEAGLPYGANKDGIIWVATEGALNTPKDHIGTRNPANNAAIVLQLPQGTTLPKGFYAEGSRGGSQASSRSSSRSRNSSRNSTPGSSRGTSPARMAGNGGDAALALLLLDRLNQLESKMSGKGQQQQGQTVTKKSAAEASKKPRQKRTATKAYNVTQAFGRRGPEQTQGNFGDQELIRQGTDYKHWPQIAQFAPSASAFFGMSRIGMEVTPSGTWLTYTGAIKLDDKDPNFKDQVILLNKHIDAYKTFPPTEPKKDKKKKADETQALPQRQKKQQTVTLLPAADLDDFSKQLQQSMSSADSTQA

SEQ ID NO: 821 - protein, 671 aa, Artificial Sequence
  Description of Artificial Sequence: Synthetic polypeptide
MHHHHHHGGSGSPILGYWKIKGLVQPTRLLLEYLEEKYEEHLYERDEGDKWRNKKFELGLEFPNLPYYIDGDVKLTQSMAIIRYIADKHNMLGGCPKERAEISMLEGAVLDIRYGVSRIAYSKDFETLKVDFLSKLPEMLKMFEDRLCHKTYLNGDHVTHPDFMLYDALDVVLYMDPMCLDAFPKLVCFKKRIEAIPQIDKYLKSSKYIAWPLQGWQATFGGGDHPPKSDLVPRGSPGIHRDGGSGENLYFQSSDNGPQNQRNAPRITFGGPSDSTGSNQNGERSGARSKQRRPQGLPNNTASWFTALTQHGKEDLKFPRGQGVPINTNSSPDDQIGYYRRATRRIRGGDGKMKDLSPRWYFYYLGTGPEAGLPYGANKDGIIWVATEGALNTPKDHIGTRNPANNAAIVLQLPQGTTLPKGFYAEGSRGGSQASSRSSSRSRNSSRNSTPGSSRGTSPARMAGNGGDAALALLLLDRLNQLESKMSGKGQQQQGQTVTKKSAAEMSKKPRQKRTATKGCNVTQCFGPRGPEQTQGNFGDADLVKKGTDYKHWPQIAQFAPSASAFFGMSRISSKETPSGTWLTYTGAIKLDKDDPNFKDQVILLNKHIDAYKTFPPTEPKKDKKKKADETQALPQRQKKQQTVTLLPAADLDDFSKQLQQSMSSADSTQA

SEQ ID NO: 822 - protein, 671 aa, Artificial Sequence
  Description of Artificial Sequence: Synthetic polypeptide
MHHHHHHGGSGSPILGYWKIKGLVQPTRLLLEYLEEKYEEHLYERDEGDKWRNKKFELGLEFPNLPYYIDGDVKLTQSMAIIRYIADKHNMLGGCPKERAEISMLEGAVLDIRYGVSRIAYSKDFETLKVDFLSKLPEMLKMFEDRLCHKTYLNGDHVTHPDFMLYDALDVVLYMDPMCLDAFPKLVCFKKRIEAIPQIDKYLKSSKYIAWPLQGWQATFGGGDHPPKSDLVPRGSPGIHRDGGSGENLYFQSSDNGPQNQRNAPRITFGGPSDSTGSNQNGERSGARSKQRRPQGLPNNTASWFTALTQHGKEDLKFPRGQGVPINTNSSPDDQIGYYRRLTRRIRGGDGKMKDLSPRWYFYYLGTGPEAGLPYGANKDGIIWVATEGALNTPKDHIGTRNPANNAAIVLQLPQGTTLPKGFYAEGSRGGSQASSRSSSRSRNSSRNSTPGSSRGTSPARMAGNGGDAALALLLLDRLNQLESKMSGKGQQQQGQTVTKKSAAEASKKPRQKRTATKAYNVTQAFGRRGPEQTQGNFGDQELIRQGTDYKHWPQIAQFAPSASAFFGMSRIGMEVTPSGTWLTYTGAIKLDDKDPNFKDQVILLNKHIDAYKTFPPTEPKKDKKKKADETQALPQRQKKQQTVTLLPAADLDDFSKQLQQSMSSADSTQA

SEQ ID NO: 823 - protein, 671 aa, Artificial Sequence
  Description of Artificial Sequence: Synthetic polypeptide
MHHHHHHGGSGSPILGYWKIKGLVQPTRLLLEYLEEKYEEHLYERDEGDKWRNKKFELGLEFPNLPYYIDGDVKLTQSMAIIRYIADKHNMLGGCPKERAEISMLEGAVLDIRYGVSRIAYSKDFETLKVDFLSKLPEMLKMFEDRLCHKTYLNGDHVTHPDFMLYDALDVVLYMDPMCLDAFPKLVCFKKRIEAIPQIDKYLKSSKYIAWPLQGWQATFGGGDHPPKSDLVPRGSPGIHRDGGSGENLYFQSSDNGPQNQRNAPRITFGGPSDSTGSNQNGERSGARSKQRRPQGLPNNTASWFTALTQHGKEDLKFPRGQGVPINTNSSPDDQIGYYRRATRRIRGGDGKMKDLSPRWYFYYLGTGPEAGLPYGANKDGIIWVATEGALNTPKDHIGTRNPANNAAIVLQLPQGTTLPKGFYAEGSRGGSQASSRSSSRSRNSSRNSTPGSSRGTSPARMAGNGGDAALALLLLDRLNQLESKMSGKGQQQQGQTVTKKSAAEASKKPRQKRTATKAYNVTQAFGPRGPEQTQGNFGDQELIRQGTDYKHWPQIAQFAPSASAFFGMSRIGMEVTPSGTWLTYTGAIKLDDKDPNFKDQVILLNKHIDAYKTFPPTEPKKDKKKKADETQALPQRQKKQQTVTLLPAADLDDFSKQLQQSMSSADSTQA

SEQ ID NO: 824 - protein, 671 aa, Artificial Sequence
  Description of Artificial Sequence: Synthetic polypeptide
MHHHHHHGGSGSPILGYWKIKGLVQPTRLLLEYLEEKYEEHLYERDEGDKWRNKKFELGLEFPNLPYYIDGDVKLTQSMAIIRYIADKHNMLGGCPKERAEISMLEGAVLDIRYGVSRIAYSKDFETLKVDFLSKLPEMLKMFEDRLCHKTYLNGDHVTHPDFMLYDALDVVLYMDPMCLDAFPKLVCFKKRIEAIPQIDKYLKSSKYIAWPLQGWQATFGGGDHPPKSDLVPRGSPGIHRDGGSGENLYFQSSDNGPQNQRNAPRITFGGPSDSTGSNQNGERSGARSKQRRPQGLPNNTASWFTGLTQNGKEDLKFPPGQGVPINTNSSPDDQIGYYRRATRRIRGGDGKMKDLPPKWYFYYLGTGPHADLPYGQKHDGVVWVARPGALNTPKDHIGTRNPANNAAIPLQLPPGTKLPKGFYAEGSRGGSQASSRSSSRSRNSSRNSTPGSSRGTSPARMAGNGGDAALALLLLDRLNQLESKMSGKGQQQQGQTVTKKSAAEASKKPRQKRTATKAYNVTQAFGRRGPEQTQGNFGDQELIRQGTDYKHWPQIAQFAPSASAFFGMSRIGMEVTPSGTWLTYTGAIKLDDKDPNFKDQVILLNKHIDAYKTFPPTEPKKDKKKKADETQALPQRQKKQQTVTLLPAADLDDFSKQLQQSMSSADSTQA

SEQ ID NO: 825 - protein, 671 aa, Artificial Sequence
  Description of Artificial Sequence: Synthetic polypeptide
MHHHHHHGGSGSPILGYWKIKGLVQPTRLLLEYLEEKYEEHLYERDEGDKWRNKKFELGLEFPNLPYYIDGDVKLTQSMAIIRYIADKHNMLGGCPKERAEISMLEGAVLDIRYGVSRIAYSKDFETLKVDFLSKLPEMLKMFEDRLCHKTYLNGDHVTHPDFMLYDALDVVLYMDPMCLDAFPKLVCFKKRIEAIPQIDKYLKSSKYIAWPLQGWQATFGGGDHPPKSDLVPRGSPGIHRDGGSGENLYFQSSDNGPQNQRNAPRITFGGPSDSTGSNQNGERSGARSKQRRPQGLPNNTASWFTALTQHGKEDLKFPRGQGVPINTNSSPDDQIGYYRRATRRIRGGDGKMKDLSPRWYFYYLGTGPEAGLPYGANKDGIIWVATEGALNTPKDHIGTRNPANNAAIVLQLPEGTTLPKGFYAEGSRGGSQASSRSSSRSRNSSRNSTPGSSRGTSPARMAGNGGDAALALLLLDRLNQLESKMSGKGQQQQGQTVTKKSAAEASKKPRQKRTATKAYNVTQAFGRRGPEQTQGNFGDQELIRQGTDYKHWPQIAQFAPSASAFFGMSRIGMEVTPSGTWLTYTGAIKLDDKDPNFKDQVILLNKHIDAYKTFPPTEPKKDKKKKADETQALPQRQKKQQTVTLLPAADLDDFSKQLQQSMSSADSTQA

SEQ ID NO: 826 - protein, 671 aa, Artificial Sequence
  Description of Artificial Sequence: Synthetic polypeptide
MHHHHHHGGSGSPILGYWKIKGLVQPTRLLLEYLEEKYEEHLYERDEGDKWRNKKFELGLEFPNLPYYIDGDVKLTQSMAIIRYIADKHNMLGGCPKERAEISMLEGAVLDIRYGVSRIAYSKDFETLKVDFLSKLPEMLKMFEDRLCHKTYLNGDHVTHPDFMLYDALDVVLYMDPMCLDAFPKLVCFKKRIEAIPQIDKYLKSSKYIAWPLQGWQATFGGGDHPPKSDLVPRGSPGIHRDGGSGENLYFQSSDNGPQNQRNAPRITFGGPSDSTGSNQNGERSGARSKQRRPQGLPNNTASWFTALTQHGKEDLKFPRGQGVPINTNSSPDDQIGYYRRATRRIRGGDGKMKDLSPRWYFYYLGTGPEAGLPYGANKDGIIWVATEGALNTPKDHIGTRNPANNAAIVLQLPQGTTLPKGFYAEGSRGGSQASSRSSSRSRNSSRNSTPGSSRGTSPARMAGNGGDAALALLLLDRLNQLESKMSGKGQQQQGQTVTKKSAAEASKKPRQKRTATKAYNVTQAFGRRGPEPTQGNFGDQELIRQGTDYKHWPQIAQFAPSASAFFGMSRIGMEVTPSGTWLTYTGAIKLDDKDPNFKDQVILLNKHIDAYKTFPPTEPKKDKKKKADETQALPQRQKKQQTVTLLPAADLDDFSKQLQQSMSSADSTQA

SEQ ID NO: 827 - protein, 671 aa, Artificial Sequence
  Description of Artificial Sequence: Synthetic polypeptide
MHHHHHHGGSGSPILGYWKIKGLVQPTRLLLEYLEEKYEEHLYERDEGDKWRNKKFELGLEFPNLPYYIDGDVKLTQSMAIIRYIADKHNMLGGCPKERAEISMLEGAVLDIRYGVSRIAYSKDFETLKVDFLSKLPEMLKMFEDRLCHKTYLNGDHVTHPDFMLYDALDVVLYMDPMCLDAFPKLVCFKKRIEAIPQIDKYLKSSKYIAWPLQGWQATFGGGDHPPKSDLVPRGSPGIHRDGGSGENLYFQSSDNGPQNQRNAPRITFGGPSDSTGSNQNGERSGARSKQRRPQGLPNNTASWFTALTQHGKEDLKFPRGQGVPINTNSSPDDQIGYYRRATRRIRGGDGKMKDLSPRWYFYYLGTGPEAGLPYGANKDGIIWVATEGALNTPKDHIGTRNPANNAAAVLQLPQGTTLPKGFYAEGSRGGSQASSRSSSRSRNSSRNSTPGSSRGTSPARMAGNGGDAALALLLLDRLNQLESKMSGKGQQQQGQTVTKKSAAEASKKPRQKRTATKAYNVTQAFGRRGPEQTQGNFGDQELIRQGTDYKHWPQIAQFAPSASAFFGMSRIGMEVTPSGTWLTYTGAIKLDDKDPNFKDQVILLNKHIDAYKTFPPTEPKKDKKKKADETQALPQRQKKQQTVTLLPAADLDDFSKQLQQSMSSADSTQA

SEQ ID NO: 828 - protein, 671 aa, Artificial Sequence
  Description of Artificial Sequence: Synthetic polypeptide
MHHHHHHGGSGSPILGYWKIKGLVQPTRLLLEYLEEKYEEHLYERDEGDKWRNKKFELGLEFPNLPYYIDGDVKLTQSMAIIRYIADKHNMLGGCPKERAEISMLEGAVLDIRYGVSRIAYSKDFETLKVDFLSKLPEMLKMFEDRLCHKTYLNGDHVTHPDFMLYDALDVVLYMDPMCLDAFPKLVCFKKRIEAIPQIDKYLKSSKYIAWPLQGWQATFGGGDHPPKSDLVPRGSPGIHRDGGSGENLYFQSSDNGPQNQRNAPRITFGGPSDSTGSNQNGERSGARSKQRRPQGLPNNTASWFTALKQHGKEDLKFPRGQGVPINTNSSPDDQIGYYRRATRRIRGGDGKMKDLSPRWYFYYLGTGPEAGLPYGANKDGIIWVATEGALNTPKDHIGTRNPANNAAIVLQLPQGTTLPKGFYAEGSRGGSQASSRSSSRSRNSSRNSTPGSSRGTSPARMAGNGGDAALALLLLDRLNQLESKMSGKGQQQQGQTVTKKSAAEASKKPRQKRTATKAYNVTQAFGRRGPEQTQGNFGDQELIRQGTDYKHWPQIAQFAPSASAFFGMSRIGMEVTPSGTWLTYTGAIKLDDKDPNFKDQVILLNKHIDAYKTFPPTEPKKDKKKKADETQALPQRQKKQQTVTLLPAADLDDFSKQLQQSMSSADSTQA

SEQ ID NO: 829 - protein, 671 aa, Artificial Sequence
  Description of Artificial Sequence: Synthetic polypeptide
MHHHHHHGGSGSPILGYWKIKGLVQPTRLLLEYLEEKYEEHLYERDEGDKWRNKKFELGLEFPNLPYYIDGDVKLTQSMAIIRYIADKHNMLGGCPKERAEISMLEGAVLDIRYGVSRIAYSKDFETLKVDFLSKLPEMLKMFEDRLCHKTYLNGDHVTHPDFMLYDALDVVLYMDPMCLDAFPKLVCFKKRIEAIPQIDKYLKSSKYIAWPLQGWQATFGGGDHPPKSDLVPRGSPGIHRDGGSGENLYFQSSDNGPQNQRNAPRITFGGPSDSTGSNQNGERSGARSKQRRPQGLPNNTASWFTALTQHGKEDLKFPRGQGVPINTNSSPDDQIGYYRRATRRIRGGDGKMKDLSPRWYFYYLGTGPEAGLPYGANKDGIIWVATEGALNTPKDHIGTRNPANNAAIVLQLPQGTTLPKGFYAEGSRGGSQASSRSSSRSRNSSRNSTPGSSRGTSPARMAGNGGDAALALLLLDRLNQLESKMSGKGQQQQGQTVTKKSAAEASKKPRQKRTATKGYNVTQAFGRRGPEQTQGNFGDQDLIKLGTDYKHWPQIAQFAPSASAFFGMSRIGMEETPSGTWLTYTGAIKLDKKDPNFKDQVILLNKHIDAYKTFPPTEPKKDKKKKADETQALPQRQKKQQTVTLLPAADLDDFSKQLQQSMSSADSTQA

SEQ ID NO: 830 - protein, 671 aa, Artificial Sequence
  Description of Artificial Sequence: Synthetic polypeptide
MHHHHHHGGSGSPILGYWKIKGLVQPTRLLLEYLEEKYEEHLYERDEGDKWRNKKFELGLEFPNLPYYIDGDVKLTQSMAIIRYIADKHNMLGGCPKERAEISMLEGAVLDIRYGVSRIAYSKDFETLKVDFLSKLPEMLKMFEDRLCHKTYLNGDHVTHPDFMLYDALDVVLYMDPMCLDAFPKLVCFKKRIEAIPQIDKYLKSSKYIAWPLQGWQATFGGGDHPPKSDLVPRGSPGIHRDGGSGENLYFQSSDNGPQNQRNAPRITFGGPSDSTGSNQNGERSGARSKQRRPQGLPNNTASWFTALTQHGKEDLKFPRGQGVPLNTNSSPDDQIGYYRRATRRIRGGDGKMKDLSPRWYFYYLGTGPEAGLPYGANKDGIIWVATEGALNTPKDHIGTRNPANNAAIVLQLPQGTTLPKGFYAEGSRGGSQASSRSSSRSRNSSRNSTPGSSRGTSPARMAGNGGDAALALLLLDRLNQLESKMSGKGQQQQGQTVTKKSAAEASKKPRQKRTATKAYNVTQAFGRRGPEQTQGNFGDQELIRQGTDYKHWPQIAQFAPSASAFFGMSRIGMEVTPSGTWLTYTGAIKLDDKDPNFKDQVILLNKHIDAYKTFPPTEPKKDKKKKADETQALPQRQKKQQTVTLLPAADLDDFSKQLQQSMSSADSTQA

SEQ ID NO: 831 - protein, 671 aa, Artificial Sequence
  Description of Artificial Sequence: Synthetic polypeptide
MHHHHHHGGSGSPILGYWKIKGLVQPTRLLLEYLEEKYEEHLYERDEGDKWRNKKFELGLEFPNLPYYIDGDVKLTQSMAIIRYIADKHNMLGGCPKERAEISMLEGAVLDIRYGVSRIAYSKDFETLKVDFLSKLPEMLKMFEDRLCHKTYLNGDHVTHPDFMLYDALDVVLYMDPMCLDAFPKLVCFKKRIEAIPQIDKYLKSSKYIAWPLQGWQATFGGGDHPPKSDLVPRGSPGIHRDGGSGENLYFQSSDNGPQNQRNAPRITFGGPSDSTGSNQNGERSGARSKQRRPQGLPNNTASWFTALTQHGKEDLKFPRGQGVPINTNSSPDDQIGYYRRATRRIRGGDGKMKDLSPRWYFYYLGTGPEAGLPYGANKDGIIWVATEGALNTPKDHIGTRNPANNAAIVLQLPQGTTLPKGFYAEGSRGGSQASSRSSSRSRNSSRNSTPGSSRGTSPARMAGNGGDAALALLLLDRLNQLESKMSGKGQQQQGQTVTKKSAAEASKKPRQKRTATKAYNVTQAFGRRGPEQTQGNFGDQELIRNGTDYKHWPQIAQFAPSASAFFGMSRIGMEVTPSGTWLTYTGAIKLDDKDPNFKDQVILLNKHIDAYKTFPPTEPKKDKKKKADETQALPQRQKKQQTVTLLPAADLDDFSKQLQQSMSSADSTQA

SEQ ID NO: 832 - protein, 671 aa, Artificial Sequence
  Description of Artificial Sequence: Synthetic polypeptide
MHHHHHHGGSGSPILGYWKIKGLVQPTRLLLEYLEEKYEEHLYERDEGDKWRNKKFELGLEFPNLPYYIDGDVKLTQSMAIIRYIADKHNMLGGCPKERAEISMLEGAVLDIRYGVSRIAYSKDFETLKVDFLSKLPEMLKMFEDRLCHKTYLNGDHVTHPDFMLYDALDVVLYMDPMCLDAFPKLVCFKKRIEAIPQIDKYLKSSKYIAWPLQGWQATFGGGDHPPKSDLVPRGSPGIHRDGGSGENLYFQSSDNGPQNQRNAPRITFGGPSDSTGSNQNGERSGARSKQRRPQGLPNNTASWFTALTQHGKEDLKFPRGQGVPINTNSSPDDQIGYYRRATRRIRGGDGKMKDLSPRWYFYYLGTGPEAGLPYGANKDGIIWVATEGALNTPKDHIGTRNPANNAAIVCQLPQGTTLPKGFYAEGSRGGSQASSRSSSRSRNSSRNSTPGSSRGTSPARMAGNGGDAALALLLLDRLNQLESKMSGKGQQQQGQTVTKKSAAEASKKPRQKRTATKAYNVTQAFGRRGPEQTQGNFGDQELIRQGTDYKHWPQIAQFAPSASAFFGMSRIGMEVTPSGTWLTYTGAIKLDDKDPNFKDQVILLNKHIDAYKTFPPTEPKKDKKKKADETQALPQRQKKQQTVTLLPAADLDDFSKQLQQSMSSADSTQA

SEQ ID NO: 833 - protein, 671 aa, Artificial Sequence
  Description of Artificial Sequence: Synthetic polypeptide
MHHHHHHGGSGSPILGYWKIKGLVQPTRLLLEYLEEKYEEHLYERDEGDKWRNKKFELGLEFPNLPYYIDGDVKLTQSMAIIRYIADKHNMLGGCPKERAEISMLEGAVLDIRYGVSRIAYSKDFETLKVDFLSKLPEMLKMFEDRLCHKTYLNGDHVTHPDFMLYDALDVVLYMDPMCLDAFPKLVCFKKRIEAIPQIDKYLKSSKYIAWPLQGWQATFGGGDHPPKSDLVPRGSPGIHRDGGSGENLYFQSSDNGPQNQRNAPRITFGGPSDSTGSNQNGERSGARSKQRRPQGLPNNTASWFTALTQHGKEDLKFPRGQGVPINTNSSPDDQIGYYRRATRRIRGGDGKMKDLSPRWYFYYLGTGPEAGLPYGANKDGIIWVATEGALNTPKDHIGTRNPANNAAIVLQLPQGTTLPKGFYAEGSRGGSQASSRSSSRSRNSSRNSTPGSSRGTSPARMAGNGGDAALALLLLDRLNQLESKMSGKGQQQQGQTVTKKSAAENSKKPRQKRTATKAYNVTQAFGRRGPEQTQGNFGDQELIRQGTDYKHWPQIAQFAPSASAFFGMSRIGMEVTPSGTWLTYTGAIKLDDKDPNFKDQVILLNKHIDAYKTFPPTEPKKDKKKKADETQALPQRQKKQQTVTLLPAADLDDFSKQLQQSMSSADSTQA

SEQ ID NO: 834 - protein, 671 aa, Artificial Sequence
  Description of Artificial Sequence: Synthetic polypeptide
MHHHHHHGGSGSPILGYWKIKGLVQPTRLLLEYLEEKYEEHLYERDEGDKWRNKKFELGLEFPNLPYYIDGDVKLTQSMAIIRYIADKHNMLGGCPKERAEISMLEGAVLDIRYGVSRIAYSKDFETLKVDFLSKLPEMLKMFEDRLCHKTYLNGDHVTHPDFMLYDALDVVLYMDPMCLDAFPKLVCFKKRIEAIPQIDKYLKSSKYIAWPLQGWQATFGGGDHPPKSDLVPRGSPGIHRDGGSGENLYFQSSDNGPQNQRNAPRITFGGPSDSTGSNQNGERSGARSKQRRPQGLPNNTASWFTALTQHGKEDLKFPRGQGVPINTNSSPDDQIGYYRRATRRIRGGDGKMKDLSPRWYFYYLGTGPEAGLPYGANKDGIIWVATEGALNTPKDHIGTRNPANNAAIVLQLPQGTTLPKGFYAEGSRGGSQASSRSSSRSRNSSRNSTPGSSRGTSPARMAGNGGDAALALLLLDRLNQLESKMSGKGQQQQGQTVTKKSAAEASKKPRQKRTATKAYNVTQAFGRRGPEQTQGNFGDQELIRQGTDYKHWPQIAQFAPSASAFFGMSRIEMEVTPSGTWLTYTGAIKLDDKDPNFKDQVILLNKHIDAYKTFPPTEPKKDKKKKADETQALPQRQKKQQTVTLLPAADLDDFSKQLQQSMSSADSTQA

SEQ ID NO: 835 - protein, 671 aa, Artificial Sequence
  Description of Artificial Sequence: Synthetic polypeptide
MHHHHHHGGSGSPILGYWKIKGLVQPTRLLLEYLEEKYEEHLYERDEGDKWRNKKFELGLEFPNLPYYIDGDVKLTQSMAIIRYIADKHNMLGGCPKERAEISMLEGAVLDIRYGVSRIAYSKDFETLKVDFLSKLPEMLKMFEDRLCHKTYLNGDHVTHPDFMLYDALDVVLYMDPMCLDAFPKLVCFKKRIEAIPQIDKYLKSSKYIAWPLQGWQATFGGGDHPPKSDLVPRGSPGIHRDGGSGENLYFQSSDNGPQNQRNAPRITFGGPSDSTGSNQNGERSGARSKQRRPQGLPNNTASWFTALTQHGKEDLKFPRGQGVPINTNSSPDDQIGYYRRATRRIRGGDGKMKDLSPRWYFYYLGTGPEAGLPYGANKDGIIWVATEGALNTPKDHIGTRNPANNAAIVLQLPQGTTLPKGFYAEGSRGGSQASSRSSSRSRNSSRNSTPGSSRGTSPARMAGNGGDAALALLLLDRLNQLESKMSGKGQQQQGQTVTKKSAAEASKKPRQKRTATKAYNVTQAFGRRGPDQTQGNFGDQELIRQGTDYKHWPQIAQFAPSASAFFGMSRIGMEVTPSGTWLTYTGAIKLDDKDPNFKDQVILLNKHIDAYKTFPPTEPKKDKKKKADETQALPQRQKKQQTVTLLPAADLDDFSKQLQQSMSSADSTQA

SEQ ID NO: 836 - protein, 671 aa, Artificial Sequence
  Description of Artificial Sequence: Synthetic polypeptide
MHHHHHHGGSGSPILGYWKIKGLVQPTRLLLEYLEEKYEEHLYERDEGDKWRNKKFELGLEFPNLPYYIDGDVKLTQSMAIIRYIADKHNMLGGCPKERAEISMLEGAVLDIRYGVSRIAYSKDFETLKVDFLSKLPEMLKMFEDRLCHKTYLNGDHVTHPDFMLYDALDVVLYMDPMCLDAFPKLVCFKKRIEAIPQIDKYLKSSKYIAWPLQGWQATFGGGDHPPKSDLVPRGSPGIHRDGGSGENLYFQSSDNGPQNQRNAPRITFGGPSDSTGSNQNGERSGARSKQRRPQGLPNNTASWFTALTQHGKEDLKFPRGQGVPINTNSSPDDQIGYYRRATRRIRGGDGKMKDLSPRWYFYYLGTGPEAGLPYGANKDGIIWVATEGALNTPKDHIGTRNPANYAAIVLQLPQGTTLPKGFYAEGSRGGSQASSRSSSRSRNSSRNSTPGSSRGTSPARMAGNGGDAALALLLLDRLNQLESKMSGKGQQQQGQTVTKKSAAEASKKPRQKRTATKAYNVTQAFGRRGPEQTQGNFGDQELIRQGTDYKHWPQIAQFAPSASAFFGMSRIGMEVTPSGTWLTYTGAIKLDDKDPNFKDQVILLNKHIDAYKTFPPTEPKKDKKKKADETQALPQRQKKQQTVTLLPAADLDDFSKQLQQSMSSADSTQA

SEQ ID NO: 837 - protein, 671 aa, Artificial Sequence
  Description of Artificial Sequence: Synthetic polypeptide
MHHHHHHGGSGSPILGYWKIKGLVQPTRLLLEYLEEKYEEHLYERDEGDKWRNKKFELGLEFPNLPYYIDGDVKLTQSMAIIRYIADKHNMLGGCPKERAEISMLEGAVLDIRYGVSRIAYSKDFETLKVDFLSKLPEMLKMFEDRLCHKTYLNGDHVTHPDFMLYDALDVVLYMDPMCLDAFPKLVCFKKRIEAIPQIDKYLKSSKYIAWPLQGWQATFGGGDHPPKSDLVPRGSPGIHRDGGSGENLYFQSSDNGPQNQRNAPRITFGGPSDSTGSNQNGERSGARSKQRRPQGLPNNTASWFTALTQHGKEDLKFPRGQGVPINTNSSPDDQIGYYRRATRRIRGGDGKMKDLSPRWYFYYLGTGPEAGLPYGANKDGIIWVATEGALNTPKDHIGTRNPANNAAIVLQLPQGTTLPKGFYAEGSRGGSQASSRSSSRSRNSSRNSTPGSSRGTSPARMAGNGGDAALALLLLDRLNQLESKMSGKGQQQQGQTVTKKSAAEASKKPRQKRTATKDYNVTQAFGRRGPEQTQGNFGDQDLIKLGTDYKHWPQIAQFAPSASAFFGMSRISTRETPSGTWLTYTGAIKLDKKDPNFKDQVILLNKHIDAYKTFPPTEPKKDKKKKADETQALPQRQKKQQTVTLLPAADLDDFSKQLQQSMSSADSTQA

SEQ ID NO: 838 - protein, 671 aa, Artificial Sequence
  Description of Artificial Sequence: Synthetic polypeptide
MHHHHHHGGSGSPILGYWKIKGLVQPTRLLLEYLEEKYEEHLYERDEGDKWRNKKFELGLEFPNLPYYIDGDVKLTQSMAIIRYIADKHNMLGGCPKERAEISMLEGAVLDIRYGVSRIAYSKDFETLKVDFLSKLPEMLKMFEDRLCHKTYLNGDHVTHPDFMLYDALDVVLYMDPMCLDAFPKLVCFKKRIEAIPQIDKYLKSSKYIAWPLQGWQATFGGGDHPPKSDLVPRGSPGIHRDGGSGENLYFQSSDNGPQNQRNAPRITFGGPSDSTGSNQNGERSGARSKQRRPQGLPNNTASWFTALTQHGKEDLKFPRGQGVPINTNSSPDDQIGYYRRDTRRIRGGDGKMKDLSPRWYFYYLGTGPEAGLPYGANKDGIIWVATEGALNTPKDHIGTRNPANNAAIVLQLPQGTTLPKGFYAEGSRGGSQASSRSSSRSRNSSRNSTPGSSRGTSPARMAGNGGDAALALLLLDRLNQLESKMSGKGQQQQGQTVTKKSAAEASKKPRQKRTATKAYNVTQAFGRRGPEQTQGNFGDQELIRQGTDYKHWPQIAQFAPSASAFFGMSRIGMEVTPSGTWLTYTGAIKLDDKDPNFKDQVILLNKHIDAYKTFPPTEPKKDKKKKADETQALPQRQKKQQTVTLLPAADLDDFSKQLQQSMSSADSTQA

SEQ ID NO: 839 - protein, 671 aa, Artificial Sequence
  Description of Artificial Sequence: Synthetic polypeptide
MHHHHHHGGSGSPILGYWKIKGLVQPTRLLLEYLEEKYEEHLYERDEGDKWRNKKFELGLEFPNLPYYIDGDVKLTQSMAIIRYIADKHNMLGGCPKERAEISMLEGAVLDIRYGVSRIAYSKDFETLKVDFLSKLPEMLKMFEDRLCHKTYLNGDHVTHPDFMLYDALDVVLYMDPMCLDAFPKLVCFKKRIEAIPQIDKYLKSSKYIAWPLQGWQATFGGGDHPPKSDLVPRGSPGIHRDGGSGENLYFQSSDNGPQNQRNAPRITFGGPSDSTGSNQNGERSGARSKQRRPQGLPNNTASWFTALTQHGKEDLKFPRGQGVPINTNSSPDDQIGYYRRATRRIRGGDGKMKDLSPRWYFYYLGTGPEAGLPYGANKDGIIWVATEGALNTPKDHIGTRNPANNAAIVLQLPQGTTLPKGFYAEGSRGGSQASSRSSSRSRNSSRNSTPGSSRGTSPARMAGNGGDAALALLLLDRLNQLESKMSGKGQQQQGQTVTKKSAAEASKKPRQKRTATKAYNVTQAFGRRGPEQTQGNFGDQELVRQGTDYKHWPQIAQFAPSASAFFGMSRIGMEVTPSGTWLTYTGAIKLDDKDPNFKDQVILLNKHIDAYKTFPPTEPKKDKKKKADETQALPQRQKKQQTVTLLPAADLDDFSKQLQQSMSSADSTQA

SEQ ID NO: 840 - protein, 671 aa, Artificial Sequence
  Description of Artificial Sequence: Synthetic polypeptide
MHHHHHHGGSGSPILGYWKIKGLVQPTRLLLEYLEEKYEEHLYERDEGDKWRNKKFELGLEFPNLPYYIDGDVKLTQSMAIIRYIADKHNMLGGCPKERAEISMLEGAVLDIRYGVSRIAYSKDFETLKVDFLSKLPEMLKMFEDRLCHKTYLNGDHVTHPDFMLYDALDVVLYMDPMCLDAFPKLVCFKKRIEAIPQIDKYLKSSKYIAWPLQGWQATFGGGDHPPKSDLVPRGSPGIHRDGGSGENLYFQSSDNGPQNQRNAPRITFGGPSDSTGSNQNGERSGARSKQRRPQGLPNNTASWFTALTQHGKEDLKFPRGQGVPINTNSSPDDQIGYYRRATRRIRGGDGKMKDLSPRWYFYYLGTGPEAGLPYGANKDGIIWVATEGALNTPKDHIGTRNPANNAAIVLQLPQGTTLPKGFYAEGSRGGSQASSRSSSRSRNSSRNSTPGSSRGTSPARMAGNGGDAALALLLLDRLNQLESKMSGKGQQQQGQTVTKKSAAEASKKPRQKRTATKGYNVTQAFGRRGPEQTQGNFGDQDLIKLGTDYKHWPQIAQFAPSASAFFGMSRISTRETPSGTWLTYTGAIKLDKKDPNFKDQVILLNKHIDAYKTFPPTEPKKDKKKKADETQALPQRQKKQQTVTLLPAADLDDFSKQLQQSMSSADSTQA

SEQ ID NO: 841 - protein, 671 aa, Artificial Sequence
  Description of Artificial Sequence: Synthetic polypeptide
MHHHHHHGGSGSPILGYWKIKGLVQPTRLLLEYLEEKYEEHLYERDEGDKWRNKKFELGLEFPNLPYYIDGDVKLTQSMAIIRYIADKHNMLGGCPKERAEISMLEGAVLDIRYGVSRIAYSKDFETLKVDFLSKLPEMLKMFEDRLCHKTYLNGDHVTHPDFMLYDALDVVLYMDPMCLDAFPKLVCFKKRIEAIPQIDKYLKSSKYIAWPLQGWQATFGGGDHPPKSDLVPRGSPGIHRDGGSGENLYFQSSDNGPQNQRNAPRITFGGPSDSTGSNQNGERSGARSKQRRPQGLPNNTASWFTALTQHGKEDLKFPRGQGVPINTNSSPDDQIGYYRRATRRIRGGDGKMKDLSPRWYFYYLGTGPEANLPYGANKDGIIWVATEGALNTPKDHIGTRNPANNAAIVLQLPQGTTLPKGFYAEGSRGGSQASSRSSSRSRNSSRNSTPGSSRGTSPARMAGNGGDAALALLLLDRLNQLESKMSGKGQQQQGQTVTKKSAAEASKKPRQKRTATKAYNVTQAFGRRGPEQTQGNFGDQELIRQGTDYKHWPQIAQFAPSASAFFGMSRIGMEVTPSGTWLTYTGAIKLDDKDPNFKDQVILLNKHIDAYKTFPPTEPKKDKKKKADETQALPQRQKKQQTVTLLPAADLDDFSKQLQQSMSSADSTQA

SEQ ID NO: 842 - protein, 671 aa, Artificial Sequence
  Description of Artificial Sequence: Synthetic polypeptide
MHHHHHHGGSGSPILGYWKIKGLVQPTRLLLEYLEEKYEEHLYERDEGDKWRNKKFELGLEFPNLPYYIDGDVKLTQSMAIIRYIADKHNMLGGCPKERAEISMLEGAVLDIRYGVSRIAYSKDFETLKVDFLSKLPEMLKMFEDRLCHKTYLNGDHVTHPDFMLYDALDVVLYMDPMCLDAFPKLVCFKKRIEAIPQIDKYLKSSKYIAWPLQGWQATFGGGDHPPKSDLVPRGSPGIHRDGGSGENLYFQSSDNGPQNQRNAPRITFGGPSDSTGSNQNGERSGARSKQRRPQGLPNNTASWFTALTQHGKEDLKFPRGQGVPINTNSSPDDQIGYYRRATRRIRGGDGKMKDLSPRWYFYYLGTGPEAGLPYGANKDGIIWVATEGALNTPKDHIGTRNPANNAAIVLQLPQGTTLPKGFYAEGSRGGSQASSRSSSRSRNSSRNSTPGSSRGTSPARMAGNGGDAALALLLLDRLNQLESKMSGKGQQQQGQTVTKKSAAEASKKPRQKRTATKGYNVTQAFGRRGPEQTQGNFGDQDLIREGTDYKHWPQIAQFAPSASAFFGMSRISTEETPSGTWLTYTGAIKLDKKDPNFKDQVILLNKHIDAYKTFPPTEPKKDKKKKADETQALPQRQKKQQTVTLLPAADLDDFSKQLQQSMSSADSTQA

SEQ ID NO: 843 - protein, 671 aa, Artificial Sequence
  Description of Artificial Sequence: Synthetic polypeptide
MHHHHHHGGSGSPILGYWKIKGLVQPTRLLLEYLEEKYEEHLYERDEGDKWRNKKFELGLEFPNLPYYIDGDVKLTQSMAIIRYIADKHNMLGGCPKERAEISMLEGAVLDIRYGVSRIAYSKDFETLKVDFLSKLPEMLKMFEDRLCHKTYLNGDHVTHPDFMLYDALDVVLYMDPMCLDAFPKLVCFKKRIEAIPQIDKYLKSSKYIAWPLQGWQATFGGGDHPPKSDLVPRGSPGIHRDGGSGENLYFQSSDNGPQNQRNAPRITFGGPSDSTGSNQNGERSGARSKQRRPQGLPNNTASWFTALTQHGKEDLKFPRGQGVPINTNSSPDDQIGYYRRATRRIRGGDGKMKDLSPRWYFYYLGTGPEAGLPYGANKDGIIWVATEGALNTPKDHIGTRNPANNAAIVLQLPQGTTLPKGFYAEGSRGGSQASSRSSSRSRNSSRNSTPGSSRGTSPARMAGNGGDAALALLLLDRLNQLESKMSGKGQQQQGQTVTKKDAAEASKKPRQKRTATKAYNVTQAFGRRGPEQTQGNFGDQELIRQGTDYKHWPQIAQFAPSASAFFGMSRIGMEVTPSGTWLTYTGAIKLDDKDPNFKDQVILLNKHIDAYKTFPPTEPKKDKKKKADETQALPQRQKKQQTVTLLPAADLDDFSKQLQQSMSSADSTQA

SEQ ID NO: 844 - protein, 671 aa, Artificial Sequence
  Description of Artificial Sequence: Synthetic polypeptide
MHHHHHHGGSGSPILGYWKIKGLVQPTRLLLEYLEEKYEEHLYERDEGDKWRNKKFELGLEFPNLPYYIDGDVKLTQSMAIIRYIADKHNMLGGCPKERAEISMLEGAVLDIRYGVSRIAYSKDFETLKVDFLSKLPEMLKMFEDRLCHKTYLNGDHVTHPDFMLYDALDVVLYMDPMCLDAFPKLVCFKKRIEAIPQIDKYLKSSKYIAWPLQGWQATFGGGDHPPKSDLVPRGSPGIHRDGGSGENLYFQSSDNGPQNQRNAPRITFGGPSDSTGSNQNGERSGARSKQRRPQGLPNNTASWFTALTQHGKEDLKFPRGQGVPINTNSSPDDQIGYYRRATRRIRGGDGKMKDLSPRWYFYYLGTGPEAGLPYGANKDGIIWVATEGALNTPKDHIGTRNPANNAAIVLQLPQGTTLPKGFYAEGSRGGSQASSRSSSRSRNSSRNSTPGSSRGTSPARMAGNGGDAALALLLLDRLNQLESKMSGKGQQQQGQTVTKKSAAEASKHPRQKRTATKAYNVTQAFGRRGPEQTQGNFGDQELIRQGTDYKHWPQIAQFAPSASAFFGMSRIGMEVTPSGTWLTYTGAIKLDDKDPNFKDQVILLNKHIDAYKTFPPTEPKKDKKKKADETQALPQRQKKQQTVTLLPAADLDDFSKQLQQSMSSADSTQA

SEQ ID NO: 845 - protein, 671 aa, Artificial Sequence
  Description of Artificial Sequence: Synthetic polypeptide
MHHHHHHGGSGSPILGYWKIKGLVQPTRLLLEYLEEKYEEHLYERDEGDKWRNKKFELGLEFPNLPYYIDGDVKLTQSMAIIRYIADKHNMLGGCPKERAEISMLEGAVLDIRYGVSRIAYSKDFETLKVDFLSKLPEMLKMFEDRLCHKTYLNGDHVTHPDFMLYDALDVVLYMDPMCLDAFPKLVCFKKRIEAIPQIDKYLKSSKYIAWPLQGWQATFGGGDHPPKSDLVPRGSPGIHRDGGSGENLYFQSSDNGPQNQRNAPRITFGGPSDSTGSNQNGERSGARSKQRRPQGLPNNTASWFTALTQHGKEDLKFPRGQGVPINTNSSPDDQIGYYRRATRRIRGGDGKMKDLSPRWYFYYLGTGPEAGLPYGANKDGIIWVATEGALNTPKDHIGTRNPANNAAIVLQLPQGTTLPKGFYAEGSRGGSQASSRSSSRSRNSSRNSTPGSSRGTSPARMAGNGGDAALALLLLDRLNQLESKMSGKGQQQQGQTVTKKSAAEASKKPRQKRTATKEYNVTQAFGRRGPEQTQGNFGDQDLIKLGTDYKHWPQIAQFAPSASAFFGMSRISTEETPSGTWLTYTGAIKLDKKDPNFKDQVILLNKHIDAYKTFPPTEPKKDKKKKADETQALPQRQKKQQTVTLLPAADLDDFSKQLQQSMSSADSTQA

SEQ ID NO: 846 - protein, 671 aa, Artificial Sequence
  Description of Artificial Sequence: Synthetic polypeptide
MHHHHHHGGSGSPILGYWKIKGLVQPTRLLLEYLEEKYEEHLYERDEGDKWRNKKFELGLEFPNLPYYIDGDVKLTQSMAIIRYIADKHNMLGGCPKERAEISMLEGAVLDIRYGVSRIAYSKDFETLKVDFLSKLPEMLKMFEDRLCHKTYLNGDHVTHPDFMLYDALDVVLYMDPMCLDAFPKLVCFKKRIEAIPQIDKYLKSSKYIAWPLQGWQATFGGGDHPPKSDLVPRGSPGIHRDGGSGENLYFQSSDNGPQNQRNAPRITFGGPSDSTGSNQNGERSGARSKQRRPQGLPNNTASWFTALTQHGKEDLKFPRGQGVPINTNSSPDDQIGYYRRATRRIRGGDGKMKDLSPRWYFYYLGTGPEAGLPYGANKDGIIWVATEGALNTPKDHIGTRNPANNAAIVLQLPQGTTLPKGFYAEGSRGGSQASSRSSERSRNSSRNSTPGSSRGTEPARMAGNGGDAALALLLLDRLNQLESKMSGKGQQQQGQTVTKKSAAEASKKPRQKRTATKAYNVTQAFGRRGPEQTQGNFGDQELIRQGTDYKHWPQIAQFAPSASAFFGMSRIGMEVTPSGTWLTYTGAIKLDDKDPNFKDQVILLNKHIDAYKTFPPTEPKKDKKKKADETQALPQRQKKQQTVTLLPAADLDDFSKQLQQSMSSADSTQA

SEQ ID NO: 847 - protein, 671 aa, Artificial Sequence
  Description of Artificial Sequence: Synthetic polypeptide
MHHHHHHGGSGSPILGYWKIKGLVQPTRLLLEYLEEKYEEHLYERDEGDKWRNKKFELGLEFPNLPYYIDGDVKLTQSMAIIRYIADKHNMLGGCPKERAEISMLEGAVLDIRYGVSRIAYSKDFETLKVDFLSKLPEMLKMFEDRLCHKTYLNGDHVTHPDFMLYDALDVVLYMDPMCLDAFPKLVCFKKRIEAIPQIDKYLKSSKYIAWPLQGWQATFGGGDHPPKSDLVPRGSPGIHRDGGSGENLYFQSSDNGPQNQRNAPRITFGGPSDSTGSNQNGERSGARSKQRRPQGLPNNTASWFTALTQHGKEDLKFPRGQGVPINTNSSPDDQIGYYRRATRRIRGGDGKMKDLSPRWYFYYLGTGPEAGLPYGANKDGIIWVATEGALNTPKDHIGTRNPANNAAIVLQLPQGTTLPKGFYAEGSRGGSQASSRSSSRSRNSSRNSTPGSSRGTSPARMAGNGGDAALALLLLDRLNQLESKMSGKGQQQQGQTVTKKSAAEASKKPRQKRTATKAYNVTQAFGRRGPEQTQGNFGDQELIRQGTDYKHWPQIAQFAPSASAFFGMSRIGMEVTPSGTWLTYTGAIKLDDKDPNFKEQVILLNKHIDAYKTFPPTEPKKDKKKKADETQALPQRQKKQQTVTLLPAADLDDFSKQLQQSMSSADSTQA

SEQ ID NO: 848 - protein, 671 aa, Artificial Sequence
  Description of Artificial Sequence: Synthetic polypeptide
MHHHHHHGGSGSPILGYWKIKGLVQPTRLLLEYLEEKYEEHLYERDEGDKWRNKKFELGLEFPNLPYYIDGDVKLTQSMAIIRYIADKHNMLGGCPKERAEISMLEGAVLDIRYGVSRIAYSKDFETLKVDFLSKLPEMLKMFEDRLCHKTYLNGDHVTHPDFMLYDALDVVLYMDPMCLDAFPKLVCFKKRIEAIPQIDKYLKSSKYIAWPLQGWQATFGGGDHPPKSDLVPRGSPGIHRDGGSGENLYFQSSDNGPQNQRNAPRITFGGPSDSTGSNQNGERSGARSKQRRPQGLPNNTASWFTALTQHGKEDLKFPRGQGVPINTNSSPDDQIGYYRRATRRIRGGDGKMKDLSPRWYFYYLGTGPEAGLPYGANKDGIIWVATEGALNTPKDHIGTRNPANNAAIVLQLPQGTTLPKGFYAEGSRGGSQASSRSSSRSRNSSRNSTPGSSRGTSPARMAGNGGDAALALLLLDRLNQLESKMSGKGQQQQGQTVTKKSAAEASKKPRQKRTATKGYNVTQAFGRRGPEQTQGNFGDQDLIRLGTDYKHWPQIAQFAPSASAFFGMSRIGMEVTPSGTWLTYTGAIKLDDKDPNFKDQVILLNKHIDAYKTFPPTEPKKDKKKKADETQALPQRQKKQQTVTLLPAADLDDFSKQLQQSMSSADSTQA

SEQ ID NO: 849 - protein, 671 aa, Artificial Sequence
  Description of Artificial Sequence: Synthetic polypeptide
MHHHHHHGGSGSPILGYWKIKGLVQPTRLLLEYLEEKYEEHLYERDEGDKWRNKKFELGLEFPNLPYYIDGDVKLTQSMAIIRYIADKHNMLGGCPKERAEISMLEGAVLDIRYGVSRIAYSKDFETLKVDFLSKLPEMLKMFEDRLCHKTYLNGDHVTHPDFMLYDALDVVLYMDPMCLDAFPKLVCFKKRIEAIPQIDKYLKSSKYIAWPLQGWQATFGGGDHPPKSDLVPRGSPGIHRDGGSGENLYFQSSDNGPQNQRNAPRITFGGPSDSTGSNQNGERSGARSKQRRPQGLPNNTASWFTPLTQFGKEDLKFPPGQGVPINTNSSPDDQIGYYRRATRRIRGGDGKMKDLPPKWYFYYLGTGPHADLPYGQKKDGVFWVARPGALNTPKDHIGTRNPANNAAIPLQLPPGTKLPKGFYAEGSRGGSQASSRSSSRSRNSSRNSTPGSSRGTSPARMAGNGGDAALALLLLDRLNQLESKMSGKGQQQQGQTVTKKSAAEASKKPRQKRTATKAYNVTQAFGRRGPEQTQGNFGDQELIRQGTDYKHWPQIAQFAPSASAFFGMSRIGMEVTPSGTWLTYTGAIKLDDKDPNFKDQVILLNKHIDAYKTFPPTEPKKDKKKKADETQALPQRQKKQQTVTLLPAADLDDFSKQLQQSMSSADSTQA

SEQ ID NO: 850 - protein, 671 aa, Artificial Sequence
  Description of Artificial Sequence: Synthetic polypeptide
MHHHHHHGGSGSPILGYWKIKGLVQPTRLLLEYLEEKYEEHLYERDEGDKWRNKKFELGLEFPNLPYYIDGDVKLTQSMAIIRYIADKHNMLGGCPKERAEISMLEGAVLDIRYGVSRIAYSKDFETLKVDFLSKLPEMLKMFEDRLCHKTYLNGDHVTHPDFMLYDALDVVLYMDPMCLDAFPKLVCFKKRIEAIPQIDKYLKSSKYIAWPLQGWQATFGGGDHPPKSDLVPRGSPGIHRDGGSGENLYFQSSDNGPQNQRNAPRITFGGPSDSTGSNQNGERSGARSKQRRPQGLPNNTASWFTALTQHGKEDLKFPRGQGVPINTNSSPDDQIGYYRRATRRIRGGDGKMKDLSPRWYFYYLGTGPEAGLPYGANKDGIIWVATEGALNTPKDHIGTRNPANNAAIVLQLPQGTTLPKGFYAEGSRGGSQASSRSSSRSRNSSRNSTPGSSRGTSPARMAGNGGDAALALLLLDRLNQLESKMSGKGQQQQGQTVTKKSAAEASKKPRQKRTATKAYNVTQAFGSRGPEQTQGNFGDQELIRQGTDYKHWPQIAQFAPSASAFFGMSRIGMEVTPSGTWLTYTGAIKLDDKDPNFKDQVILLNKHIDAYKTFPPTEPKKDKKKKADETQALPQRQKKQQTVTLLPAADLDDFSKQLQQSMSSADSTQA

SEQ ID NO: 851 - protein, 671 aa, Artificial Sequence
  Description of Artificial Sequence: Synthetic polypeptide
MHHHHHHGGSGSPILGYWKIKGLVQPTRLLLEYLEEKYEEHLYERDEGDKWRNKKFELGLEFPNLPYYIDGDVKLTQSMAIIRYIADKHNMLGGCPKERAEISMLEGAVLDIRYGVSRIAYSKDFETLKVDFLSKLPEMLKMFEDRLCHKTYLNGDHVTHPDFMLYDALDVVLYMDPMCLDAFPKLVCFKKRIEAIPQIDKYLKSSKYIAWPLQGWQATFGGGDHPPKSDLVPRGSPGIHRDGGSGENLYFQSSDNGPQNQRNAPRITFGGPSDSTGSNQNGERSGARSKQRRPQGLPNNTASWFTALTQHGKEDLKFPRGQGVPINTNSSPDDQIGYYRRATRRIRGGDGKMKDLSPRWYFYYLGTGPEAGLPYGANKDGIIWVATEGALNTPKDHIGTRNPANNAAIVLQLPQGTTLPKGFYAEGSRGGSQASSRSSSRSRNSSRNSTPGSSRGTSPARMAGNGGDAALALLLLDRLNQLESKMSGKGQQQQGQTVTKKSAAEASKKPRQKRTATKAYNVTQAFGRRGPEQTQGNFGDQELIRQGSDYKHWPQIAQFAPSASAFFGMSRIGMEVTPSGTWLTYTGAIKLDDKDPNFKDQVILLNKHIDAYKTFPPTEPKKDKKKKADETQALPQRQKKQQTVTLLPAADLDDFSKQLQQSMSSADSTQA

SEQ ID NO: 852 - protein, 671 aa, Artificial Sequence
  Description of Artificial Sequence: Synthetic polypeptide
MHHHHHHGGSGSPILGYWKIKGLVQPTRLLLEYLEEKYEEHLYERDEGDKWRNKKFELGLEFPNLPYYIDGDVKLTQSMAIIRYIADKHNMLGGCPKERAEISMLEGAVLDIRYGVSRIAYSKDFETLKVDFLSKLPEMLKMFEDRLCHKTYLNGDHVTHPDFMLYDALDVVLYMDPMCLDAFPKLVCFKKRIEAIPQIDKYLKSSKYIAWPLQGWQATFGGGDHPPKSDLVPRGSPGIHRDGGSGENLYFQSSDNGPQNQRNAPRITFGGPSDSTGSNQNGERSGARSKQRRPQGLPNNTASWFTALTQHGKEDLKFPRGQGVPINTNSSPDDQIGYYRRATRRIRGGDGKMKDLSPRWYFYYLGTGPEAGLPYGANKDGIIWVATEGALNTPKDHIGTRNPANNAAIVLQLPQGTTLPKGFYAEGSRGGSQASSRSSSRSRNSSRNSTPGSSRGTEPARMAGNGGDAALALLLLDRLNQLESKMSGKGQQQQGQTVTKKSAAEASKKPRQKRTATKAYNVTQAFGRRGPEQTQGNFGDQELIRQGTDYKHWPQIAQFAPSASAFFGMSRIGMEVTPSGTWLTYTGAIKLDDKDPNFKDQVILLNKHIDAYKTFPPTEPKKDKKKKADETQALPQRQKKQQTVTLLPAADLDDFSKQLQQSMSSADSTQA

SEQ ID NO: 853 - protein, 671 aa, Artificial Sequence
  Description of Artificial Sequence: Synthetic polypeptide
MHHHHHHGGSGSPILGYWKIKGLVQPTRLLLEYLEEKYEEHLYERDEGDKWRNKKFELGLEFPNLPYYIDGDVKLTQSMAIIRYIADKHNMLGGCPKERAEISMLEGAVLDIRYGVSRIAYSKDFETLKVDFLSKLPEMLKMFEDRLCHKTYLNGDHVTHPDFMLYDALDVVLYMDPMCLDAFPKLVCFKKRIEAIPQIDKYLKSSKYIAWPLQGWQATFGGGDHPPKSDLVPRGSPGIHRDGGSGENLYFQSSDNGPQNQRNAPRITFGGPSDSTGSNQNGERSGARSKQRRPQGLPNNTASWFTALTQHGKEDLKFPRGQGVPINTNSSPDDQIGYYRRATRRIRGGDGKMKDLSPRWYFYYLGTGPEAGLPYGANKDGIIWVATEGALNTPKDHIGTRNPANNAAIVLQLPQGTTLPKGFYAEGSRGGSQASSRSSSRSRNSSRNSTPGSSRGTSPARMAGNGGDAALALLLLDRLNQLESKMSGKGQQQQGQTVTKKSAAEASKKPRQKRTATKAYNVTQAFGRRGPEQTQGNFGDQELIRQGTDYKHWPQIAQFAPSASAFFGMSRIGMEVTPSGTWLTYTGAIKLDDKDPNFKDQVELLNKHIDAYKTFPPTEPKKDKKKKADETQALPQRQKKQQTVTLLPAADLDDFSKQLQQSMSSADSTQA

SEQ ID NO: 854 - protein, 671 aa, Artificial Sequence
  Description of Artificial Sequence: Synthetic polypeptide
MHHHHHHGGSGSPILGYWKIKGLVQPTRLLLEYLEEKYEEHLYERDEGDKWRNKKFELGLEFPNLPYYIDGDVKLTQSMAIIRYIADKHNMLGGCPKERAEISMLEGAVLDIRYGVSRIAYSKDFETLKVDFLSKLPEMLKMFEDRLCHKTYLNGDHVTHPDFMLYDALDVVLYMDPMCLDAFPKLVCFKKRIEAIPQIDKYLKSSKYIAWPLQGWQATFGGGDHPPKSDLVPRGSPGIHRDGGSGENLYFQSSDNGPQNQRNAPRITFGGPSDSTGSNQNGERSGARSKQRRPQGLPNNTASWFTALTQHGKEDLKFPRGQGVPINTNSSPDDQIGYYRRATRRIRGGDGKMKDLSPRWYFYYLGTGPEAGLPYGANKDGIIWVATEGALNTPKDHIGTRNPANNAAIVLQLPQGTTLPKGFYAEGSRGGSQASSRSSSRSRNSSRNSTPGSSRGTSPARMAGNGGDAALALLLLDRLNQLESKMSGKGQQQQGQTVTKKSAAEASKKPRQKRTATKAYNVTQAFGRRGPEQTQGNFGDQELIRQGTDYKHWPQIAQFAPSASAFFGMSRIGMEITPSGTWLTYTGAIKLDDKDPNFKDQVILLNKHIDAYKTFPPTEPKKDKKKKADETQALPQRQKKQQTVTLLPAADLDDFSKQLQQSMSSADSTQA

SEQ ID NO: 855 - protein, 671 aa, Artificial Sequence
  Description of Artificial Sequence: Synthetic polypeptide
MHHHHHHGGSGSPILGYWKIKGLVQPTRLLLEYLEEKYEEHLYERDEGDKWRNKKFELGLEFPNLPYYIDGDVKLTQSMAIIRYIADKHNMLGGCPKERAEISMLEGAVLDIRYGVSRIAYSKDFETLKVDFLSKLPEMLKMFEDRLCHKTYLNGDHVTHPDFMLYDALDVVLYMDPMCLDAFPKLVCFKKRIEAIPQIDKYLKSSKYIAWPLQGWQATFGGGDHPPKSDLVPRGSPGIHRDGGSGENLYFQSSDNGPQNQRNAPRITFGGPSDSTGSNQNGERSGARSKQRRPQGLPNNTASWFTPLVQFGKEDLKFPPGQGVPINTNSSPDDQIGYYRRATRRIRGGDGKMKDLPPKWYFYYLGTGPHADLPYGQKQDGVFWVARPGALNTPKDHIGTRNPANNAAIPLQLPPGTKLPKGFYAEGSRGGSQASSRSSSRSRNSSRNSTPGSSRGTSPARMAGNGGDAALALLLLDRLNQLESKMSGKGQQQQGQTVTKKSAAEASKKPRQKRTATKAYNVTQAFGRRGPEQTQGNFGDQELIRQGTDYKHWPQIAQFAPSASAFFGMSRIGMEVTPSGTWLTYTGAIKLDDKDPNFKDQVILLNKHIDAYKTFPPTEPKKDKKKKADETQALPQRQKKQQTVTLLPAADLDDFSKQLQQSMSSADSTQA

SEQ ID NO: 856 - protein, 671 aa, Artificial Sequence
  Description of Artificial Sequence: Synthetic polypeptide
MHHHHHHGGSGSPILGYWKIKGLVQPTRLLLEYLEEKYEEHLYERDEGDKWRNKKFELGLEFPNLPYYIDGDVKLTQSMAIIRYIADKHNMLGGCPKERAEISMLEGAVLDIRYGVSRIAYSKDFETLKVDFLSKLPEMLKMFEDRLCHKTYLNGDHVTHPDFMLYDALDVVLYMDPMCLDAFPKLVCFKKRIEAIPQIDKYLKSSKYIAWPLQGWQATFGGGDHPPKSDLVPRGSPGIHRDGGSGENLYFQSSDNGPQNQRNAPRITFGGPSDSTGSNQNGERSGARSKQRRPQGLPNNTASWFTALTQHGKEDLKFPRGQGVPINTNSSPDDQIGYYRRATRRIRGGDGKMKDLSPRWYFYYLGTGPEAGLPYGANKDGIIWVATEGALNTPKDHIGTRNPANNAAIVLQLPQGTTLPKGFYAEGSRGGSQASSRSSSRSRNSSRNSTPGSSRGTSPARMAGNGGDAALALLLLDRLNQLESKMSGKGQQQQGQTVTKKSAAEASKKPRQKRTATKAYNVTQAFGRRGPEQTQGNFGDQELIRKGTDYKHWPQIAQFAPSASAFFGMSRIGMEVTPSGTWLTYTGAIKLDDKDPNFKDQVILLNKHIDAYKTFPPTEPKKDKKKKADETQALPQRQKKQQTVTLLPAADLDDFSKQLQQSMSSADSTQA

SEQ ID NO: 857 - protein, 671 aa, Artificial Sequence
  Description of Artificial Sequence: Synthetic polypeptide
MHHHHHHGGSGSPILGYWKIKGLVQPTRLLLEYLEEKYEEHLYERDEGDKWRNKKFELGLEFPNLPYYIDGDVKLTQSMAIIRYIADKHNMLGGCPKERAEISMLEGAVLDIRYGVSRIAYSKDFETLKVDFLSKLPEMLKMFEDRLCHKTYLNGDHVTHPDFMLYDALDVVLYMDPMCLDAFPKLVCFKKRIEAIPQIDKYLKSSKYIAWPLQGWQATFGGGDHPPKSDLVPRGSPGIHRDGGSGENLYFQSSDNGPQNQRNAPRITFGGPSDSTGSNQNGERSGARSKQRRPQGLPNNTASWFTALTQHGKEDLKFPRGQGVPINTNSSPDDQIGYYRRATRRIRGGDGKMKDLSPRWYFYYLGTGPEAGLPYGANKDGIIWVATEGALNTPKDHIGTRNPANNAAIVLQLPQGTTLPKGFYAEGSRGGSQASSRSSSRSRNSSRNSTPGSSRGTSPARMAGNGGDAALALLLLDRLNQLESKMSGKGQQQQGQTVTKKSAAEASKKPRQKRTATKACNVTQAFGRRGPEQTQGNFGDQELIRQGTDYKHWPQIAQFAPSASAFFGMSRIGMEVTPSGTWLTYTGAIKLDDKDPNFKDQVILLNKHIDAYKTFPPTEPKKDKKKKADETQALPQRQKKQQTVTLLPAADLDDFSKQLQQSMSSADSTQA

SEQ ID NO: 858 - protein, 671 aa, Artificial Sequence
  Description of Artificial Sequence: Synthetic polypeptide
MHHHHHHGGSGSPILGYWKIKGLVQPTRLLLEYLEEKYEEHLYERDEGDKWRNKKFELGLEFPNLPYYIDGDVKLTQSMAIIRYIADKHNMLGGCPKERAEISMLEGAVLDIRYGVSRIAYSKDFETLKVDFLSKLPEMLKMFEDRLCHKTYLNGDHVTHPDFMLYDALDVVLYMDPMCLDAFPKLVCFKKRIEAIPQIDKYLKSSKYIAWPLQGWQATFGGGDHPPKSDLVPRGSPGIHRDGGSGENLYFQSSDNGPQNQRNAPRITFGGPSDSTGSNQNGERSGARSKQRRPQGLPNNTASWFTALTQHGKEDLKFPRGQGVPINTNSSPDDQIGYYRRATRRIRGGDGKMKDLSPRWYFYYLGTGPEAGLPYGANKDGIIWVATEGALNTPKDHIGTRNPANNAAIMLQLPQGTTLPKGFYAEGSRGGSQASSRSSSRSRNSSRNSTPGSSRGTSPARMAGNGGDAALALLLLDRLNQLESKMSGKGQQQQGQTVTKKSAAEASKKPRQKRTATKAYNVTQAFGRRGPEQTQGNFGDQELIRQGTDYKHWPQIAQFAPSASAFFGMSRIGMEVTPSGTWLTYTGAIKLDDKDPNFKDQVILLNKHIDAYKTFPPTEPKKDKKKKADETQALPQRQKKQQTVTLLPAADLDDFSKQLQQSMSSADSTQA

SEQ ID NO: 859 - protein, 671 aa, Artificial Sequence
  Description of Artificial Sequence: Synthetic polypeptide
MHHHHHHGGSGSPILGYWKIKGLVQPTRLLLEYLEEKYEEHLYERDEGDKWRNKKFELGLEFPNLPYYIDGDVKLTQSMAIIRYIADKHNMLGGCPKERAEISMLEGAVLDIRYGVSRIAYSKDFETLKVDFLSKLPEMLKMFEDRLCHKTYLNGDHVTHPDFMLYDALDVVLYMDPMCLDAFPKLVCFKKRIEAIPQIDKYLKSSKYIAWPLQGWQATFGGGDHPPKSDLVPRGSPGIHRDGGSGENLYFQSSDNGPQNQRNAPRITFGGPSDSTGSNQNGERSGARSKQRRPQGLPNNTASWFTALTQHGKEDLKFPRGQGVPINTNSSPDDQIGYYRRATRRIRGGDGKMKDLSPRWYFYYLGTGPEAGLPYGANKDGIIWVATKGALNTPKDHIGTRNPANNAAIVLQLPQGTTLPKGFYAEGSRGGSQASSRSSSRSRNSSRNSTPGSSRGTSPARMAGNGGDAALALLLLDRLNQLESKMSGKGQQQQGQTVTKKSAAEASKKPRQKRTATKAYNVTQAFGRRGPEQTQGNFGDQELIRQGTDYKHWPQIAQFAPSASAFFGMSRIGMEVTPSGTWLTYTGAIKLDDKDPNFKDQVILLNKHIDAYKTFPPTEPKKDKKKKADETQALPQRQKKQQTVTLLPAADLDDFSKQLQQSMSSADSTQA

SEQ ID NO: 860 - protein, 671 aa, Artificial Sequence
  Description of Artificial Sequence: Synthetic polypeptide
MHHHHHHGGSGSPILGYWKIKGLVQPTRLLLEYLEEKYEEHLYERDEGDKWRNKKFELGLEFPNLPYYIDGDVKLTQSMAIIRYIADKHNMLGGCPKERAEISMLEGAVLDIRYGVSRIAYSKDFETLKVDFLSKLPEMLKMFEDRLCHKTYLNGDHVTHPDFMLYDALDVVLYMDPMCLDAFPKLVCFKKRIEAIPQIDKYLKSSKYIAWPLQGWQATFGGGDHPPKSDLVPRGSPGIHRDGGSGENLYFQSSDNGPQNQRNAPRITFGGPSDSTGSNQNGERSGARSKQRRPQGLPNNTASWFTALTQHGKEDLKFPRGQGVPINTNSSPDDQIGYYRRATRRIRGGDGKMKDLSPRWYFYYLGTGPEAGLPYGANQDGIIWVATEGALNTPKDHIGTRNPANNAAIVLQLPQGTTLPKGFYAEGSRGGSQASSRSSSRSRNSSRNSTPGSSRGTSPARMAGNGGDAALALLLLDRLNQLESKMSGKGQQQQGQTVTKKSAAEASKKPRQKRTATKAYNVTQAFGRRGPEQTQGNFGDQELIRQGTDYKHWPQIAQFAPSASAFFGMSRIGMEVTPSGTWLTYTGAIKLDDKDPNFKDQVILLNKHIDAYKTFPPTEPKKDKKKKADETQALPQRQKKQQTVTLLPAADLDDFSKQLQQSMSSADSTQA

SEQ ID NO: 861 - protein, 671 aa, Artificial Sequence
  Description of Artificial Sequence: Synthetic polypeptide
MHHHHHHGGSGSPILGYWKIKGLVQPTRLLLEYLEEKYEEHLYERDEGDKWRNKKFELGLEFPNLPYYIDGDVKLTQSMAIIRYIADKHNMLGGCPKERAEISMLEGAVLDIRYGVSRIAYSKDFETLKVDFLSKLPEMLKMFEDRLCHKTYLNGDHVTHPDFMLYDALDVVLYMDPMCLDAFPKLVCFKKRIEAIPQIDKYLKSSKYIAWPLQGWQATFGGGDHPPKSDLVPRGSPGIHRDGGSGENLYFQSSDNGPQNQRNAPRITFGGPSDSTGSNQNGERSGARSKQRRPQGLPNNTASWFTALTQHGKEDLKFPRGQGVPINTNSSPDDQIGYYRRATRRIRGGDGKMKDLSPRWYFYYLGTGPEAGLPYGANKDGIIWVATEGALNTPKDHIGTRNPANNAAIVLQLPQGTTLPKGFYAEGSRGGSQASSRSSSRSRNSSRNSTPGSSRGTSPARMAGNGGDAALALLLLDRLNQLESKMSGKGQQQQGQTVTKKSAAEMSKKPRWKRTATKGYNVTQAFGKRGPKDTQGNFGDAELIKQGTDYKHWPQIAQFVPSAAAFFFMSRIGMKETPDGVWLTYTGTIKLDKDDPNFDDQVKLLNKHIDAYKTFPPTEPKKDKKKKADETQALPQRQKKQQTVTLLPAADLDDFSKQLQQSMSSADSTQA

SEQ ID NO: 862 - protein, 671 aa, Artificial Sequence
  Description of Artificial Sequence: Synthetic polypeptide
MHHHHHHGGSGSPILGYWKIKGLVQPTRLLLEYLEEKYEEHLYERDEGDKWRNKKFELGLEFPNLPYYIDGDVKLTQSMAIIRYIADKHNMLGGCPKERAEISMLEGAVLDIRYGVSRIAYSKDFETLKVDFLSKLPEMLKMFEDRLCHKTYLNGDHVTHPDFMLYDALDVVLYMDPMCLDAFPKLVCFKKRIEAIPQIDKYLKSSKYIAWPLQGWQATFGGGDHPPKSDLVPRGSPGIHRDGGSGENLYFQSSDNGPQNQRNAPRITFGGPSDSTGSNQNGERSGARSKQRRPQGLPNNTASWFTALTQHGKEDLKFPPGQGVPINPNSKPDDQIGYWRRQVRRYRGGDGQMKDLPPRWYFYYLGTGPEAGLPYGANKDGIIWVATEGALNTPKDHIGTRNPANNAAIVLQLPQGTTLPKGFYAEGSRGGSQASSRSSSRSRNSSRNSTPGSSRGTSPARMAGNGGDAALALLLLDRLNQLESKMSGKGQQQQGQTVTKKSAAEASKKPRQKRTATKAYNVTQAFGRRGPEQTQGNFGDQELIRQGTDYKHWPQIAQFAPSASAFFGMSRIGMEVTPSGTWLTYTGAIKLDDKDPNFKDQVILLNKHIDAYKTFPPTEPKKDKKKKADETQALPQRQKKQQTVTLLPAADLDDFSKQLQQSMSSADSTQA

SEQ ID NO: 863 - protein, 671 aa, Artificial Sequence
  Description of Artificial Sequence: Synthetic polypeptide
MHHHHHHGGSGSPILGYWKIKGLVQPTRLLLEYLEEKYEEHLYERDEGDKWRNKKFELGLEFPNLPYYIDGDVKLTQSMAIIRYIADKHNMLGGCPKERAEISMLEGAVLDIRYGVSRIAYSKDFETLKVDFLSKLPEMLKMFEDRLCHKTYLNGDHVTHPDFMLYDALDVVLYMDPMCLDAFPKLVCFKKRIEAIPQIDKYLKSSKYIAWPLQGWQATFGGGDHPPKSDLVPRGSPGIHRDGGSGENLYFQSSDNGPQNQRNAPRITFGGPSDSTGSNQNGERSGARSKQRRPQGLPNNTASWFTPLVQFGKEDLKFPPGQGVPINTNSSPDDQIGYYRRATRRIRGGDGKMKDLPPKWYFYYLGTGPHADLPYGQKHPGVVWVARPGALNTPKDHIGTRNPANNAAIPLQLPPGTKLPKGFYAEGSRGGSQASSRSSSRSRNSSRNSTPGSSRGTSPARMAGNGGDAALALLLLDRLNQLESKMSGKGQQQQGQTVTKKSAAEASKKPRQKRTATKAYNVTQAFGRRGPEQTQGNFGDQELIRQGTDYKHWPQIAQFAPSASAFFGMSRIGMEVTPSGTWLTYTGAIKLDDKDPNFKDQVILLNKHIDAYKTFPPTEPKKDKKKKADETQALPQRQKKQQTVTLLPAADLDDFSKQLQQSMSSADSTQA

SEQ ID NO: 864 - protein, 671 aa, Artificial Sequence
  Description of Artificial Sequence: Synthetic polypeptide
MHHHHHHGGSGSPILGYWKIKGLVQPTRLLLEYLEEKYEEHLYERDEGDKWRNKKFELGLEFPNLPYYIDGDVKLTQSMAIIRYIADKHNMLGGCPKERAEISMLEGAVLDIRYGVSRIAYSKDFETLKVDFLSKLPEMLKMFEDRLCHKTYLNGDHVTHPDFMLYDALDVVLYMDPMCLDAFPKLVCFKKRIEAIPQIDKYLKSSKYIAWPLQGWQATFGGGDHPPKSDLVPRGSPGIHRDGGSGENLYFQSSDNGPQNQRNAPRITFGGPSDSTGSNQNGERSGARSKQRRPQGLPNNTASWFTALTQHGKEDLKFPRGQGVPINTNSSPDDQIGYYRRATRRIRGGDGKMKDLSPRWYFYYLGTGPEAGLPYGANKDGIIWVATEGALNTPKDHIGTRNPANNAALVLQLPQGTTLPKGFYAEGSRGGSQASSRSSSRSRNSSRNSTPGSSRGTSPARMAGNGGDAALALLLLDRLNQLESKMSGKGQQQQGQTVTKKSAAEASKKPRQKRTATKAYNVTQAFGRRGPEQTQGNFGDQELIRQGTDYKHWPQIAQFAPSASAFFGMSRIGMEVTPSGTWLTYTGAIKLDDKDPNFKDQVILLNKHIDAYKTFPPTEPKKDKKKKADETQALPQRQKKQQTVTLLPAADLDDFSKQLQQSMSSADSTQA

SEQ ID NO: 865 - protein, 671 aa, Artificial Sequence
  Description of Artificial Sequence: Synthetic polypeptide
MHHHHHHGGSGSPILGYWKIKGLVQPTRLLLEYLEEKYEEHLYERDEGDKWRNKKFELGLEFPNLPYYIDGDVKLTQSMAIIRYIADKHNMLGGCPKERAEISMLEGAVLDIRYGVSRIAYSKDFETLKVDFLSKLPEMLKMFEDRLCHKTYLNGDHVTHPDFMLYDALDVVLYMDPMCLDAFPKLVCFKKRIEAIPQIDKYLKSSKYIAWPLQGWQATFGGGDHPPKSDLVPRGSPGIHRDGGSGENLYFQSSDNGPQNQRNAPRITFGGPSDSTGSNQNGERSGARSKQRRPQGLPNNTASWFTALTQHGKEDLKFPRGQGVPINTNSSPDDQIGYYRRATRRIRGGDGKMKDLSPRWYFYYLGTGPEAGLPYGANKDGIIWVATEGALNTPKDHIGTRNPANNAAIVLQLPQGTTLPKGFYAEGSRGGSQASSRSSSRSRNSSRNSTPGSSRGTSPARMAGNGGDAALALLLLDRLNQLESKMSGKGQQQQGQTVTKKSAAEASKKPRQKRTATKAYNVTQAFGRRGPEQTQGNFGDQELIRQGTDYKHWPQIAQFAPSASAFFGMSRITMEVTPSGTWLTYTGAIKLDDKDPNFKDQVILLNKHIDAYKTFPPTEPKKDKKKKADETQALPQRQKKQQTVTLLPAADLDDFSKQLQQSMSSADSTQA

SEQ ID NO: 866 - protein, 671 aa, Artificial Sequence
  Description of Artificial Sequence: Synthetic polypeptide
MHHHHHHGGSGSPILGYWKIKGLVQPTRLLLEYLEEKYEEHLYERDEGDKWRNKKFELGLEFPNLPYYIDGDVKLTQSMAIIRYIADKHNMLGGCPKERAEISMLEGAVLDIRYGVSRIAYSKDFETLKVDFLSKLPEMLKMFEDRLCHKTYLNGDHVTHPDFMLYDALDVVLYMDPMCLDAFPKLVCFKKRIEAIPQIDKYLKSSKYIAWPLQGWQATFGGGDHPPKSDLVPRGSPGIHRDGGSGENLYFQSSDNGPQNQRNAPRITFGGPSDSTGSNQNGERSGARSKQRRPQGLPNNTASWFTALTQHGKEDLKFPRGQGVPINTNSSPDDQIGYYRRATRRIRGGDGKMKDLSPRWYFYYLGTGPEAGLPYGANKDGIIWVATEGALNTPKDHIGTRNPANNAAGVLQLPQGTTLPKGFYAEGSRGGSQASSRSSSRSRNSSRNSTPGSSRGTSPARMAGNGGDAALALLLLDRLNQLESKMSGKGQQQQGQTVTKKSAAEASKKPRQKRTATKAYNVTQAFGRRGPEQTQGNFGDQELIRQGTDYKHWPQIAQFAPSASAFFGMSRIGMEVTPSGTWLTYTGAIKLDDKDPNFKDQVILLNKHIDAYKTFPPTEPKKDKKKKADETQALPQRQKKQQTVTLLPAADLDDFSKQLQQSMSSADSTQA

SEQ ID NO: 867 - protein, 671 aa, Artificial Sequence
  Description of Artificial Sequence: Synthetic polypeptide
MHHHHHHGGSGSPILGYWKIKGLVQPTRLLLEYLEEKYEEHLYERDEGDKWRNKKFELGLEFPNLPYYIDGDVKLTQSMAIIRYIADKHNMLGGCPKERAEISMLEGAVLDIRYGVSRIAYSKDFETLKVDFLSKLPEMLKMFEDRLCHKTYLNGDHVTHPDFMLYDALDVVLYMDPMCLDAFPKLVCFKKRIEAIPQIDKYLKSSKYIAWPLQGWQATFGGGDHPPKSDLVPRGSPGIHRDGGSGENLYFQSSDNGPQNQRNAPRITFGGPSDSTGSNQNGERSGARSKQRRPQGLPNNTASWFTALTQHGKEDLKFPRGQGVPINTNSSPDDQIGYYRRATRRIRGGDGKMKDLSPRWYFYYLGTGPEAGLPYGANKDGIIWVATEGALNTPKDHIGTRNPANNAAIVLQLPQGTTLPKGFYAEGSRGGSQASSRSSSRSRNSSRNSTPGSSRGTSPARMAGNGGDAALALLLLDRLNQLESKMSGKGQQQQGQTVTKKSAAEMSKKPRQKRTATKGCNVTQCFGPRGPEQTQGNFGDAELNKKGTDYKHWPQIAQFAPSASAFFGMSRISSKETPSGTWLTYTGAIKLDKDDPNFKDQVILLNKHIDAYKTFPPTEPKKDKKKKADETQALPQRQKKQQTVTLLPAADLDDFSKQLQQSMSSADSTQA

SEQ ID NO: 868 - protein, 671 aa, Artificial Sequence
  Description of Artificial Sequence: Synthetic polypeptide
MHHHHHHGGSGSPILGYWKIKGLVQPTRLLLEYLEEKYEEHLYERDEGDKWRNKKFELGLEFPNLPYYIDGDVKLTQSMAIIRYIADKHNMLGGCPKERAEISMLEGAVLDIRYGVSRIAYSKDFETLKVDFLSKLPEMLKMFEDRLCHKTYLNGDHVTHPDFMLYDALDVVLYMDPMCLDAFPKLVCFKKRIEAIPQIDKYLKSSKYIAWPLQGWQATFGGGDHPPKSDLVPRGSPGIHRDGGSGENLYFQSSDNGPQNQRNAPRITFGGPSDSTGSNQNGERSGARSKQRRPQGLPNNTASWFTALTQHGKEDLKFPRGQGVPINTNSSPDDQIGYYRRATRRIRGGDGKMKDLSPRWYFYYLGTGPEAGLPYGANKDGIIWVATEGALNTPKDHIGTRNPANNAAIVLQLPQGTTLPKGFYAEGSRGGSQASSRSSSRSRNSSRNSTPGSSRGTSPARMAGNGGDAALALLLLDRLNQLESKMSGKGQQQQGQTVTKKSAAEMSKKPRQKRTATKGYNVTQCFGPRGPEQTQGNFGDAELNKKGTDYKHWPQIAQFAPSASAFFGMSRISSKETPSGTWLTYTGAIKLDKDDPNFKDQVILLNKHIDAYKTFPPTEPKKDKKKKADETQALPQRQKKQQTVTLLPAADLDDFSKQLQQSMSSADSTQA

SEQ ID NO: 869 - protein, 671 aa, Artificial Sequence
  Description of Artificial Sequence: Synthetic polypeptide
MHHHHHHGGSGSPILGYWKIKGLVQPTRLLLEYLEEKYEEHLYERDEGDKWRNKKFELGLEFPNLPYYIDGDVKLTQSMAIIRYIADKHNMLGGCPKERAEISMLEGAVLDIRYGVSRIAYSKDFETLKVDFLSKLPEMLKMFEDRLCHKTYLNGDHVTHPDFMLYDALDVVLYMDPMCLDAFPKLVCFKKRIEAIPQIDKYLKSSKYIAWPLQGWQATFGGGDHPPKSDLVPRGSPGIHRDGGSGENLYFQSSDNGPQNQRNAPRITFGGPSDSTGSNQNGERSGARSKQRRPQGLPNNTASWFTGLTQHGKEDLKFPPGQGVPINTNSSPDDQIGYYRRATRRIRGGDGKMKDLPPRWYFYYLGTGPEADLPYGAVKDGIFWVAAEGALNTPKDHIGTRNPANNAAIPLQLPPGTTLPKGFYAEGSRGGSQASSRSSSRSRNSSRNSTPGSSRGTSPARMAGNGGDAALALLLLDRLNQLESKMSGKGQQQQGQTVTKKSAAEASKKPRQKRTATKAYNVTQAFGRRGPEQTQGNFGDQELIRQGTDYKHWPQIAQFAPSASAFFGMSRIGMEVTPSGTWLTYTGAIKLDDKDPNFKDQVILLNKHIDAYKTFPPTEPKKDKKKKADETQALPQRQKKQQTVTLLPAADLDDFSKQLQQSMSSADSTQA

SEQ ID NO: 870 - protein, 671 aa, Artificial Sequence
  Description of Artificial Sequence: Synthetic polypeptide
MHHHHHHGGSGSPILGYWKIKGLVQPTRLLLEYLEEKYEEHLYERDEGDKWRNKKFELGLEFPNLPYYIDGDVKLTQSMAIIRYIADKHNMLGGCPKERAEISMLEGAVLDIRYGVSRIAYSKDFETLKVDFLSKLPEMLKMFEDRLCHKTYLNGDHVTHPDFMLYDALDVVLYMDPMCLDAFPKLVCFKKRIEAIPQIDKYLKSSKYIAWPLQGWQATFGGGDHPPKSDLVPRGSPGIHRDGGSGENLYFQSSDNGPQNQRNAPRITFGGPSDSTGSNQNGERSGARSKQRRPQGLPNNTASWFTALTQHGKEDLKFPRGQGVPDNTNSSPDDQIGYYRRATRRIRGGDGKMKDLSPRWYFYYLGTGPEAGLPYGANKDGIIWVATEGALNTPKDHIGTRNPANNAAIVLQLPQGTTLPKGFYAEGSRGGSQASSRSSSRSRNSSRNSTPGSSRGTSPARMAGNGGDAALALLLLDRLNQLESKMSGKGQQQQGQTVTKKSAAEASKKPRQKRTATKAYNVTQAFGRRGPEQTQGNFGDQELIRQGTDYKHWPQIAQFAPSASAFFGMSRIGMEVTPSGTWLTYTGAIKLDDKDPNFKDQVILLNKHIDAYKTFPPTEPKKDKKKKADETQALPQRQKKQQTVTLLPAADLDDFSKQLQQSMSSADSTQA

SEQ ID NO: 871 - protein, 671 aa, Artificial Sequence
  Description of Artificial Sequence: Synthetic polypeptide
MHHHHHHGGSGSPILGYWKIKGLVQPTRLLLEYLEEKYEEHLYERDEGDKWRNKKFELGLEFPNLPYYIDGDVKLTQSMAIIRYIADKHNMLGGCPKERAEISMLEGAVLDIRYGVSRIAYSKDFETLKVDFLSKLPEMLKMFEDRLCHKTYLNGDHVTHPDFMLYDALDVVLYMDPMCLDAFPKLVCFKKRIEAIPQIDKYLKSSKYIAWPLQGWQATFGGGDHPPKSDLVPRGSPGIHRDGGSGENLYFQSSDNGPQNQRNAPRITFGGPSDSTGSNQNGERSGARSKQRRPQGLPNNTASWFTPLTQFGKEDLKFPPGQGVPINTNSSPDDQIGYYRRATRRIRGGDGKMKDLPPKWYFYYLGTGPHADLPYGQKQDGVFWVARPGALNTPKDHIGTRNPANNAAIPLQLPPGTKLPKGFYAEGSRGGSQASSRSSSRSRNSSRNSTPGSSRGTSPARMAGNGGDAALALLLLDRLNQLESKMSGKGQQQQGQTVTKKSAAEASKKPRQKRTATKAYNVTQAFGRRGPEQTQGNFGDQELIRQGTDYKHWPQIAQFAPSASAFFGMSRIGMEVTPSGTWLTYTGAIKLDDKDPNFKDQVILLNKHIDAYKTFPPTEPKKDKKKKADETQALPQRQKKQQTVTLLPAADLDDFSKQLQQSMSSADSTQA

SEQ ID NO: 872 - protein, 671 aa, Artificial Sequence
  Description of Artificial Sequence: Synthetic polypeptide
MHHHHHHGGSGSPILGYWKIKGLVQPTRLLLEYLEEKYEEHLYERDEGDKWRNKKFELGLEFPNLPYYIDGDVKLTQSMAIIRYIADKHNMLGGCPKERAEISMLEGAVLDIRYGVSRIAYSKDFETLKVDFLSKLPEMLKMFEDRLCHKTYLNGDHVTHPDFMLYDALDVVLYMDPMCLDAFPKLVCFKKRIEAIPQIDKYLKSSKYIAWPLQGWQATFGGGDHPPKSDLVPRGSPGIHRDGGSGENLYFQSSDNGPQNQRNAPRITFGGPSDSTGSNQNGERSGARSKQRRPQGLPNNTASWFTALTQHGKEDLKFPRGQGVPINTNSSPDDQIGYYRRATRRIRGGDGKMKDLSPRWYFYYLGTGPEAGLPYGANKDGIIWVATEGALNTPKDHIGTRNPANNAAIVLQLPQGTTLPKGFYAEGSRGGSQASSRSSSRSRNSSRNSTPGSSRGTSPARMAGNGGDAALALLLLDRLNQLESKMSGKGQQQQGQTVTKKSAAEMSKKPRQKRTATKECNVTQCFGPRGPEQTQGNFGDDELVKKGTDYKHWPQIAQFAPSASAFFGMSRISSKEQPSGTWLTYTGAIKLDKDDPNFKDQVILLNKHIDAYKTFPPTEPKKDKKKKADETQALPQRQKKQQTVTLLPAADLDDFSKQLQQSMSSADSTQA

SEQ ID NO: 873 - protein, 671 aa, Artificial Sequence
  Description of Artificial Sequence: Synthetic polypeptide
MHHHHHHGGSGSPILGYWKIKGLVQPTRLLLEYLEEKYEEHLYERDEGDKWRNKKFELGLEFPNLPYYIDGDVKLTQSMAIIRYIADKHNMLGGCPKERAEISMLEGAVLDIRYGVSRIAYSKDFETLKVDFLSKLPEMLKMFEDRLCHKTYLNGDHVTHPDFMLYDALDVVLYMDPMCLDAFPKLVCFKKRIEAIPQIDKYLKSSKYIAWPLQGWQATFGGGDHPPKSDLVPRGSPGIHRDGGSGENLYFQSSDNGPQNQRNAPRITFGGPSDSTGSNQNGERSGARSKQRRPQGLPNNTASWFTALTQHGKEDLKFPRGQGVPINTNSSPDDQIGYYRRATRRIRGGDGKMKDLSPRWYFYYLGTGPEAGLPYGANKDGIIWVATEGALNTPKDHIGTRNPANNAAIVLQLPQGTTLPKGFYAEGSRGGSQASSRSSSRSRNSSRNSTPGSSRGTSPARMAGNGGDAALALLLLDRLNQLESKMSGKGQQQQGQTVTKKSAAEASKKPRQKRTATKDYNVTQAFGRRGPEQTQGNFGDQDLIKLGTDYKHWPQIAQFAPSASAFFGMSRIGMEETPSGTWLTYTGAIKLDKKDPNFKDQVILLNKHIDAYKTFPPTEPKKDKKKKADETQALPQRQKKQQTVTLLPAADLDDFSKQLQQSMSSADSTQA

SEQ ID NO: 874 - protein, 671 aa, Artificial Sequence
  Description of Artificial Sequence: Synthetic polypeptide
MHHHHHHGGSGSPILGYWKIKGLVQPTRLLLEYLEEKYEEHLYERDEGDKWRNKKFELGLEFPNLPYYIDGDVKLTQSMAIIRYIADKHNMLGGCPKERAEISMLEGAVLDIRYGVSRIAYSKDFETLKVDFLSKLPEMLKMFEDRLCHKTYLNGDHVTHPDFMLYDALDVVLYMDPMCLDAFPKLVCFKKRIEAIPQIDKYLKSSKYIAWPLQGWQATFGGGDHPPKSDLVPRGSPGIHRDGGSGENLYFQSSDNGPQNQRNAPRITFGGPSDSTGSNQNGERSGARSKQRRPQGLPNNTASWFTALTQHGKEDLKFPRGQGVPINTNSSPDDQIGYYRRATRRIRGGDGKMKDLSPRWYFYYLGTGPEAGLPYGANKDGIIWVATEGALNTPKDHIGTRNPANNAAIVLQLPQGTTLPKGFYAEGSRGGSQASSRSSSRSRNSSRNSTPGSSRGTSPARMAGNGGDAALALLLLDRLNQLESKMSGKGQQQQGQTVTKKSAAEMSKKPRQKRTATKAYNVTQAFGRRGPEQTQGNFGDQELIRQGTDYKHWPQIAQFAPSASAFFGMSRIGMEVTPSGTWLTYTGAIKLDDKDPNFKDQVILLNKHIDAYKTFPPTEPKKDKKKKADETQALPQRQKKQQTVTLLPAADLDDFSKQLQQSMSSADSTQA

SEQ ID NO: 875 - protein, 671 aa, Artificial Sequence
  Description of Artificial Sequence: Synthetic polypeptide
MHHHHHHGGSGSPILGYWKIKGLVQPTRLLLEYLEEKYEEHLYERDEGDKWRNKKFELGLEFPNLPYYIDGDVKLTQSMAIIRYIADKHNMLGGCPKERAEISMLEGAVLDIRYGVSRIAYSKDFETLKVDFLSKLPEMLKMFEDRLCHKTYLNGDHVTHPDFMLYDALDVVLYMDPMCLDAFPKLVCFKKRIEAIPQIDKYLKSSKYIAWPLQGWQATFGGGDHPPKSDLVPRGSPGIHRDGGSGENLYFQSSDNGPQNQRNAPRITFGGPSDSTGSNQNGERSGARSKQRRPQGLPNNTASWFTALTQHGKEDLKFPRGQGVPINTNSSPDDQIGYYRRQTRRIRGGDGKMKDLSPRWYFYYLGTGPEAGLPYGANKDGIIWVATEGALNTPKDHIGTRNPANNAAIVLQLPQGTTLPKGFYAEGSRGGSQASSRSSSRSRNSSRNSTPGSSRGTSPARMAGNGGDAALALLLLDRLNQLESKMSGKGQQQQGQTVTKKSAAEASKKPRQKRTATKAYNVTQAFGRRGPEQTQGNFGDQELIRQGTDYKHWPQIAQFAPSASAFFGMSRIGMEVTPSGTWLTYTGAIKLDDKDPNFKDQVILLNKHIDAYKTFPPTEPKKDKKKKADETQALPQRQKKQQTVTLLPAADLDDFSKQLQQSMSSADSTQA

SEQ ID NO: 876 - protein, 671 aa, Artificial Sequence
  Description of Artificial Sequence: Synthetic polypeptide
MHHHHHHGGSGSPILGYWKIKGLVQPTRLLLEYLEEKYEEHLYERDEGDKWRNKKFELGLEFPNLPYYIDGDVKLTQSMAIIRYIADKHNMLGGCPKERAEISMLEGAVLDIRYGVSRIAYSKDFETLKVDFLSKLPEMLKMFEDRLCHKTYLNGDHVTHPDFMLYDALDVVLYMDPMCLDAFPKLVCFKKRIEAIPQIDKYLKSSKYIAWPLQGWQATFGGGDHPPKSDLVPRGSPGIHRDGGSGENLYFQSSDNGPQNQRNAPRITFGGPSDSTGSNQNGERSGARSKQRRPQGLPNNTASWFTALTQHGKEDLKFPRGQGVPINTNSSPDDQIGYYRRATRRIRGGDGKMKDLSPRWYFYYLGTGPEAGLPYGANKDGIIWVATEGALNTPKDHIGTRNPANFAAIVLQLPQGTTLPKGFYAEGSRGGSQASSRSSSRSRNSSRNSTPGSSRGTSPARMAGNGGDAALALLLLDRLNQLESKMSGKGQQQQGQTVTKKSAAEASKKPRQKRTATKAYNVTQAFGRRGPEQTQGNFGDQELIRQGTDYKHWPQIAQFAPSASAFFGMSRIGMEVTPSGTWLTYTGAIKLDDKDPNFKDQVILLNKHIDAYKTFPPTEPKKDKKKKADETQALPQRQKKQQTVTLLPAADLDDFSKQLQQSMSSADSTQA

SEQ ID NO: 877 - protein, 671 aa, Artificial Sequence
  Description of Artificial Sequence: Synthetic polypeptide
MHHHHHHGGSGSPILGYWKIKGLVQPTRLLLEYLEEKYEEHLYERDEGDKWRNKKFELGLEFPNLPYYIDGDVKLTQSMAIIRYIADKHNMLGGCPKERAEISMLEGAVLDIRYGVSRIAYSKDFETLKVDFLSKLPEMLKMFEDRLCHKTYLNGDHVTHPDFMLYDALDVVLYMDPMCLDAFPKLVCFKKRIEAIPQIDKYLKSSKYIAWPLQGWQATFGGGDHPPKSDLVPRGSPGIHRDGGSGENLYFQSSDNGPQNQRNAPRITFGGPSDSTGSNQNGERSGARSKQRRPQGLPNNTASWFTGLTQNGKEDLKFPPGQGVPINTNSSPDDQIGYYRRATRRIRGGDGKMKDLPPKWYFYYLGTGPHADLPYGQKQDGVFWVARPGALNTPKDHIGTRNPANNAAIPLQLPPGTKLPKGFYAEGSRGGSQASSRSSSRSRNSSRNSTPGSSRGTSPARMAGNGGDAALALLLLDRLNQLESKMSGKGQQQQGQTVTKKSAAEASKKPRQKRTATKAYNVTQAFGRRGPEQTQGNFGDQELIRQGTDYKHWPQIAQFAPSASAFFGMSRIGMEVTPSGTWLTYTGAIKLDDKDPNFKDQVILLNKHIDAYKTFPPTEPKKDKKKKADETQALPQRQKKQQTVTLLPAADLDDFSKQLQQSMSSADSTQA

SEQ ID NO: 878 - protein, 671 aa, Artificial Sequence
  Description of Artificial Sequence: Synthetic polypeptide
MHHHHHHGGSGSPILGYWKIKGLVQPTRLLLEYLEEKYEEHLYERDEGDKWRNKKFELGLEFPNLPYYIDGDVKLTQSMAIIRYIADKHNMLGGCPKERAEISMLEGAVLDIRYGVSRIAYSKDFETLKVDFLSKLPEMLKMFEDRLCHKTYLNGDHVTHPDFMLYDALDVVLYMDPMCLDAFPKLVCFKKRIEAIPQIDKYLKSSKYIAWPLQGWQATFGGGDHPPKSDLVPRGSPGIHRDGGSGENLYFQSSDNGPQNQRNAPRITFGGPSDSTGSNQNGERSGARSKQRRPQGLPNNTASWFTALTQHGKEDLKFPRGQGVPINTNSSPDDQIGYYRRATRRIRGGDGKMKDLSPRWYFYYLGTGPEAGLPYGANKDGIIWVATEGALNTPKDHIGTRNPANNAAIVLQLPQGTTLPKGFYAEGSRGGSQASSRSSSRSRNSSRNSTPGSSRGTSPARMAGNGGDAALALLLLDRLNQLESKMSGKGQQQQGQTVTKKSAAEMSKKPRQKRTATKGYNVTQCFGPRGPEQTQGNFGDEELIRKGTDYKHWPQIAQFAPSASAFFGMSRISSKETPSGTWLTYTGAIKLDKDDPNFKDQVILLNKHIDAYKTFPPTEPKKDKKKKADETQALPQRQKKQQTVTLLPAADLDDFSKQLQQSMSSADSTQA

SEQ ID NO: 879 - protein, 671 aa, Artificial Sequence
  Description of Artificial Sequence: Synthetic polypeptide
MHHHHHHGGSGSPILGYWKIKGLVQPTRLLLEYLEEKYEEHLYERDEGDKWRNKKFELGLEFPNLPYYIDGDVKLTQSMAIIRYIADKHNMLGGCPKERAEISMLEGAVLDIRYGVSRIAYSKDFETLKVDFLSKLPEMLKMFEDRLCHKTYLNGDHVTHPDFMLYDALDVVLYMDPMCLDAFPKLVCFKKRIEAIPQIDKYLKSSKYIAWPLQGWQATFGGGDHPPKSDLVPRGSPGIHRDGGSGENLYFQSSDNGPQNQRNAPRITFGGPSDSTGSNQNGERSGARSKQRRPQGLPNNTASWFTALTQHGKEDLKFPRGQGVPINTNSSPDDQIGYYRRATRRIRGGDGKMKDLSPRWYFYYLGTGPEAGLPYGANKDGIIWVATEGALNTPKDHIGTRNPANNAAIVLQLPQGTTLPKGFYAEGSRGGSQASSRSSERSRNSSRNSTPGSSRGTSPARMAGNGGDAALALLLLDRLNQLESKMSGKGQQQQGQTVTKKSAAEASKKPRQKRTATKAYNVTQAFGRRGPEQTQGNFGDQELIRQGTDYKHWPQIAQFAPSASAFFGMSRIGMEVTPSGTWLTYTGAIKLDDKDPNFKDQVILLNKHIDAYKTFPPTEPKKDKKKKADETQALPQRQKKQQTVTLLPAADLDDFSKQLQQSMSSADSTQA

SEQ ID NO: 880 - protein, 671 aa, Artificial Sequence
  Description of Artificial Sequence: Synthetic polypeptide
MHHHHHHGGSGSPILGYWKIKGLVQPTRLLLEYLEEKYEEHLYERDEGDKWRNKKFELGLEFPNLPYYIDGDVKLTQSMAIIRYIADKHNMLGGCPKERAEISMLEGAVLDIRYGVSRIAYSKDFETLKVDFLSKLPEMLKMFEDRLCHKTYLNGDHVTHPDFMLYDALDVVLYMDPMCLDAFPKLVCFKKRIEAIPQIDKYLKSSKYIAWPLQGWQATFGGGDHPPKSDLVPRGSPGIHRDGGSGENLYFQSSDNGPQNQRNAPRITFGGPSDSTGSNQNGERSGARSKQRRPQGLPNNTASWFTALTQHGKEDLKFPRGQGVPINTNSSPDDQIGYYRRATRRIRGGDGKMKDLSPRWYFYYLGTGPEAGLPYGANKDGIIWVAEEGALNTPKDHIGTRNPANNAAIVLQLPQGTTLPKGFYAEGSRGGSQASSRSSSRSRNSSRNSTPGSSRGTSPARMAGNGGDAALALLLLDRLNQLESKMSGKGQQQQGQTVTKKSAAEASKKPRQKRTATKAYNVTQAFGRRGPEQTQGNFGDQELIRQGTDYKHWPQIAQFAPSASAFFGMSRIGMEVTPSGTWLTYTGAIKLDDKDPNFKDQVILLNKHIDAYKTFPPTEPKKDKKKKADETQALPQRQKKQQTVTLLPAADLDDFSKQLQQSMSSADSTQA

SEQ ID NO: 881 - protein, 671 aa, Artificial Sequence
  Description of Artificial Sequence: Synthetic polypeptide
MHHHHHHGGSGSPILGYWKIKGLVQPTRLLLEYLEEKYEEHLYERDEGDKWRNKKFELGLEFPNLPYYIDGDVKLTQSMAIIRYIADKHNMLGGCPKERAEISMLEGAVLDIRYGVSRIAYSKDFETLKVDFLSKLPEMLKMFEDRLCHKTYLNGDHVTHPDFMLYDALDVVLYMDPMCLDAFPKLVCFKKRIEAIPQIDKYLKSSKYIAWPLQGWQATFGGGDHPPKSDLVPRGSPGIHRDGGSGENLYFQSSDNGPQNQRNAPRITFGGPSDSTGSNQNGERSGARSKQRRPQGLPNNTASWFTALTQHGKEDLKFPRGQGVPINTNSSPDDQIGYYRRATRRIRGGDGKMKDLSPRWYFYYLGTGPEAGLPYGANKEGIIWVATEGALNTPKDHIGTRNPANNAAIVLQLPQGTTLPKGFYAEGSRGGSQASSRSSSRSRNSSRNSTPGSSRGTSPARMAGNGGDAALALLLLDRLNQLESKMSGKGQQQQGQTVTKKSAAEASKKPRQKRTATKAYNVTQAFGRRGPEQTQGNFGDQELIRQGTDYKHWPQIAQFAPSASAFFGMSRIGMEVTPSGTWLTYTGAIKLDDKDPNFKDQVILLNKHIDAYKTFPPTEPKKDKKKKADETQALPQRQKKQQTVTLLPAADLDDFSKQLQQSMSSADSTQA

SEQ ID NO: 882 - protein, 671 aa, Artificial Sequence
  Description of Artificial Sequence: Synthetic polypeptide
MHHHHHHGGSGSPILGYWKIKGLVQPTRLLLEYLEEKYEEHLYERDEGDKWRNKKFELGLEFPNLPYYIDGDVKLTQSMAIIRYIADKHNMLGGCPKERAEISMLEGAVLDIRYGVSRIAYSKDFETLKVDFLSKLPEMLKMFEDRLCHKTYLNGDHVTHPDFMLYDALDVVLYMDPMCLDAFPKLVCFKKRIEAIPQIDKYLKSSKYIAWPLQGWQATFGGGDHPPKSDLVPRGSPGIHRDGGSGENLYFQSSDNGPQNQRNAPRITFGGPSDSTGSNQNGERSGARSKQRRPQGLPNNTASWFTALTQQGKEDLKFPRGQGVPINTNSSPDDQIGYYRRATRRIRGGDGKMKDLSPRWYFYYLGTGPEAGLPYGANKDGIIWVATEGALNTPKDHIGTRNPANNAAIVLQLPQGTTLPKGFYAEGSRGGSQASSRSSSRSRNSSRNSTPGSSRGTSPARMAGNGGDAALALLLLDRLNQLESKMSGKGQQQQGQTVTKKSAAEASKKPRQKRTATKAYNVTQAFGRRGPEQTQGNFGDQELIRQGTDYKHWPQIAQFAPSASAFFGMSRIGMEVTPSGTWLTYTGAIKLDDKDPNFKDQVILLNKHIDAYKTFPPTEPKKDKKKKADETQALPQRQKKQQTVTLLPAADLDDFSKQLQQSMSSADSTQA

SEQ ID NO: 883 - protein, 671 aa, Artificial Sequence
  Description of Artificial Sequence: Synthetic polypeptide
MHHHHHHGGSGSPILGYWKIKGLVQPTRLLLEYLEEKYEEHLYERDEGDKWRNKKFELGLEFPNLPYYIDGDVKLTQSMAIIRYIADKHNMLGGCPKERAEISMLEGAVLDIRYGVSRIAYSKDFETLKVDFLSKLPEMLKMFEDRLCHKTYLNGDHVTHPDFMLYDALDVVLYMDPMCLDAFPKLVCFKKRIEAIPQIDKYLKSSKYIAWPLQGWQATFGGGDHPPKSDLVPRGSPGIHRDGGSGENLYFQSSDNGPQNQRNAPRITFGGPSDSTGSNQNGERSGARSKQRRPQGLPNNTASWFTALTQHGKEDLKFPRGQGVPINTNSSPDDQIGYYRRATRRIRGGDGKMKDLSPRWYFYYLGTGPEAGLPYGANKDGIIWVATEGALNTPKDHIGTRNPANNAATVLQLPQGTTLPKGFYAEGSRGGSQASSRSSSRSRNSSRNSTPGSSRGTSPARMAGNGGDAALALLLLDRLNQLESKMSGKGQQQQGQTVTKKSAAEASKKPRQKRTATKAYNVTQAFGRRGPEQTQGNFGDQELIRQGTDYKHWPQIAQFAPSASAFFGMSRIGMEVTPSGTWLTYTGAIKLDDKDPNFKDQVILLNKHIDAYKTFPPTEPKKDKKKKADETQALPQRQKKQQTVTLLPAADLDDFSKQLQQSMSSADSTQA

SEQ ID NO: 884 - protein, 671 aa, Artificial Sequence
  Description of Artificial Sequence: Synthetic polypeptide
MHHHHHHGGSGSPILGYWKIKGLVQPTRLLLEYLEEKYEEHLYERDEGDKWRNKKFELGLEFPNLPYYIDGDVKLTQSMAIIRYIADKHNMLGGCPKERAEISMLEGAVLDIRYGVSRIAYSKDFETLKVDFLSKLPEMLKMFEDRLCHKTYLNGDHVTHPDFMLYDALDVVLYMDPMCLDAFPKLVCFKKRIEAIPQIDKYLKSSKYIAWPLQGWQATFGGGDHPPKSDLVPRGSPGIHRDGGSGENLYFQSSDNGPQNQRNAPRITFGGPSDSTGSNQNGERSGARSKQRRPQGLPNNTASWFTALTQHGKEDLKFPRGQGVPINTNSSPDDQIGYYRRATRRIRGGDGKMKDLSPRWYFYYLGTGPEAGLPYGANKDGIIWVATEGALNTPKDHIGTRNPANNAAIVLQLPQGTTLPKGFYAEGSRGGSQASSRSSSRSRNSSRNSTPGSSRGTSPARMAGNGGDAALALLLLDRLNQLESKMSGKGQQQQGQTVTKKSAAEMSKKPRQKRTATKGCNVTQCFGPRGPEQTQGNFGDAELVKKGTDYKHWPQIAQFAPSASAFFGMSRISSKEQPSGTWLTYTGAIKLDKDDPNFKDQVILLNKHIDAYKTFPPTEPKKDKKKKADETQALPQRQKKQQTVTLLPAADLDDFSKQLQQSMSSADSTQA

SEQ ID NO: 885 - protein, 671 aa, Artificial Sequence
  Description of Artificial Sequence: Synthetic polypeptide
MHHHHHHGGSGSPILGYWKIKGLVQPTRLLLEYLEEKYEEHLYERDEGDKWRNKKFELGLEFPNLPYYIDGDVKLTQSMAIIRYIADKHNMLGGCPKERAEISMLEGAVLDIRYGVSRIAYSKDFETLKVDFLSKLPEMLKMFEDRLCHKTYLNGDHVTHPDFMLYDALDVVLYMDPMCLDAFPKLVCFKKRIEAIPQIDKYLKSSKYIAWPLQGWQATFGGGDHPPKSDLVPRGSPGIHRDGGSGENLYFQSSDNGPQNQRNAPRITFGGPSDSTGSNQNGERSGARSKQRRPQGLPNNTASWFTALTQHGKEDLKFPRGQGVPINTNSSPDDQIGYYRRATRRIRGGDGKMKDLSPRWYFYYLGTGPEAGLPYGANKDGIIWVATEGALNTPKDHIGTRNPANNAAINLQLPQGTTLPKGFYAEGSRGGSQASSRSSSRSRNSSRNSTPGSSRGTSPARMAGNGGDAALALLLLDRLNQLESKMSGKGQQQQGQTVTKKSAAEASKKPRQKRTATKAYNVTQAFGRRGPEQTQGNFGDQELIRQGTDYKHWPQIAQFAPSASAFFGMSRIGMEVTPSGTWLTYTGAIKLDDKDPNFKDQVILLNKHIDAYKTFPPTEPKKDKKKKADETQALPQRQKKQQTVTLLPAADLDDFSKQLQQSMSSADSTQA

SEQ ID NO: 886 - protein, 671 aa, Artificial Sequence
  Description of Artificial Sequence: Synthetic polypeptide
MHHHHHHGGSGSPILGYWKIKGLVQPTRLLLEYLEEKYEEHLYERDEGDKWRNKKFELGLEFPNLPYYIDGDVKLTQSMAIIRYIADKHNMLGGCPKERAEISMLEGAVLDIRYGVSRIAYSKDFETLKVDFLSKLPEMLKMFEDRLCHKTYLNGDHVTHPDFMLYDALDVVLYMDPMCLDAFPKLVCFKKRIEAIPQIDKYLKSSKYIAWPLQGWQATFGGGDHPPKSDLVPRGSPGIHRDGGSGENLYFQSSDNGPQNQRNAPRITFGGPSDSTGSNQNGERSGARSKQRRPQGLPNNTASWFTALTQHGKEDLKFPRGQGVPINTNSSPDDQIGYYRRATRRIRGGDGKMKDLSPRWYFYYLGTGPEAGLPYGANKDGIIWVATEGALNTPKDHIGTRNPANNAAIVLQLPQGTTIPKGFYAEGSRGGSQASSRSSSRSRNSSRNSTPGSSRGTSPARMAGNGGDAALALLLLDRLNQLESKMSGKGQQQQGQTVTKKSAAEASKKPRQKRTATKAYNVTQAFGRRGPEQTQGNFGDQELIRQGTDYKHWPQIAQFAPSASAFFGMSRIGMEVTPSGTWLTYTGAIKLDDKDPNFKDQVILLNKHIDAYKTFPPTEPKKDKKKKADETQALPQRQKKQQTVTLLPAADLDDFSKQLQQSMSSADSTQA

SEQ ID NO: 887 - protein, 671 aa, Artificial Sequence
  Description of Artificial Sequence: Synthetic polypeptide
MHHHHHHGGSGSPILGYWKIKGLVQPTRLLLEYLEEKYEEHLYERDEGDKWRNKKFELGLEFPNLPYYIDGDVKLTQSMAIIRYIADKHNMLGGCPKERAEISMLEGAVLDIRYGVSRIAYSKDFETLKVDFLSKLPEMLKMFEDRLCHKTYLNGDHVTHPDFMLYDALDVVLYMDPMCLDAFPKLVCFKKRIEAIPQIDKYLKSSKYIAWPLQGWQATFGGGDHPPKSDLVPRGSPGIHRDGGSGENLYFQSSDNGPQNQRNAPRITFGGPSDSTGSNQNGERSGARSKQRRPQGLPNNTASWFTGLTQFGKEDLKFPPGQGVPINTNSSPDDQIGYYRRATRRIRGGDGKMKDLPPKWYFYYLGTGPHADLPYGQKQDGVFWVARPGALNTPKDHIGTRNPANNAAIPLQLPPGTKLPKGFYAEGSRGGSQASSRSSSRSRNSSRNSTPGSSRGTSPARMAGNGGDAALALLLLDRLNQLESKMSGKGQQQQGQTVTKKSAAEASKKPRQKRTATKAYNVTQAFGRRGPEQTQGNFGDQELIRQGTDYKHWPQIAQFAPSASAFFGMSRIGMEVTPSGTWLTYTGAIKLDDKDPNFKDQVILLNKHIDAYKTFPPTEPKKDKKKKADETQALPQRQKKQQTVTLLPAADLDDFSKQLQQSMSSADSTQA

SEQ ID NO: 888 - protein, 671 aa, Artificial Sequence
  Description of Artificial Sequence: Synthetic polypeptide
MHHHHHHGGSGSPILGYWKIKGLVQPTRLLLEYLEEKYEEHLYERDEGDKWRNKKFELGLEFPNLPYYIDGDVKLTQSMAIIRYIADKHNMLGGCPKERAEISMLEGAVLDIRYGVSRIAYSKDFETLKVDFLSKLPEMLKMFEDRLCHKTYLNGDHVTHPDFMLYDALDVVLYMDPMCLDAFPKLVCFKKRIEAIPQIDKYLKSSKYIAWPLQGWQATFGGGDHPPKSDLVPRGSPGIHRDGGSGENLYFQSSDNGPQNQRNAPRITFGGPSDSTGSNQNGERSGARSKQRRPQGLPNNTASWFTALTQHGKEDLKFPRGQGVPINTNSSPDDQIGYYRRATRRIRGGDGKMKDLSPRWYFYYLGTGPEAGLPYGANKDGIIWVATEGALNTPKDHIGTRNPANNAAIVLQLPQGTTLPKGFYAEGSRGGSQASSRSSSRSRNSSRNSTPGSSRGTSPARMAGNGGDAALALLLLDRLNQLESKMSGKGQQQQGQTVTKKSAAEASKKPRQKRTATKAYNVTQAFGRRGPEQTQGNFGDQELIRQGTDYKHWPQIAQFAPSASAFFGMSRIGMEYTPSGTWLTYTGAIKLDDKDPNFKDQVILLNKHIDAYKTFPPTEPKKDKKKKADETQALPQRQKKQQTVTLLPAADLDDFSKQLQQSMSSADSTQA

SEQ ID NO: 889 - protein, 671 aa, Artificial Sequence
  Description of Artificial Sequence: Synthetic polypeptide
MHHHHHHGGSGSPILGYWKIKGLVQPTRLLLEYLEEKYEEHLYERDEGDKWRNKKFELGLEFPNLPYYIDGDVKLTQSMAIIRYIADKHNMLGGCPKERAEISMLEGAVLDIRYGVSRIAYSKDFETLKVDFLSKLPEMLKMFEDRLCHKTYLNGDHVTHPDFMLYDALDVVLYMDPMCLDAFPKLVCFKKRIEAIPQIDKYLKSSKYIAWPLQGWQATFGGGDHPPKSDLVPRGSPGIHRDGGSGENLYFQSSDNGPQNQRNAPRITFGGPSDSTGSNQNGERSGARSKQRRPQGLPNNTASWFTALTQHGKEDLKFPKGQGVPINTNSSPDDQIGYYRRATRRIRGGDGKMKDLSPRWYFYYLGTGPEAGLPYGANKDGIIWVATEGALNTPKDHIGTRNPANNAAIVLQLPQGTTLPKGFYAEGSRGGSQASSRSSSRSRNSSRNSTPGSSRGTSPARMAGNGGDAALALLLLDRLNQLESKMSGKGQQQQGQTVTKKSAAEASKKPRQKRTATKAYNVTQAFGRRGPEQTQGNFGDQELIRQGTDYKHWPQIAQFAPSASAFFGMSRIGMEVTPSGTWLTYTGAIKLDDKDPNFKDQVILLNKHIDAYKTFPPTEPKKDKKKKADETQALPQRQKKQQTVTLLPAADLDDFSKQLQQSMSSADSTQA

SEQ ID NO: 890 - protein, 671 aa, Artificial Sequence
  Description of Artificial Sequence: Synthetic polypeptide
MHHHHHHGGSGSPILGYWKIKGLVQPTRLLLEYLEEKYEEHLYERDEGDKWRNKKFELGLEFPNLPYYIDGDVKLTQSMAIIRYIADKHNMLGGCPKERAEISMLEGAVLDIRYGVSRIAYSKDFETLKVDFLSKLPEMLKMFEDRLCHKTYLNGDHVTHPDFMLYDALDVVLYMDPMCLDAFPKLVCFKKRIEAIPQIDKYLKSSKYIAWPLQGWQATFGGGDHPPKSDLVPRGSPGIHRDGGSGENLYFQSSDNGPQNQRNAPRITFGGPSDSTGSNQNGERSGARSKQRRPQGLPNNTASWFTALTQHGKEDLKFPRGQGVPINTNSSPDDQIGYYRRATRRIRGGDGKMKDLSPRWYFYYLGTGPEAGLPYGAVKDGIIWVATEGALNTPKDHIGTRNPANNAAIVLQLPQGTTLPKGFYAEGSRGGSQASSRSSSRSRNSSRNSTPGSSRGTSPARMAGNGGDAALALLLLDRLNQLESKMSGKGQQQQGQTVTKKSAAEASKKPRQKRTATKAYNVTQAFGRRGPEQTQGNFGDQELIRQGTDYKHWPQIAQFAPSASAFFGMSRIGMEVTPSGTWLTYTGAIKLDDKDPNFKDQVILLNKHIDAYKTFPPTEPKKDKKKKADETQALPQRQKKQQTVTLLPAADLDDFSKQLQQSMSSADSTQA

SEQ ID NO: 891 - protein, 671 aa, Artificial Sequence
  Description of Artificial Sequence: Synthetic polypeptide
MHHHHHHGGSGSPILGYWKIKGLVQPTRLLLEYLEEKYEEHLYERDEGDKWRNKKFELGLEFPNLPYYIDGDVKLTQSMAIIRYIADKHNMLGGCPKERAEISMLEGAVLDIRYGVSRIAYSKDFETLKVDFLSKLPEMLKMFEDRLCHKTYLNGDHVTHPDFMLYDALDVVLYMDPMCLDAFPKLVCFKKRIEAIPQIDKYLKSSKYIAWPLQGWQATFGGGDHPPKSDLVPRGSPGIHRDGGSGENLYFQSSDNGPQNQRNAPRITFGGPSDSTGSNQNGERSGARSKQRRPQGLPNNTYSWFTALTQHGKEDLKFPRGQGVPINTNSSPDDQIGYYRRATRRIRGGDGKMKDLSPRWYFYYLGTGPEAGLPYGANKDGIIWVATEGALNTPKDHIGTRNPANNAAIVLQLPQGTTLPKGFYAEGSRGGSQASSRSSSRSRNSSRNSTPGSSRGTSPARMAGNGGDAALALLLLDRLNQLESKMSGKGQQQQGQTVTKKSAAEASKKPRQKRTATKAYNVTQAFGRRGPEQTQGNFGDQELIRQGTDYKHWPQIAQFAPSASAFFGMSRIGMEVTPSGTWLTYTGAIKLDDKDPNFKDQVILLNKHIDAYKTFPPTEPKKDKKKKADETQALPQRQKKQQTVTLLPAADLDDFSKQLQQSMSSADSTQA

SEQ ID NO: 892 - protein, 671 aa, Artificial Sequence
  Description of Artificial Sequence: Synthetic polypeptide
MHHHHHHGGSGSPILGYWKIKGLVQPTRLLLEYLEEKYEEHLYERDEGDKWRNKKFELGLEFPNLPYYIDGDVKLTQSMAIIRYIADKHNMLGGCPKERAEISMLEGAVLDIRYGVSRIAYSKDFETLKVDFLSKLPEMLKMFEDRLCHKTYLNGDHVTHPDFMLYDALDVVLYMDPMCLDAFPKLVCFKKRIEAIPQIDKYLKSSKYIAWPLQGWQATFGGGDHPPKSDLVPRGSPGIHRDGGSGENLYFQSSDNGPQNQRNAPRITFGGPSDSTGSNQNGERSGARSKQRRPQGLPNNTASWFTALTQHGKEDLKFPRGQGVPTNTNSSPDDQIGYYRRATRRIRGGDGKMKDLSPRWYFYYLGTGPEAGLPYGANKDGIIWVATEGALNTPKDHIGTRNPANNAAIVLQLPQGTTLPKGFYAEGSRGGSQASSRSSSRSRNSSRNSTPGSSRGTSPARMAGNGGDAALALLLLDRLNQLESKMSGKGQQQQGQTVTKKSAAEASKKPRQKRTATKAYNVTQAFGRRGPEQTQGNFGDQELIRQGTDYKHWPQIAQFAPSASAFFGMSRIGMEVTPSGTWLTYTGAIKLDDKDPNFKDQVILLNKHIDAYKTFPPTEPKKDKKKKADETQALPQRQKKQQTVTLLPAADLDDFSKQLQQSMSSADSTQA

SEQ ID NO: 893 - protein, 671 aa, Artificial Sequence
  Description of Artificial Sequence: Synthetic polypeptide
MHHHHHHGGSGSPILGYWKIKGLVQPTRLLLEYLEEKYEEHLYERDEGDKWRNKKFELGLEFPNLPYYIDGDVKLTQSMAIIRYIADKHNMLGGCPKERAEISMLEGAVLDIRYGVSRIAYSKDFETLKVDFLSKLPEMLKMFEDRLCHKTYLNGDHVTHPDFMLYDALDVVLYMDPMCLDAFPKLVCFKKRIEAIPQIDKYLKSSKYIAWPLQGWQATFGGGDHPPKSDLVPRGSPGIHRDGGSGENLYFQSSDNGPQNQRNAPRITFGGPSDSTGSNQNGERSGARSKQRRPQGLPNNTASWFTALTQHGKEDLKFPRGQGVPINTNSSPDDQIGYYRRATRRIRGGDGKMKDLSPRWYFYYLGTGPEAGLPYGQNKDGIIWVATEGALNTPKDHIGTRNPANNAAIVLQLPQGTTLPKGFYAEGSRGGSQASSRSSSRSRNSSRNSTPGSSRGTSPARMAGNGGDAALALLLLDRLNQLESKMSGKGQQQQGQTVTKKSAAEASKKPRQKRTATKAYNVTQAFGRRGPEQTQGNFGDQELIRQGTDYKHWPQIAQFAPSASAFFGMSRIGMEVTPSGTWLTYTGAIKLDDKDPNFKDQVILLNKHIDAYKTFPPTEPKKDKKKKADETQALPQRQKKQQTVTLLPAADLDDFSKQLQQSMSSADSTQA

SEQ ID NO: 894 - protein, 671 aa, Artificial Sequence
  Description of Artificial Sequence: Synthetic polypeptide
MHHHHHHGGSGSPILGYWKIKGLVQPTRLLLEYLEEKYEEHLYERDEGDKWRNKKFELGLEFPNLPYYIDGDVKLTQSMAIIRYIADKHNMLGGCPKERAEISMLEGAVLDIRYGVSRIAYSKDFETLKVDFLSKLPEMLKMFEDRLCHKTYLNGDHVTHPDFMLYDALDVVLYMDPMCLDAFPKLVCFKKRIEAIPQIDKYLKSSKYIAWPLQGWQATFGGGDHPPKSDLVPRGSPGIHRDGGSGENLYFQSSDNGPQNQRNAPRITFGGPSDSTGSNQNGERSGARSKQRRPQGLPNNTASWFTALTQHGKEDLKFPPGQGVPINPNSKPDDQIGYWRRQTRRYRGGDGQMKDLPPRWYFYYLGTGPEAGLPYGANKDGIIWVATEGALNTPKDHIGTRNPANNAAIVLQLPQGTTLPKGFYAEGSRGGSQASSRSSSRSRNSSRNSTPGSSRGTSPARMAGNGGDAALALLLLDRLNQLESKMSGKGQQQQGQTVTKKSAAEASKKPRQKRTATKAYNVTQAFGRRGPEQTQGNFGDQELIRQGTDYKHWPQIAQFAPSASAFFGMSRIGMEVTPSGTWLTYTGAIKLDDKDPNFKDQVILLNKHIDAYKTFPPTEPKKDKKKKADETQALPQRQKKQQTVTLLPAADLDDFSKQLQQSMSSADSTQA

SEQ ID NO: 895 - protein, 671 aa, Artificial Sequence
  Description of Artificial Sequence: Synthetic polypeptide
MHHHHHHGGSGSPILGYWKIKGLVQPTRLLLEYLEEKYEEHLYERDEGDKWRNKKFELGLEFPNLPYYIDGDVKLTQSMAIIRYIADKHNMLGGCPKERAEISMLEGAVLDIRYGVSRIAYSKDFETLKVDFLSKLPEMLKMFEDRLCHKTYLNGDHVTHPDFMLYDALDVVLYMDPMCLDAFPKLVCFKKRIEAIPQIDKYLKSSKYIAWPLQGWQATFGGGDHPPKSDLVPRGSPGIHRDGGSGENLYFQSSDNGPQNQRNAPRITFGGPSDSTGSNQNGERSGARSKQRRPQGLPNNTASWFTALTQHGKEDLKFPRGQGVPINTNSSPDDQIGYYRRATRRIRGGDGKMKDLSPRWYFYYLGTGPEAGLPYGANKDGIIWVATEGALNTPKDHIGTRNPANNAAIVLQLPQGTTLPKGFYAEGSRGGSQASSRSSSRSRNSSRNSTPGSSRGTSPARMAGNGGDAALALLLLDRLNQLESKMSGKGQQQQGQTVTKKSAAEASKKPRQKRTATKGYNVTQAFGRRGPEQTQGNFGDQDLIREGTDYKHWPQIAQFAPSASAFFGMSRIGTEETPSGTWLTYTGAIKLDKKDPNFKDQVILLNKHIDAYKTFPPTEPKKDKKKKADETQALPQRQKKQQTVTLLPAADLDDFSKQLQQSMSSADSTQA

SEQ ID NO: 896 - protein, 671 aa, Artificial Sequence
  Description of Artificial Sequence: Synthetic polypeptide
MHHHHHHGGSGSPILGYWKIKGLVQPTRLLLEYLEEKYEEHLYERDEGDKWRNKKFELGLEFPNLPYYIDGDVKLTQSMAIIRYIADKHNMLGGCPKERAEISMLEGAVLDIRYGVSRIAYSKDFETLKVDFLSKLPEMLKMFEDRLCHKTYLNGDHVTHPDFMLYDALDVVLYMDPMCLDAFPKLVCFKKRIEAIPQIDKYLKSSKYIAWPLQGWQATFGGGDHPPKSDLVPRGSPGIHRDGGSGENLYFQSSDNGPQNQRNAPRITFGGPSDSTGSNQNGERSGARSKQRRPQGLPNNTASWFTALTQHGKEDLKFPRGQGVPINTNSSPDDQIGDYRRATRRIRGGDGKMKDLSPRWYFYYLGTGPEAGLPYGANKDGIIWVATEGALNTPKDHIGTRNPANNAAIVLQLPQGTTLPKGFYAEGSRGGSQASSRSSSRSRNSSRNSTPGSSRGTSPARMAGNGGDAALALLLLDRLNQLESKMSGKGQQQQGQTVTKKSAAEASKKPRQKRTATKAYNVTQAFGRRGPEQTQGNFGDQELIRQGTDYKHWPQIAQFAPSASAFFGMSRIGMEVTPSGTWLTYTGAIKLDDKDPNFKDQVILLNKHIDAYKTFPPTEPKKDKKKKADETQALPQRQKKQQTVTLLPAADLDDFSKQLQQSMSSADSTQA

SEQ ID NO: 897 - protein, 671 aa, Artificial Sequence
  Description of Artificial Sequence: Synthetic polypeptide
MHHHHHHGGSGSPILGYWKIKGLVQPTRLLLEYLEEKYEEHLYERDEGDKWRNKKFELGLEFPNLPYYIDGDVKLTQSMAIIRYIADKHNMLGGCPKERAEISMLEGAVLDIRYGVSRIAYSKDFETLKVDFLSKLPEMLKMFEDRLCHKTYLNGDHVTHPDFMLYDALDVVLYMDPMCLDAFPKLVCFKKRIEAIPQIDKYLKSSKYIAWPLQGWQATFGGGDHPPKSDLVPRGSPGIHRDGGSGENLYFQSSDNGPQNQRNAPRITFGGPSDSTGSNQNGERSGARSKQRRPQGLPNNTASWFTALTQHGKEDLKFPRGQGVPINTNSSPDDQIGYYRRATRRIRGGDGKMKDLSPRWYFYYLGTGPEAGLPYGANKDGIIWVATEGALNTPKDHIGTRNPANNAAIYLQLPQGTTLPKGFYAEGSRGGSQASSRSSSRSRNSSRNSTPGSSRGTSPARMAGNGGDAALALLLLDRLNQLESKMSGKGQQQQGQTVTKKSAAEASKKPRQKRTATKAYNVTQAFGRRGPEQTQGNFGDQELIRQGTDYKHWPQIAQFAPSASAFFGMSRIGMEVTPSGTWLTYTGAIKLDDKDPNFKDQVILLNKHIDAYKTFPPTEPKKDKKKKADETQALPQRQKKQQTVTLLPAADLDDFSKQLQQSMSSADSTQA

SEQ ID NO: 898 - protein, 671 aa, Artificial Sequence
  Description of Artificial Sequence: Synthetic polypeptide
MHHHHHHGGSGSPILGYWKIKGLVQPTRLLLEYLEEKYEEHLYERDEGDKWRNKKFELGLEFPNLPYYIDGDVKLTQSMAIIRYIADKHNMLGGCPKERAEISMLEGAVLDIRYGVSRIAYSKDFETLKVDFLSKLPEMLKMFEDRLCHKTYLNGDHVTHPDFMLYDALDVVLYMDPMCLDAFPKLVCFKKRIEAIPQIDKYLKSSKYIAWPLQGWQATFGGGDHPPKSDLVPRGSPGIHRDGGSGENLYFQSSDNGPQNQRNAPRITFGGPSDSTGSNQNGERSGARSKQRRPQGLPNNTASWFTALTQHGKEDLKFPRGQGVPINTNSSPDDQIGHYRRATRRIRGGDGKMKDLSPRWYFYYLGTGPEAGLPYGANKDGIIWVATEGALNTPKDHIGTRNPANNAAIVLQLPQGTTLPKGFYAEGSRGGSQASSRSSSRSRNSSRNSTPGSSRGTSPARMAGNGGDAALALLLLDRLNQLESKMSGKGQQQQGQTVTKKSAAEASKKPRQKRTATKAYNVTQAFGRRGPEQTQGNFGDQELIRQGTDYKHWPQIAQFAPSASAFFGMSRIGMEVTPSGTWLTYTGAIKLDDKDPNFKDQVILLNKHIDAYKTFPPTEPKKDKKKKADETQALPQRQKKQQTVTLLPAADLDDFSKQLQQSMSSADSTQA

SEQ ID NO: 899 - protein, 671 aa, Artificial Sequence
  Description of Artificial Sequence: Synthetic polypeptide
MHHHHHHGGSGSPILGYWKIKGLVQPTRLLLEYLEEKYEEHLYERDEGDKWRNKKFELGLEFPNLPYYIDGDVKLTQSMAIIRYIADKHNMLGGCPKERAEISMLEGAVLDIRYGVSRIAYSKDFETLKVDFLSKLPEMLKMFEDRLCHKTYLNGDHVTHPDFMLYDALDVVLYMDPMCLDAFPKLVCFKKRIEAIPQIDKYLKSSKYIAWPLQGWQATFGGGDHPPKSDLVPRGSPGIHRDGGSGENLYFQSSDNGPQNQRNAPRITFGGPSDSTGSNQNGERSGARSKQRRPQGLPNNTASWFTPLVQFGKEDLKFPPGQGVPINTNSSPDDQIGYYRRATRRIRGGDGKMKDLPPKWYFYYLGTGPHADLPYGQKQDGVVWVARPGALNTPKDHIGTRNPANNAAIPLQLPPGTKLPKGFYAEGSRGGSQASSRSSSRSRNSSRNSTPGSSRGTSPARMAGNGGDAALALLLLDRLNQLESKMSGKGQQQQGQTVTKKSAAEASKKPRQKRTATKAYNVTQAFGRRGPEQTQGNFGDQELIRQGTDYKHWPQIAQFAPSASAFFGMSRIGMEVTPSGTWLTYTGAIKLDDKDPNFKDQVILLNKHIDAYKTFPPTEPKKDKKKKADETQALPQRQKKQQTVTLLPAADLDDFSKQLQQSMSSADSTQA

SEQ ID NO: 900 - protein, 671 aa, Artificial Sequence
  Description of Artificial Sequence: Synthetic polypeptide
MHHHHHHGGSGSPILGYWKIKGLVQPTRLLLEYLEEKYEEHLYERDEGDKWRNKKFELGLEFPNLPYYIDGDVKLTQSMAIIRYIADKHNMLGGCPKERAEISMLEGAVLDIRYGVSRIAYSKDFETLKVDFLSKLPEMLKMFEDRLCHKTYLNGDHVTHPDFMLYDALDVVLYMDPMCLDAFPKLVCFKKRIEAIPQIDKYLKSSKYIAWPLQGWQATFGGGDHPPKSDLVPRGSPGIHRDGGSGENLYFQSSDNGPQNQRNAPRITFGGPSDSTGSNQNGERSGARSKQRRPQGLPNNTASWFTPLTQNGKEDLKFPPGQGVPINTNSSPDDQIGYYRRATRRIRGGDGKMKDLPPKWYFYYLGTGPHADLPYGQKHDGVFWVARPGALNTPKDHIGTRNPANNAAIPNQLPPGTKLPKGFYAEGSRGGSQASSRSSSRSRNSSRNSTPGSSRGTSPARMAGNGGDAALALLLLDRLNQLESKMSGKGQQQQGQTVTKKSAAEASKKPRQKRTATKAYNVTQAFGRRGPEQTQGNFGDQELIRQGTDYKHWPQIAQFAPSASAFFGMSRIGMEVTPSGTWLTYTGAIKLDDKDPNFKDQVILLNKHIDAYKTFPPTEPKKDKKKKADETQALPQRQKKQQTVTLLPAADLDDFSKQLQQSMSSADSTQA

SEQ ID NO: 901 - protein, 671 aa, Artificial Sequence
  Description of Artificial Sequence: Synthetic polypeptide
MHHHHHHGGSGSPILGYWKIKGLVQPTRLLLEYLEEKYEEHLYERDEGDKWRNKKFELGLEFPNLPYYIDGDVKLTQSMAIIRYIADKHNMLGGCPKERAEISMLEGAVLDIRYGVSRIAYSKDFETLKVDFLSKLPEMLKMFEDRLCHKTYLNGDHVTHPDFMLYDALDVVLYMDPMCLDAFPKLVCFKKRIEAIPQIDKYLKSSKYIAWPLQGWQATFGGGDHPPKSDLVPRGSPGIHRDGGSGENLYFQSSDNGPQNQRNAPRITFGGPSDSTGSNQNGERSGARSKQRRPQGLPNNTASWFTALTQHGKEDLKFPRGQGVPINTNSSPDDQIGYYRRATRRIRGGDGKMKDLSPRWYFYYLGTGPEAGLPYGANKDGIIWVATEGALNTPKDHIGTRNPANNAAPVLQLPQGTTLPKGFYAEGSRGGSQASSRSSSRSRNSSRNSTPGSSRGTSPARMAGNGGDAALALLLLDRLNQLESKMSGKGQQQQGQTVTKKSAAEASKKPRQKRTATKAYNVTQAFGRRGPEQTQGNFGDQELIRQGTDYKHWPQIAQFAPSASAFFGMSRIGMEVTPSGTWLTYTGAIKLDDKDPNFKDQVILLNKHIDAYKTFPPTEPKKDKKKKADETQALPQRQKKQQTVTLLPAADLDDFSKQLQQSMSSADSTQA

SEQ ID NO: 902 - protein, 671 aa, Artificial Sequence
  Description of Artificial Sequence: Synthetic polypeptide
MHHHHHHGGSGSPILGYWKIKGLVQPTRLLLEYLEEKYEEHLYERDEGDKWRNKKFELGLEFPNLPYYIDGDVKLTQSMAIIRYIADKHNMLGGCPKERAEISMLEGAVLDIRYGVSRIAYSKDFETLKVDFLSKLPEMLKMFEDRLCHKTYLNGDHVTHPDFMLYDALDVVLYMDPMCLDAFPKLVCFKKRIEAIPQIDKYLKSSKYIAWPLQGWQATFGGGDHPPKSDLVPRGSPGIHRDGGSGENLYFQSSDNGPQNQRNAPRITFGGPSDSTGSNQNGERSGARSKQRRPQGLPNNTASWFTALTQHGKEDLKFPRGQGVPINTNSSPDDQIGYYRRATRRIRGGDGKMKDLSPRWYFYYLGTGPEAGLPYGANKDGIIWVATEGALNTPKDHIGTRNPANNAAIWLQLPQGTTLPKGFYAEGSRGGSQASSRSSSRSRNSSRNSTPGSSRGTSPARMAGNGGDAALALLLLDRLNQLESKMSGKGQQQQGQTVTKKSAAEASKKPRQKRTATKAYNVTQAFGRRGPEQTQGNFGDQELIRQGTDYKHWPQIAQFAPSASAFFGMSRIGMEVTPSGTWLTYTGAIKLDDKDPNFKDQVILLNKHIDAYKTFPPTEPKKDKKKKADETQALPQRQKKQQTVTLLPAADLDDFSKQLQQSMSSADSTQA

SEQ ID NO: 903 - protein, 671 aa, Artificial Sequence
  Description of Artificial Sequence: Synthetic polypeptide
MHHHHHHGGSGSPILGYWKIKGLVQPTRLLLEYLEEKYEEHLYERDEGDKWRNKKFELGLEFPNLPYYIDGDVKLTQSMAIIRYIADKHNMLGGCPKERAEISMLEGAVLDIRYGVSRIAYSKDFETLKVDFLSKLPEMLKMFEDRLCHKTYLNGDHVTHPDFMLYDALDVVLYMDPMCLDAFPKLVCFKKRIEAIPQIDKYLKSSKYIAWPLQGWQATFGGGDHPPKSDLVPRGSPGIHRDGGSGENLYFQSSDNGPQNQRNAPRITFGGPSDSTGSNQNGERSGARSKQRRPQGLPNNTASWFTALTQHGKEDLKFPRGQGVPINTNSSPDDQIGYYRRATRRIRGGDGKMKDLSPRWYFYYLGTGPEAGLPYGANKDGIIWVATEGALNTPKDHIGTRNPANNAAIVLQLPQGTTLPKGFYAEGSRGGSQASSRSSSRSRNSSRNSTPGSSRGTSPARMAGNGGDAALALLLLDRLNQLESKMSGKGQQQQGQTVTKKSAAEASKKPRQKRTATKGYNVTQAFGRRGPEQTQGNFGDQDLIKLGTDYKHWPQIAQFAPSASAFFGMSRIGTEETPSGTWLTYTGAIKLDKKDPNFKDQVILLNKHIDAYKTFPPTEPKKDKKKKADETQALPQRQKKQQTVTLLPAADLDDFSKQLQQSMSSADSTQA

SEQ ID NO: 904 - protein, 671 aa, Artificial Sequence
  Description of Artificial Sequence: Synthetic polypeptide
MHHHHHHGGSGSPILGYWKIKGLVQPTRLLLEYLEEKYEEHLYERDEGDKWRNKKFELGLEFPNLPYYIDGDVKLTQSMAIIRYIADKHNMLGGCPKERAEISMLEGAVLDIRYGVSRIAYSKDFETLKVDFLSKLPEMLKMFEDRLCHKTYLNGDHVTHPDFMLYDALDVVLYMDPMCLDAFPKLVCFKKRIEAIPQIDKYLKSSKYIAWPLQGWQATFGGGDHPPKSDLVPRGSPGIHRDGGSGENLYFQSSDNGPQNQRNAPRITFGGPSDSTGSNQNGERSGARSKQRRPQGLPNNTASWFTALTQHGKEDLKFPRGQGVPINTNSSPDDQIGYYRRATRRIRGGDGKMKDLSPRWYFYYLGTGPEAGLPYGANKDGIIWVATEGALNTPKDHIGTRNPANNAAIVLQLPQGTTLPKGFYAEGSRGGSQASSRSSSRSRNSSRNSTPGSSRGTSPARMAGNGGDAALALLLLDRLNQLESKMSGKGQQQQGQTVTKKSAAEASKKPRQKRTATKGYNVTQAFGRRGPEQTQGNFGDQDLNKLGTDYKHWPQIAQFAPSASAFFGMSRIGTRETPSGTWLTYTGAIKLDKKDPNFKDQVILLNKHIDAYKTFPPTEPKKDKKKKADETQALPQRQKKQQTVTLLPAADLDDFSKQLQQSMSSADSTQA

SEQ ID NO: 905 - protein, 671 aa, Artificial Sequence
  Description of Artificial Sequence: Synthetic polypeptide
MHHHHHHGGSGSPILGYWKIKGLVQPTRLLLEYLEEKYEEHLYERDEGDKWRNKKFELGLEFPNLPYYIDGDVKLTQSMAIIRYIADKHNMLGGCPKERAEISMLEGAVLDIRYGVSRIAYSKDFETLKVDFLSKLPEMLKMFEDRLCHKTYLNGDHVTHPDFMLYDALDVVLYMDPMCLDAFPKLVCFKKRIEAIPQIDKYLKSSKYIAWPLQGWQATFGGGDHPPKSDLVPRGSPGIHRDGGSGENLYFQSSDNGPQNQRNAPRITFGGPSDSTGSNQNGERSGARSKQRRPQGLPNNTASWFTALTQHGKEDLKFPKGQGVPINTNSKPDDQIGYYRRQTRRYRGGDGQMKDLNPRWYFYYLGTGPEAGLPYGANKDGIIWVATEGALNTPKDHIGTRNPANNAAIVLQLPQGTTLPKGFYAEGSRGGSQASSRSSSRSRNSSRNSTPGSSRGTSPARMAGNGGDAALALLLLDRLNQLESKMSGKGQQQQGQTVTKKSAAEASKKPRQKRTATKAYNVTQAFGRRGPEQTQGNFGDQELIRQGTDYKHWPQIAQFAPSASAFFGMSRIGMEVTPSGTWLTYTGAIKLDDKDPNFKDQVILLNKHIDAYKTFPPTEPKKDKKKKADETQALPQRQKKQQTVTLLPAADLDDFSKQLQQSMSSADSTQA

SEQ ID NO: 906 - protein, 671 aa, Artificial Sequence
  Description of Artificial Sequence: Synthetic polypeptide
MHHHHHHGGSGSPILGYWKIKGLVQPTRLLLEYLEEKYEEHLYERDEGDKWRNKKFELGLEFPNLPYYIDGDVKLTQSMAIIRYIADKHNMLGGCPKERAEISMLEGAVLDIRYGVSRIAYSKDFETLKVDFLSKLPEMLKMFEDRLCHKTYLNGDHVTHPDFMLYDALDVVLYMDPMCLDAFPKLVCFKKRIEAIPQIDKYLKSSKYIAWPLQGWQATFGGGDHPPKSDLVPRGSPGIHRDGGSGENLYFQSSDNGPQNQRNAPRITFGGPSDSTGSNQNGERSGARSKQRRPQGLPNNTASWFTALTQHGKEDLKFPRGQGVPINTNSSPDDQIGYYRRATRRIRGGDGKMKDLSPRWHFYYLGTGPEAGLPYGANKDGIIWVATEGALNTPKDHIGTRNPANNAAIVLQLPQGTTLPKGFYAEGSRGGSQASSRSSSRSRNSSRNSTPGSSRGTSPARMAGNGGDAALALLLLDRLNQLESKMSGKGQQQQGQTVTKKSAAEASKKPRQKRTATKAYNVTQAFGRRGPEQTQGNFGDQELIRQGTDYKHWPQIAQFAPSASAFFGMSRIGMEVTPSGTWLTYTGAIKLDDKDPNFKDQVILLNKHIDAYKTFPPTEPKKDKKKKADETQALPQRQKKQQTVTLLPAADLDDFSKQLQQSMSSADSTQA

SEQ ID NO: 907 - protein, 671 aa, Artificial Sequence
  Description of Artificial Sequence: Synthetic polypeptide
MHHHHHHGGSGSPILGYWKIKGLVQPTRLLLEYLEEKYEEHLYERDEGDKWRNKKFELGLEFPNLPYYIDGDVKLTQSMAIIRYIADKHNMLGGCPKERAEISMLEGAVLDIRYGVSRIAYSKDFETLKVDFLSKLPEMLKMFEDRLCHKTYLNGDHVTHPDFMLYDALDVVLYMDPMCLDAFPKLVCFKKRIEAIPQIDKYLKSSKYIAWPLQGWQATFGGGDHPPKSDLVPRGSPGIHRDGGSGENLYFQSSDNGPQNQRNAPRITFGGPSDSTGSNQNGERSGARSKQRRPQGLPNNTASWFTALTQHGKEDLKFPRGQGVPINTNSSPDDQIGYYRRATRRIRGGDGKMKDLSPRWYFYYLGTGPEAGLPYGANKDGIIWVATEGALNTPKDHIGTRNPANNAAIVLQLPQGTTLPKGFYAEGSRGGSQASSRSSSRSRNSSRNSTPGSSRGTSPARMAGNGGDAALALLLLDRLNQLESKMSGKGQQQQGQTVTKKSAAEASKKPRQKRTATKAYNVTQAFGRRGPEQTQGNFGDQELIRLGTDYKHWPQIAQFAPSASAFFGMSRIGMEVTPSGTWLTYTGAIKLDDKDPNFKDQVILLNKHIDAYKTFPPTEPKKDKKKKADETQALPQRQKKQQTVTLLPAADLDDFSKQLQQSMSSADSTQA

SEQ ID NO: 908 - protein, 671 aa, Artificial Sequence
  Description of Artificial Sequence: Synthetic polypeptide
MHHHHHHGGSGSPILGYWKIKGLVQPTRLLLEYLEEKYEEHLYERDEGDKWRNKKFELGLEFPNLPYYIDGDVKLTQSMAIIRYIADKHNMLGGCPKERAEISMLEGAVLDIRYGVSRIAYSKDFETLKVDFLSKLPEMLKMFEDRLCHKTYLNGDHVTHPDFMLYDALDVVLYMDPMCLDAFPKLVCFKKRIEAIPQIDKYLKSSKYIAWPLQGWQATFGGGDHPPKSDLVPRGSPGIHRDGGSGENLYFQSSDNGPQNQRNAPRITFGGPSDSTGSNQNGERSGARSKQRRPQGLPNNTASWFTALTQHGKEDLKFPRGQGVPINTNSSPDDQIGYYRRATRRIRGGDGKMKDLSPRWYFYYLGTGPEAGLPYGANKDGIIWVATEGALNTPKDHIGTRNPANNAAIVLQLPQGTTLPKGFYAEGSRGGSQASSRSSERSRNSSRNSTPGESRGTSPARMAGNGGDAALALLLLDRLNQLESKMSGKGQQQQGQTVTKKSAAEASKKPRQKRTATKAYNVTQAFGRRGPEQTQGNFGDQELIRQGTDYKHWPQIAQFAPSASAFFGMSRIGMEVTPSGTWLTYTGAIKLDDKDPNFKDQVILLNKHIDAYKTFPPTEPKKDKKKKADETQALPQRQKKQQTVTLLPAADLDDFSKQLQQSMSSADSTQA

SEQ ID NO: 909 - protein, 671 aa, Artificial Sequence
  Description of Artificial Sequence: Synthetic polypeptide
MHHHHHHGGSGSPILGYWKIKGLVQPTRLLLEYLEEKYEEHLYERDEGDKWRNKKFELGLEFPNLPYYIDGDVKLTQSMAIIRYIADKHNMLGGCPKERAEISMLEGAVLDIRYGVSRIAYSKDFETLKVDFLSKLPEMLKMFEDRLCHKTYLNGDHVTHPDFMLYDALDVVLYMDPMCLDAFPKLVCFKKRIEAIPQIDKYLKSSKYIAWPLQGWQATFGGGDHPPKSDLVPRGSPGIHRDGGSGENLYFQSSDNGPQNQRNAPRITFGGPSDSTGSNQNGERSGARSKQRRPQGLPNNTASWFTALTQHGKEDLKFPRGQGVPINTNSSPDDQIGYYRRATRRIRGGDGKMKDLSPRWYFYYLGTGPEAGLPYGANKSGIIWVATEGALNTPKDHIGTRNPANNAAIVLQLPQGTTLPKGFYAEGSRGGSQASSRSSSRSRNSSRNSTPGSSRGTSPARMAGNGGDAALALLLLDRLNQLESKMSGKGQQQQGQTVTKKSAAEASKKPRQKRTATKAYNVTQAFGRRGPEQTQGNFGDQELIRQGTDYKHWPQIAQFAPSASAFFGMSRIGMEVTPSGTWLTYTGAIKLDDKDPNFKDQVILLNKHIDAYKTFPPTEPKKDKKKKADETQALPQRQKKQQTVTLLPAADLDDFSKQLQQSMSSADSTQA

SEQ ID NO: 910 - protein, 671 aa, Artificial Sequence
  Description of Artificial Sequence: Synthetic polypeptide
MHHHHHHGGSGSPILGYWKIKGLVQPTRLLLEYLEEKYEEHLYERDEGDKWRNKKFELGLEFPNLPYYIDGDVKLTQSMAIIRYIADKHNMLGGCPKERAEISMLEGAVLDIRYGVSRIAYSKDFETLKVDFLSKLPEMLKMFEDRLCHKTYLNGDHVTHPDFMLYDALDVVLYMDPMCLDAFPKLVCFKKRIEAIPQIDKYLKSSKYIAWPLQGWQATFGGGDHPPKSDLVPRGSPGIHRDGGSGENLYFQSSDNGPQNQRNAPRITFGGPSDSTGSNQNGERSGARSKQRRPQGLPNNTASWFTALTQHGKEDLKFPRGQGVPINTNSSPDDQIGYYRRATRRIRGGDGKMKDLDPRWYFYYLGTGPEAGLPYGANKDGIIWVATEGALNTPKDHIGTRNPANNAAIVLQLPQGTTLPKGFYAEGSRGGSQASSRSSSRSRNSSRNSTPGSSRGTSPARMAGNGGDAALALLLLDRLNQLESKMSGKGQQQQGQTVTKKSAAEASKKPRQKRTATKAYNVTQAFGRRGPEQTQGNFGDQELIRQGTDYKHWPQIAQFAPSASAFFGMSRIGMEVTPSGTWLTYTGAIKLDDKDPNFKDQVILLNKHIDAYKTFPPTEPKKDKKKKADETQALPQRQKKQQTVTLLPAADLDDFSKQLQQSMSSADSTQA

SEQ ID NO: 911 - protein, 671 aa, Artificial Sequence
  Description of Artificial Sequence: Synthetic polypeptide
MHHHHHHGGSGSPILGYWKIKGLVQPTRLLLEYLEEKYEEHLYERDEGDKWRNKKFELGLEFPNLPYYIDGDVKLTQSMAIIRYIADKHNMLGGCPKERAEISMLEGAVLDIRYGVSRIAYSKDFETLKVDFLSKLPEMLKMFEDRLCHKTYLNGDHVTHPDFMLYDALDVVLYMDPMCLDAFPKLVCFKKRIEAIPQIDKYLKSSKYIAWPLQGWQATFGGGDHPPKSDLVPRGSPGIHRDGGSGENLYFQSSDNGPQNQRNAPRITFGGPSDSTGSNQNGERSGARSKQRRPQGLPNNTASWFTALTQHGKEDLKFPKGQGVPINTNSKPDDQIGYWRRQTRRYRGGDGQMKDLNPRWYFYYLGTGPEAGLPYGANKDGIIWVATEGALNTPKDHIGTRNPANNAAIVLQLPQGTTLPKGFYAEGSRGGSQASSRSSSRSRNSSRNSTPGSSRGTSPARMAGNGGDAALALLLLDRLNQLESKMSGKGQQQQGQTVTKKSAAEASKKPRQKRTATKAYNVTQAFGRRGPEQTQGNFGDQELIRQGTDYKHWPQIAQFAPSASAFFGMSRIGMEVTPSGTWLTYTGAIKLDDKDPNFKDQVILLNKHIDAYKTFPPTEPKKDKKKKADETQALPQRQKKQQTVTLLPAADLDDFSKQLQQSMSSADSTQA

SEQ ID NO: 912 - protein, 671 aa, Artificial Sequence
  Description of Artificial Sequence: Synthetic polypeptide
MHHHHHHGGSGSPILGYWKIKGLVQPTRLLLEYLEEKYEEHLYERDEGDKWRNKKFELGLEFPNLPYYIDGDVKLTQSMAIIRYIADKHNMLGGCPKERAEISMLEGAVLDIRYGVSRIAYSKDFETLKVDFLSKLPEMLKMFEDRLCHKTYLNGDHVTHPDFMLYDALDVVLYMDPMCLDAFPKLVCFKKRIEAIPQIDKYLKSSKYIAWPLQGWQATFGGGDHPPKSDLVPRGSPGIHRDGGSGENLYFQSSDNGPQNQRNAPRITFGGPSDSTGSNQNGERSGARSKQRRPQGLPNNTASWFTALTQHGKEDLKFPRGQGVPINTNSSPDDQIGYYRRATRRIRGGDGKMKDLSPRWYFYYLGTGPEAGLPYGANKDGILWVATEGALNTPKDHIGTRNPANNAAIVLQLPQGTTLPKGFYAEGSRGGSQASSRSSSRSRNSSRNSTPGSSRGTSPARMAGNGGDAALALLLLDRLNQLESKMSGKGQQQQGQTVTKKSAAEASKKPRQKRTATKAYNVTQAFGRRGPEQTQGNFGDQELIRQGTDYKHWPQIAQFAPSASAFFGMSRIGMEVTPSGTWLTYTGAIKLDDKDPNFKDQVILLNKHIDAYKTFPPTEPKKDKKKKADETQALPQRQKKQQTVTLLPAADLDDFSKQLQQSMSSADSTQA

SEQ ID NO: 913 - protein, 671 aa, Artificial Sequence
  Description of Artificial Sequence: Synthetic polypeptide
MHHHHHHGGSGSPILGYWKIKGLVQPTRLLLEYLEEKYEEHLYERDEGDKWRNKKFELGLEFPNLPYYIDGDVKLTQSMAIIRYIADKHNMLGGCPKERAEISMLEGAVLDIRYGVSRIAYSKDFETLKVDFLSKLPEMLKMFEDRLCHKTYLNGDHVTHPDFMLYDALDVVLYMDPMCLDAFPKLVCFKKRIEAIPQIDKYLKSSKYIAWPLQGWQATFGGGDHPPKSDLVPRGSPGIHRDGGSGENLYFQSSDNGPQNQRNAPRITFGGPSDSTGSNQNGERSGARSKQRRPQGLPNNTASWFTALTQHGKEDLKFPRGQGVPINTNSSPDDQIGYYRRATRRIRGGDGKMKDLSPRWYFYYLGTGPEAGLPYGANKDGIIWVATEGALNTPKDHIGTRNPANNAAYVLQLPQGTTLPKGFYAEGSRGGSQASSRSSSRSRNSSRNSTPGSSRGTSPARMAGNGGDAALALLLLDRLNQLESKMSGKGQQQQGQTVTKKSAAEASKKPRQKRTATKAYNVTQAFGRRGPEQTQGNFGDQELIRQGTDYKHWPQIAQFAPSASAFFGMSRIGMEVTPSGTWLTYTGAIKLDDKDPNFKDQVILLNKHIDAYKTFPPTEPKKDKKKKADETQALPQRQKKQQTVTLLPAADLDDFSKQLQQSMSSADSTQA

SEQ ID NO: 914 - protein, 671 aa, Artificial Sequence
  Description of Artificial Sequence: Synthetic polypeptide
MHHHHHHGGSGSPILGYWKIKGLVQPTRLLLEYLEEKYEEHLYERDEGDKWRNKKFELGLEFPNLPYYIDGDVKLTQSMAIIRYIADKHNMLGGCPKERAEISMLEGAVLDIRYGVSRIAYSKDFETLKVDFLSKLPEMLKMFEDRLCHKTYLNGDHVTHPDFMLYDALDVVLYMDPMCLDAFPKLVCFKKRIEAIPQIDKYLKSSKYIAWPLQGWQATFGGGDHPPKSDLVPRGSPGIHRDGGSGENLYFQSSDNGPQNQRNAPRITFGGPSDSTGSNQNGERSGARSKQRRPQGLPNNTASWFTALTQHGKEDLKFPRGQGVPINTNSSPDDQIGYYRRATRRIRGGDGKMKDLSPRWYFYYLGTGPEAGLPYGANKDGIIWVATEGALNTPKDHIGTRNPANNAAIVLQLPQGTTLPKGFYAEGSRGGSQASSRSSSRSRNSSRNSTPGSSRGTSPARMAGNGGDAALALLLLDRLNQLESKMSGKGQQQQGQTVTKKSAAEASKKPRQKRTATKDYNVTQAFGRRGPEQTQGNFGDQDLIKLGTDYKHWPQIAQFAPSASAFFGMSRISTEETPSGTWLTYTGAIKLDKKDPNFKDQVILLNKHIDAYKTFPPTEPKKDKKKKADETQALPQRQKKQQTVTLLPAADLDDFSKQLQQSMSSADSTQA

SEQ ID NO: 915 - protein, 671 aa, Artificial Sequence
  Description of Artificial Sequence: Synthetic polypeptide
MHHHHHHGGSGSPILGYWKIKGLVQPTRLLLEYLEEKYEEHLYERDEGDKWRNKKFELGLEFPNLPYYIDGDVKLTQSMAIIRYIADKHNMLGGCPKERAEISMLEGAVLDIRYGVSRIAYSKDFETLKVDFLSKLPEMLKMFEDRLCHKTYLNGDHVTHPDFMLYDALDVVLYMDPMCLDAFPKLVCFKKRIEAIPQIDKYLKSSKYIAWPLQGWQATFGGGDHPPKSDLVPRGSPGIHRDGGSGENLYFQSSDNGPQNQRNAPRITFGGPSDSTGSNQNGERSGARSKQRRPQGLPNNTASWFTALTQHGKEDLKFPRGQGVPINTNSSPDDQIGYYRRATRRIRGGDGKMKDLSPRWYFYYLGTGPEAGLPYGANKDGIIWVATEGALNTPKDHIGTRNPANNAAIVLQLPQGTTLPKGFYAEGSRGGSQASSRSSSRSRNSSRNSTPGSSRGTSPARMAGNGGDAALALLLLDRLNQLESKMSGKGQQQQGQTVTKKSAAEASKKPRQKRTATKAYNVTQAFGRRGPEQTQGNFGDQELIRQGTEYKHWPQIAQFAPSASAFFGMSRIGMEVTPSGTWLTYTGAIKLDDKDPNFKDQVILLNKHIDAYKTFPPTEPKKDKKKKADETQALPQRQKKQQTVTLLPAADLDDFSKQLQQSMSSADSTQA

SEQ ID NO: 916 - protein, 671 aa, Artificial Sequence
  Description of Artificial Sequence: Synthetic polypeptide
MHHHHHHGGSGSPILGYWKIKGLVQPTRLLLEYLEEKYEEHLYERDEGDKWRNKKFELGLEFPNLPYYIDGDVKLTQSMAIIRYIADKHNMLGGCPKERAEISMLEGAVLDIRYGVSRIAYSKDFETLKVDFLSKLPEMLKMFEDRLCHKTYLNGDHVTHPDFMLYDALDVVLYMDPMCLDAFPKLVCFKKRIEAIPQIDKYLKSSKYIAWPLQGWQATFGGGDHPPKSDLVPRGSPGIHRDGGSGENLYFQSSDNGPQNQRNAPRITFGGPSDSTGSNQNGERSGARSKQRRPQGLPNNTASWFTALTQHGKEDLKFPRGQGVPINTNSSPDDQIGYYRRATRRIRGGDGKMKDLSPRWYFYYLGTGPEAGLPYGANKDGIIWVATEGALNTPKDHIGTRNPANNAAIVLQLPQGTTLPKGFYAEGSRGGSQASSRSSSRSRNSSRNSTPGSSRGTSPARMAGNGGDAALALLLLDRLNQLESKMSGKGQQQQGQTVTKKSAAEMSKKPRQKRTATKGYNVTQCFGPRGPEQTQGNFGDADLIKKGTDYKHWPQIAQFAPSASAFFGMSRISSKEQPSGTWLTYTGAIKLDKDDPNFKDQVILLNKHIDAYKTFPPTEPKKDKKKKADETQALPQRQKKQQTVTLLPAADLDDFSKQLQQSMSSADSTQA

SEQ ID NO: 917 - protein, 671 aa, Artificial Sequence
  Description of Artificial Sequence: Synthetic polypeptide
MHHHHHHGGSGSPILGYWKIKGLVQPTRLLLEYLEEKYEEHLYERDEGDKWRNKKFELGLEFPNLPYYIDGDVKLTQSMAIIRYIADKHNMLGGCPKERAEISMLEGAVLDIRYGVSRIAYSKDFETLKVDFLSKLPEMLKMFEDRLCHKTYLNGDHVTHPDFMLYDALDVVLYMDPMCLDAFPKLVCFKKRIEAIPQIDKYLKSSKYIAWPLQGWQATFGGGDHPPKSDLVPRGSPGIHRDGGSGENLYFQSSDNGPQNQRNAPRITFGGPSDSTGSNQNGERSGARSKQRRPQGLPNNTASWFTALTQHGKEDLKFPRGQGVPINTNSSPDDQIGYYRRATRRIRGGDGKMKDLSPRWYFYYLGTGPEAGLPYGANKDGIIWVATEGALNTPKDHIGTRNPANNAAIVLQLPQGTTLPKGFYAEGSRGGSQASSRSSSRSRNSSRNSTPGSSRGTSPARMAGNGGDAALALLLLDRLNQLESKMSGKGQQQQGQTVTKKSAAEASKKPRQKRTATKAYNVTQAFGRRGPKQTQGNFGDQELIRQGTDYKHWPQIAQFAPSASAFFGMSRIGMEVTPSGTWLTYTGAIKLDDKDPNFKDQVILLNKHIDAYKTFPPTEPKKDKKKKADETQALPQRQKKQQTVTLLPAADLDDFSKQLQQSMSSADSTQA

SEQ ID NO: 918 - protein, 671 aa, Artificial Sequence
  Description of Artificial Sequence: Synthetic polypeptide
MHHHHHHGGSGSPILGYWKIKGLVQPTRLLLEYLEEKYEEHLYERDEGDKWRNKKFELGLEFPNLPYYIDGDVKLTQSMAIIRYIADKHNMLGGCPKERAEISMLEGAVLDIRYGVSRIAYSKDFETLKVDFLSKLPEMLKMFEDRLCHKTYLNGDHVTHPDFMLYDALDVVLYMDPMCLDAFPKLVCFKKRIEAIPQIDKYLKSSKYIAWPLQGWQATFGGGDHPPKSDLVPRGSPGIHRDGGSGENLYFQSSDNGPQNQRNAPRITFGGPSDSTGSNQNGERSGARSKQRRPQGLPNNTASWFTALTQHGKEDLKFPRGQGVPINTNSSPDDQIGYYRRATRRIRGGDGKMKDLSPRWYFYYLGTGPEAGLPYGANKDGIIWVATEGALNTPKDHIGTRNPANNAACVLQLPQGTTLPKGFYAEGSRGGSQASSRSSSRSRNSSRNSTPGSSRGTSPARMAGNGGDAALALLLLDRLNQLESKMSGKGQQQQGQTVTKKSAAEASKKPRQKRTATKAYNVTQAFGRRGPEQTQGNFGDQELIRQGTDYKHWPQIAQFAPSASAFFGMSRIGMEVTPSGTWLTYTGAIKLDDKDPNFKDQVILLNKHIDAYKTFPPTEPKKDKKKKADETQALPQRQKKQQTVTLLPAADLDDFSKQLQQSMSSADSTQA

SEQ ID NO: 919 - protein, 671 aa, Artificial Sequence
  Description of Artificial Sequence: Synthetic polypeptide
MHHHHHHGGSGSPILGYWKIKGLVQPTRLLLEYLEEKYEEHLYERDEGDKWRNKKFELGLEFPNLPYYIDGDVKLTQSMAIIRYIADKHNMLGGCPKERAEISMLEGAVLDIRYGVSRIAYSKDFETLKVDFLSKLPEMLKMFEDRLCHKTYLNGDHVTHPDFMLYDALDVVLYMDPMCLDAFPKLVCFKKRIEAIPQIDKYLKSSKYIAWPLQGWQATFGGGDHPPKSDLVPRGSPGIHRDGGSGENLYFQSSDNGPQNQRNAPRITFGGPSDSTGSNQNGERSGARSKQRRPQGLPNNTASWFTPLTQHGKEDLKFPPGQGVPINTNSSPDDQIGYYRRATRRIRGGDGKMKDLPPRWYFYYLGTGPEADLPYGQVKDGIVWVAAEGALNTPKDHIGTRNPANNAAIPLQLPPGTTLPKGFYAEGSRGGSQASSRSSSRSRNSSRNSTPGSSRGTSPARMAGNGGDAALALLLLDRLNQLESKMSGKGQQQQGQTVTKKSAAEASKKPRQKRTATKAYNVTQAFGRRGPEQTQGNFGDQELIRQGTDYKHWPQIAQFAPSASAFFGMSRIGMEVTPSGTWLTYTGAIKLDDKDPNFKDQVILLNKHIDAYKTFPPTEPKKDKKKKADETQALPQRQKKQQTVTLLPAADLDDFSKQLQQSMSSADSTQA

SEQ ID NO: 920 - protein, 671 aa, Artificial Sequence
  Description of Artificial Sequence: Synthetic polypeptide
MHHHHHHGGSGSPILGYWKIKGLVQPTRLLLEYLEEKYEEHLYERDEGDKWRNKKFELGLEFPNLPYYIDGDVKLTQSMAIIRYIADKHNMLGGCPKERAEISMLEGAVLDIRYGVSRIAYSKDFETLKVDFLSKLPEMLKMFEDRLCHKTYLNGDHVTHPDFMLYDALDVVLYMDPMCLDAFPKLVCFKKRIEAIPQIDKYLKSSKYIAWPLQGWQATFGGGDHPPKSDLVPRGSPGIHRDGGSGENLYFQSSDNGPQNQRNAPRITFGGPSDSTGSNQNGERSGARSKQRRPQGLPNNTASWFTALTQHGKEDLKFPRGQGVPINTNSSPDDQIGYYRRATRRIRGGDGKMKDLSPRWYFYYLGTGPEAGLPYGANKDGIIWVATEGALNTPKDHIGTRNPANNAAFVLQLPQGTTLPKGFYAEGSRGGSQASSRSSSRSRNSSRNSTPGSSRGTSPARMAGNGGDAALALLLLDRLNQLESKMSGKGQQQQGQTVTKKSAAEASKKPRQKRTATKAYNVTQAFGRRGPEQTQGNFGDQELIRQGTDYKHWPQIAQFAPSASAFFGMSRIGMEVTPSGTWLTYTGAIKLDDKDPNFKDQVILLNKHIDAYKTFPPTEPKKDKKKKADETQALPQRQKKQQTVTLLPAADLDDFSKQLQQSMSSADSTQA

SEQ ID NO: 921 - protein, 671 aa, Artificial Sequence
  Description of Artificial Sequence: Synthetic polypeptide
MHHHHHHGGSGSPILGYWKIKGLVQPTRLLLEYLEEKYEEHLYERDEGDKWRNKKFELGLEFPNLPYYIDGDVKLTQSMAIIRYIADKHNMLGGCPKERAEISMLEGAVLDIRYGVSRIAYSKDFETLKVDFLSKLPEMLKMFEDRLCHKTYLNGDHVTHPDFMLYDALDVVLYMDPMCLDAFPKLVCFKKRIEAIPQIDKYLKSSKYIAWPLQGWQATFGGGDHPPKSDLVPRGSPGIHRDGGSGENLYFQSSDNGPQNQRNAPRITFGGPSDSTGSNQNGERSGARSKQRRPQGLPNNTASWFTALTQHGKEDLKFPRGQGVPINTNSSPDDQIGYYRRATRRIRGGDGKMKDLSPRWYFYYLGTGPEAGLPYGANKDGIIWVATEGALNTPKDHIGTRNPANNAAIVLQLPQGTTLPKGFYAEGSRGGSQASSRSSSRSRNSSRNSTPGSSRGTSPARMAGNGGDAALALLLLDRLNQLESKMSGKGQQQQGQTVTKKSAAEASKKPRQKRTATKAYNVTQAFGRRGPEQTQGNFGDQNLIRQGTDYKHWPQIAQFAPSASAFFGMSRIGMEVTPSGTWLTYTGAIKLDDKDPNFKDQVILLNKHIDAYKTFPPTEPKKDKKKKADETQALPQRQKKQQTVTLLPAADLDDFSKQLQQSMSSADSTQA

SEQ ID NO: 922 - protein, 671 aa, Artificial Sequence
  Description of Artificial Sequence: Synthetic polypeptide
MHHHHHHGGSGSPILGYWKIKGLVQPTRLLLEYLEEKYEEHLYERDEGDKWRNKKFELGLEFPNLPYYIDGDVKLTQSMAIIRYIADKHNMLGGCPKERAEISMLEGAVLDIRYGVSRIAYSKDFETLKVDFLSKLPEMLKMFEDRLCHKTYLNGDHVTHPDFMLYDALDVVLYMDPMCLDAFPKLVCFKKRIEAIPQIDKYLKSSKYIAWPLQGWQATFGGGDHPPKSDLVPRGSPGIHRDGGSGENLYFQSSDNGPQNQRNAPRITFGGPSDSTGSNQNGERSGARSKQRRPQGLPNNTASWFTALTQHGKEDLKFPRGQGMPINTNSSPDDQIGYYRRATRRIRGGDGKMKDLSPRWYFYYLGTGPEAGLPYGANKDGIIWVATEGALNTPKDHIGTRNPANNAAIVLQLPQGTTLPKGFYAEGSRGGSQASSRSSSRSRNSSRNSTPGSSRGTSPARMAGNGGDAALALLLLDRLNQLESKMSGKGQQQQGQTVTKKSAAEASKKPRQKRTATKAYNVTQAFGRRGPEQTQGNFGDQELIRQGTDYKHWPQIAQFAPSASAFFGMSRIGMEVTPSGTWLTYTGAIKLDDKDPNFKDQVILLNKHIDAYKTFPPTEPKKDKKKKADETQALPQRQKKQQTVTLLPAADLDDFSKQLQQSMSSADSTQA

SEQ ID NO: 923 - protein, 671 aa, Artificial Sequence
  Description of Artificial Sequence: Synthetic polypeptide
MHHHHHHGGSGSPILGYWKIKGLVQPTRLLLEYLEEKYEEHLYERDEGDKWRNKKFELGLEFPNLPYYIDGDVKLTQSMAIIRYIADKHNMLGGCPKERAEISMLEGAVLDIRYGVSRIAYSKDFETLKVDFLSKLPEMLKMFEDRLCHKTYLNGDHVTHPDFMLYDALDVVLYMDPMCLDAFPKLVCFKKRIEAIPQIDKYLKSSKYIAWPLQGWQATFGGGDHPPKSDLVPRGSPGIHRDGGSGENLYFQSSDNGPQNQRNAPRITFGGPSDSTGSNQNGERSGARSKQRRPQGLPNNTASWFTALTQHGKEDLKFPRGQGVPINTNSSPDDQIGYYRRATRRIRGGDGKMKDLSPRWYFYYLGTGPEAGLPYGDNKDGIIWVATEGALNTPKDHIGTRNPANNAAIVLQLPQGTTLPKGFYAEGSRGGSQASSRSSSRSRNSSRNSTPGSSRGTSPARMAGNGGDAALALLLLDRLNQLESKMSGKGQQQQGQTVTKKSAAEASKKPRQKRTATKAYNVTQAFGRRGPEQTQGNFGDQELIRQGTDYKHWPQIAQFAPSASAFFGMSRIGMEVTPSGTWLTYTGAIKLDDKDPNFKDQVILLNKHIDAYKTFPPTEPKKDKKKKADETQALPQRQKKQQTVTLLPAADLDDFSKQLQQSMSSADSTQA

SEQ ID NO: 924 - protein, 671 aa, Artificial Sequence
  Description of Artificial Sequence: Synthetic polypeptide
MHHHHHHGGSGSPILGYWKIKGLVQPTRLLLEYLEEKYEEHLYERDEGDKWRNKKFELGLEFPNLPYYIDGDVKLTQSMAIIRYIADKHNMLGGCPKERAEISMLEGAVLDIRYGVSRIAYSKDFETLKVDFLSKLPEMLKMFEDRLCHKTYLNGDHVTHPDFMLYDALDVVLYMDPMCLDAFPKLVCFKKRIEAIPQIDKYLKSSKYIAWPLQGWQATFGGGDHPPKSDLVPRGSPGIHRDGGSGENLYFQSSDNGPQNQRNAPRITFGGPSDSTGSNQNGERSGARSKQRRPQGLPNNTASWFTALTQHGKEDLKFPRGQGVPINTNSSPDDQIGYYRRATRRIRGGDGKMKDLSPRWYFYYLGTGPEAGLPYGANKDGIVWVATEGALNTPKDHIGTRNPANNAAIVLQLPQGTTLPKGFYAEGSRGGSQASSRSSSRSRNSSRNSTPGSSRGTSPARMAGNGGDAALALLLLDRLNQLESKMSGKGQQQQGQTVTKKSAAEASKKPRQKRTATKAYNVTQAFGRRGPEQTQGNFGDQELIRQGTDYKHWPQIAQFAPSASAFFGMSRIGMEVTPSGTWLTYTGAIKLDDKDPNFKDQVILLNKHIDAYKTFPPTEPKKDKKKKADETQALPQRQKKQQTVTLLPAADLDDFSKQLQQSMSSADSTQA

SEQ ID NO: 925 - protein, 671 aa, Artificial Sequence
  Description of Artificial Sequence: Synthetic polypeptide
MHHHHHHGGSGSPILGYWKIKGLVQPTRLLLEYLEEKYEEHLYERDEGDKWRNKKFELGLEFPNLPYYIDGDVKLTQSMAIIRYIADKHNMLGGCPKERAEISMLEGAVLDIRYGVSRIAYSKDFETLKVDFLSKLPEMLKMFEDRLCHKTYLNGDHVTHPDFMLYDALDVVLYMDPMCLDAFPKLVCFKKRIEAIPQIDKYLKSSKYIAWPLQGWQATFGGGDHPPKSDLVPRGSPGIHRDGGSGENLYFQSSDNGPQNQRNAPRITFGGPSDSTGSNQNGERSGARSKQRRPQGLPNNTASWFTALTQHGKEDLKFPRGQGVPINTNSSPDDQIGYYRRATRRIRGGDGKMKDLSPRWYFYYLGTGPEAGLPYGANKDGIIWVATEGALNTPKDHIGTRNPANNAAIVLQLPQGTTLPKGFYAEGSRGGSQASSRSSSRSRNSSRNSTPGSERGTSPARMAGNGGDAALALLLLDRLNQLESKMSGKGQQQQGQTVTKKSAAEASKKPRQKRTATKAYNVTQAFGRRGPEQTQGNFGDQELIRQGTDYKHWPQIAQFAPSASAFFGMSRIGMEVTPSGTWLTYTGAIKLDDKDPNFKDQVILLNKHIDAYKTFPPTEPKKDKKKKADETQALPQRQKKQQTVTLLPAADLDDFSKQLQQSMSSADSTQA

SEQ ID NO: 926 - protein, 671 aa, Artificial Sequence
  Description of Artificial Sequence: Synthetic polypeptide
MHHHHHHGGSGSPILGYWKIKGLVQPTRLLLEYLEEKYEEHLYERDEGDKWRNKKFELGLEFPNLPYYIDGDVKLTQSMAIIRYIADKHNMLGGCPKERAEISMLEGAVLDIRYGVSRIAYSKDFETLKVDFLSKLPEMLKMFEDRLCHKTYLNGDHVTHPDFMLYDALDVVLYMDPMCLDAFPKLVCFKKRIEAIPQIDKYLKSSKYIAWPLQGWQATFGGGDHPPKSDLVPRGSPGIHRDGGSGENLYFQSSDNGPQNQRNAPRITFGGPSDSTGSNQNGERSGARSKQRRPQGLPNNTASWFTALTQHGKEDLKFPRGQGVPINTNSSPDDQIGYYRRATRRIRGGDGKMKDLSPRWYFYYLGTGPEAGLPYGANKDGIIWVATEGALNTPKDHIGTRNPANNAAIVLQLPQGTTLPKGFYAEGSRGGSQASSRSSSRSRNSSRNSTPGSSRGTSPARMAGNGGDAALALLLLDRLNQLESKMSGKGQQQQGQTVTKKSAAEMSKKPRQKRTATKGCNVTQCFGPRGPEQTQGNFGDADLVKKGTDYKHWPQIAQFAPSASAFFGMSRISSKEQPSGTWLTYTGAIKLDKDDPNFKDQVILLNKHIDAYKTFPPTEPKKDKKKKADETQALPQRQKKQQTVTLLPAADLDDFSKQLQQSMSSADSTQA

SEQ ID NO: 927 - protein, 671 aa, Artificial Sequence
  Description of Artificial Sequence: Synthetic polypeptide
MHHHHHHGGSGSPILGYWKIKGLVQPTRLLLEYLEEKYEEHLYERDEGDKWRNKKFELGLEFPNLPYYIDGDVKLTQSMAIIRYIADKHNMLGGCPKERAEISMLEGAVLDIRYGVSRIAYSKDFETLKVDFLSKLPEMLKMFEDRLCHKTYLNGDHVTHPDFMLYDALDVVLYMDPMCLDAFPKLVCFKKRIEAIPQIDKYLKSSKYIAWPLQGWQATFGGGDHPPKSDLVPRGSPGIHRDGGSGENLYFQSSDNGPQNQRNAPRITFGGPSDSTGSNQNGERSGARSKQRRPQGLPNNTASWFTALTQHGKEDLKFPRGQGVPINTNSSPDDQIGYYRRATRRIRGGDGKMKDLSPRWYFYYLGTGPEAGLPYGANKDGIIWVATEGALNTPKDHIGTRNPANNAAIVLQLPQGTTLPKGFYAEGSRGGSQASSRSSSRSRNSSRNSTPGSSRGTSPARMAGNGGDAALALLLLDRLNQLESKMSGKGQQQQGQTVTKKSAAEASKKPRQKRTATKAYNVTQAFGRRGPEQTQGNFGDQELIRQGTDYKHWPQIAQFAPSASAFFGMSRIGMEVTPSGTWLTYTGAIKLDDKDPNFKNQVILLNKHIDAYKTFPPTEPKKDKKKKADETQALPQRQKKQQTVTLLPAADLDDFSKQLQQSMSSADSTQA

SEQ ID NO: 928 - protein, 671 aa, Artificial Sequence
  Description of Artificial Sequence: Synthetic polypeptide
MHHHHHHGGSGSPILGYWKIKGLVQPTRLLLEYLEEKYEEHLYERDEGDKWRNKKFELGLEFPNLPYYIDGDVKLTQSMAIIRYIADKHNMLGGCPKERAEISMLEGAVLDIRYGVSRIAYSKDFETLKVDFLSKLPEMLKMFEDRLCHKTYLNGDHVTHPDFMLYDALDVVLYMDPMCLDAFPKLVCFKKRIEAIPQIDKYLKSSKYIAWPLQGWQATFGGGDHPPKSDLVPRGSPGIHRDGGSGENLYFQSSDNGPQNQRNAPRITFGGPSDSTGSNQNGERSGARSKQRRPQGLPNNTASWFTALTQHGKEDLKFPRGQGVPINTNSSPDDQIGYYRRATRRIRGGDGKMKDLSPRWYFYYLGTGPEAGLPYGANKDGIIWVATEGALNTPKDHIGTRNPANNAAIVLQLPQGTTLPKGFYAEGSRGGSQASSRSSSRSRNSSRNSTPGSSRGTSPARMAGNGGDAALALLLLDRLNQLESKMSGKGQQQQGQTVTKKSAAEASKKPRQKRTATKAYNVTQAFGRRGPEQTQGNFGDQELIRQGTDYKHWPQIAQFAPSASAFFGMSRIGMEMTPSGTWLTYTGAIKLDDKDPNFKDQVILLNKHIDAYKTFPPTEPKKDKKKKADETQALPQRQKKQQTVTLLPAADLDDFSKQLQQSMSSADSTQA

SEQ ID NO: 929 - protein, 671 aa, Artificial Sequence
  Description of Artificial Sequence: Synthetic polypeptide
MHHHHHHGGSGSPILGYWKIKGLVQPTRLLLEYLEEKYEEHLYERDEGDKWRNKKFELGLEFPNLPYYIDGDVKLTQSMAIIRYIADKHNMLGGCPKERAEISMLEGAVLDIRYGVSRIAYSKDFETLKVDFLSKLPEMLKMFEDRLCHKTYLNGDHVTHPDFMLYDALDVVLYMDPMCLDAFPKLVCFKKRIEAIPQIDKYLKSSKYIAWPLQGWQATFGGGDHPPKSDLVPRGSPGIHRDGGSGENLYFQSSDNGPQNQRNAPRITFGGPSDSTGSNQNGERSGARSKQRRPQGLPNNTASWFTALTQHGKEDLKFPRGQGVPINTNSSPDDQIGYYRRATRRIRGGDGKMKDLSPRWYFYYLGTGPEAGLPYGANKDGIIWVATEGALNTPKDHIGTRNPANNAAIVLQLPQGTTLPKGFYAEGSRGGSQASSRSSSRSRNSSRNSTPGSSRGTSPARMAGNGGDAALALLLLDRLNQLESKMSGKGQQQQGQTVTKKSAAEASKAPRQKRTATKAYNVTQAFGRRGPEQTQGNFGDQELIRQGTDYKHWPQIAQFAPSASAFFGMSRIGMEVTPSGTWLTYTGAIKLDDKDPNFKDQVILLNKHIDAYKTFPPTEPKKDKKKKADETQALPQRQKKQQTVTLLPAADLDDFSKQLQQSMSSADSTQA

SEQ ID NO: 930 - protein, 671 aa, Artificial Sequence
  Description of Artificial Sequence: Synthetic polypeptide
MHHHHHHGGSGSPILGYWKIKGLVQPTRLLLEYLEEKYEEHLYERDEGDKWRNKKFELGLEFPNLPYYIDGDVKLTQSMAIIRYIADKHNMLGGCPKERAEISMLEGAVLDIRYGVSRIAYSKDFETLKVDFLSKLPEMLKMFEDRLCHKTYLNGDHVTHPDFMLYDALDVVLYMDPMCLDAFPKLVCFKKRIEAIPQIDKYLKSSKYIAWPLQGWQATFGGGDHPPKSDLVPRGSPGIHRDGGSGENLYFQSSDNGPQNQRNAPRITFGGPSDSTGSNQNGERSGARSKQRRPQGLPNNTASWFTALTQHGKEDLKFPRGQGVPINTNSSPDDQIGYYRRATRRIRGGDGKMKDLSPRWYFYYLGTGPEAGLPYGANKDGIIWVATEGALNTPKDHIGTRNPANNAAIVLQLPQGTTLPKGFYAEGSRGGSQASSRSSSRSRNSSRNSTPGSSRGTSPARMAGNGGDAALALLLLDRLNQLESKMSGKGQQQQGQTVTKKSAAEMSKKPRQKRTATKECNVTQCFGPRGPEQTQGNFGDAELVKKGTDYKHWPQIAQFAPSASAFFGMSRISSKETPSGTWLTYTGAIKLDKDDPNFKDQVILLNKHIDAYKTFPPTEPKKDKKKKADETQALPQRQKKQQTVTLLPAADLDDFSKQLQQSMSSADSTQA

SEQ ID NO: 931 - protein, 671 aa, Artificial Sequence
  Description of Artificial Sequence: Synthetic polypeptide
MHHHHHHGGSGSPILGYWKIKGLVQPTRLLLEYLEEKYEEHLYERDEGDKWRNKKFELGLEFPNLPYYIDGDVKLTQSMAIIRYIADKHNMLGGCPKERAEISMLEGAVLDIRYGVSRIAYSKDFETLKVDFLSKLPEMLKMFEDRLCHKTYLNGDHVTHPDFMLYDALDVVLYMDPMCLDAFPKLVCFKKRIEAIPQIDKYLKSSKYIAWPLQGWQATFGGGDHPPKSDLVPRGSPGIHRDGGSGENLYFQSSDNGPQNQRNAPRITFGGPSDSTGSNQNGERSGARSKQRRPQGLPNNTASWFTALTQHGKEDLKFPRGQGVPINTNSSPDDQIGYYRRATRRIRGGDGKMKDLSPRWYFYYLGTGPEAGLPYGANKDGIIWVATEGALNTPKDHIGTRNPANNAAIVLQLPQGTTLPKGFYAEGSRGGSQASSRSSSRSRNSSRNSTPGSSRGTSPARMAGNGGDAALALLLLDRLNQLESKMSGKGQQQQGQTVTKKSAAEMSKKPRQKRTATKGCNVTQCFGPRGPEQTQGNFGDAELNKKGVDYKHWPQIAQFAPSASAFFGMSRISSKETPSGTWLTYTGAIKLDKDDPNFKDQVILLNKHIDAYKTFPPTEPKKDKKKKADETQALPQRQKKQQTVTLLPAADLDDFSKQLQQSMSSADSTQA

SEQ ID NO: 932 - protein, 671 aa, Artificial Sequence
  Description of Artificial Sequence: Synthetic polypeptide
MHHHHHHGGSGSPILGYWKIKGLVQPTRLLLEYLEEKYEEHLYERDEGDKWRNKKFELGLEFPNLPYYIDGDVKLTQSMAIIRYIADKHNMLGGCPKERAEISMLEGAVLDIRYGVSRIAYSKDFETLKVDFLSKLPEMLKMFEDRLCHKTYLNGDHVTHPDFMLYDALDVVLYMDPMCLDAFPKLVCFKKRIEAIPQIDKYLKSSKYIAWPLQGWQATFGGGDHPPKSDLVPRGSPGIHRDGGSGENLYFQSSDNGPQNQRNAPRITFGGPSDSTGSNQNGERSGARSKQRRPQGLPNNTASWFTALTQHGKEDLKFPRGQGVPINTNSSPDDQIGYYRRATRRIRGGDGKMKDLSPKWYFYYLGTGPEAGLPYGANKDGIIWVATEGALNTPKDHIGTRNPANNAAIVLQLPQGTTLPKGFYAEGSRGGSQASSRSSSRSRNSSRNSTPGSSRGTSPARMAGNGGDAALALLLLDRLNQLESKMSGKGQQQQGQTVTKKSAAEASKKPRQKRTATKAYNVTQAFGRRGPEQTQGNFGDQELIRQGTDYKHWPQIAQFAPSASAFFGMSRIGMEVTPSGTWLTYTGAIKLDDKDPNFKDQVILLNKHIDAYKTFPPTEPKKDKKKKADETQALPQRQKKQQTVTLLPAADLDDFSKQLQQSMSSADSTQA

SEQ ID NO: 933 - protein, 671 aa, Artificial Sequence
  Description of Artificial Sequence: Synthetic polypeptide
MHHHHHHGGSGSPILGYWKIKGLVQPTRLLLEYLEEKYEEHLYERDEGDKWRNKKFELGLEFPNLPYYIDGDVKLTQSMAIIRYIADKHNMLGGCPKERAEISMLEGAVLDIRYGVSRIAYSKDFETLKVDFLSKLPEMLKMFEDRLCHKTYLNGDHVTHPDFMLYDALDVVLYMDPMCLDAFPKLVCFKKRIEAIPQIDKYLKSSKYIAWPLQGWQATFGGGDHPPKSDLVPRGSPGIHRDGGSGENLYFQSSDNGPQNQRNAPRITFGGPSDSTGSNQNGERSGARSKQRRPQGLPNNTASWFTALTQHGKEDLKFPRGQGVPINTNSSPDDQIGYYRRATRRIRGGDGKMKDLSPRWYFYYLGTGPEAGLPYGANKDGIIWVATEGALNTPKDHIGTRNPANNAAIVLQLPQGTTLPKGFYAEGSRGGSQASSRSSSRSRNSSRNSTPGSSRGTSPARMAGNGGDAALALLLLDRLNQLESKMSGKGQQQQGQTVTKKSAAEMSKKPRQKRTATKECNVTQCFGPRGPEQTQGNFGDAELNKKGVDYKHWPQIAQFAPSASAFFGMSRISSKETPSGTWLTYTGAIKLDKDDPNFKDQVILLNKHIDAYKTFPPTEPKKDKKKKADETQALPQRQKKQQTVTLLPAADLDDFSKQLQQSMSSADSTQA

SEQ ID NO: 934 - protein, 671 aa, Artificial Sequence
  Description of Artificial Sequence: Synthetic polypeptide
MHHHHHHGGSGSPILGYWKIKGLVQPTRLLLEYLEEKYEEHLYERDEGDKWRNKKFELGLEFPNLPYYIDGDVKLTQSMAIIRYIADKHNMLGGCPKERAEISMLEGAVLDIRYGVSRIAYSKDFETLKVDFLSKLPEMLKMFEDRLCHKTYLNGDHVTHPDFMLYDALDVVLYMDPMCLDAFPKLVCFKKRIEAIPQIDKYLKSSKYIAWPLQGWQATFGGGDHPPKSDLVPRGSPGIHRDGGSGENLYFQSSDNGPQNQRNAPRITFGGPSDSTGSNQNGERSGARSKQRRPQGLPNNTASWFTALTQHGKEDLKFPRGQGVPINTNSSPDDQIGYYRRATRRIRGGDGKMKDLSPRWYFYYLGTGPEAGLPYGANKDGIIWVATEGALNTPKDHIGTRNPANNAAIVNQLPQGTTLPKGFYAEGSRGGSQASSRSSSRSRNSSRNSTPGSSRGTSPARMAGNGGDAALALLLLDRLNQLESKMSGKGQQQQGQTVTKKSAAEASKKPRQKRTATKAYNVTQAFGRRGPEQTQGNFGDQELIRQGTDYKHWPQIAQFAPSASAFFGMSRIGMEVTPSGTWLTYTGAIKLDDKDPNFKDQVILLNKHIDAYKTFPPTEPKKDKKKKADETQALPQRQKKQQTVTLLPAADLDDFSKQLQQSMSSADSTQA

SEQ ID NO: 935 - protein, 671 aa, Artificial Sequence
  Description of Artificial Sequence: Synthetic polypeptide
MHHHHHHGGSGSPILGYWKIKGLVQPTRLLLEYLEEKYEEHLYERDEGDKWRNKKFELGLEFPNLPYYIDGDVKLTQSMAIIRYIADKHNMLGGCPKERAEISMLEGAVLDIRYGVSRIAYSKDFETLKVDFLSKLPEMLKMFEDRLCHKTYLNGDHVTHPDFMLYDALDVVLYMDPMCLDAFPKLVCFKKRIEAIPQIDKYLKSSKYIAWPLQGWQATFGGGDHPPKSDLVPRGSPGIHRDGGSGENLYFQSSDNGPQNQRNAPRITFGGPSDSTGSNQNGERSGARSKQRRPQGLPNNTASWFTPLTQFGKEDLKFPPGQGVPINTNSSPDDQIGYYRRATRRIRGGDGKMKDLPPKWYFYYLGTGPHADLPYGQKQDGVVWVARPGALNTPKDHIGTRNPANNAAIPLQLPPGTKLPKGFYAEGSRGGSQASSRSSSRSRNSSRNSTPGSSRGTSPARMAGNGGDAALALLLLDRLNQLESKMSGKGQQQQGQTVTKKSAAEASKKPRQKRTATKAYNVTQAFGRRGPEQTQGNFGDQELIRQGTDYKHWPQIAQFAPSASAFFGMSRIGMEVTPSGTWLTYTGAIKLDDKDPNFKDQVILLNKHIDAYKTFPPTEPKKDKKKKADETQALPQRQKKQQTVTLLPAADLDDFSKQLQQSMSSADSTQA

SEQ ID NO: 936 - protein, 671 aa, Artificial Sequence
  Description of Artificial Sequence: Synthetic polypeptide
MHHHHHHGGSGSPILGYWKIKGLVQPTRLLLEYLEEKYEEHLYERDEGDKWRNKKFELGLEFPNLPYYIDGDVKLTQSMAIIRYIADKHNMLGGCPKERAEISMLEGAVLDIRYGVSRIAYSKDFETLKVDFLSKLPEMLKMFEDRLCHKTYLNGDHVTHPDFMLYDALDVVLYMDPMCLDAFPKLVCFKKRIEAIPQIDKYLKSSKYIAWPLQGWQATFGGGDHPPKSDLVPRGSPGIHRDGGSGENLYFQSSDNGPQNQRNAPRITFGGPSDSTGSNQNGERSGARSKQRRPQGLPNNTASWFTALTQHGKEDLKFPRGQGVPINTNSSPDDQIGYYRRATRRIRGGDGKMKDLSPRWYFYYLGTGPEAGLPYGANKDGIIWVATEGALNTPKDHIGTRNPANNAAIQLQLPQGTTLPKGFYAEGSRGGSQASSRSSSRSRNSSRNSTPGSSRGTSPARMAGNGGDAALALLLLDRLNQLESKMSGKGQQQQGQTVTKKSAAEASKKPRQKRTATKAYNVTQAFGRRGPEQTQGNFGDQELIRQGTDYKHWPQIAQFAPSASAFFGMSRIGMEVTPSGTWLTYTGAIKLDDKDPNFKDQVILLNKHIDAYKTFPPTEPKKDKKKKADETQALPQRQKKQQTVTLLPAADLDDFSKQLQQSMSSADSTQA

SEQ ID NO: 937 - protein, 671 aa, Artificial Sequence
  Description of Artificial Sequence: Synthetic polypeptide
MHHHHHHGGSGSPILGYWKIKGLVQPTRLLLEYLEEKYEEHLYERDEGDKWRNKKFELGLEFPNLPYYIDGDVKLTQSMAIIRYIADKHNMLGGCPKERAEISMLEGAVLDIRYGVSRIAYSKDFETLKVDFLSKLPEMLKMFEDRLCHKTYLNGDHVTHPDFMLYDALDVVLYMDPMCLDAFPKLVCFKKRIEAIPQIDKYLKSSKYIAWPLQGWQATFGGGDHPPKSDLVPRGSPGIHRDGGSGENLYFQSSDNGPQNQRNAPRITFGGPSDSTGSNQNGERSGARSKQRRPQGLPNNTASWFTALTQHGKEDLKFPRGQGVPINTNSSPDDQIGYYRRATRRIRGGDGKMKDLSPRWYFYYLGTGPEAGLPYGANKDGIIWVATEGALNTPKDHIGTRNPANNAAIVLQLPQGTTLPKGFYAEGSRGGSQASSRSSSRSRNSSRNSTPGSSRGTSPARMAGNGGDAALALLLLDRLNQLESKMSGKGQQQQGQTVTKKSAAEASKKPRQKRTATKAYNVTQAFGRRGPEQTQGNFGDQELIRQGTDYKHWPQIAQFAPSASAFFGMSRIKMEVTPSGTWLTYTGAIKLDDKDPNFKDQVILLNKHIDAYKTFPPTEPKKDKKKKADETQALPQRQKKQQTVTLLPAADLDDFSKQLQQSMSSADSTQA

SEQ ID NO: 938 - protein, 671 aa, Artificial Sequence
  Description of Artificial Sequence: Synthetic polypeptide
MHHHHHHGGSGSPILGYWKIKGLVQPTRLLLEYLEEKYEEHLYERDEGDKWRNKKFELGLEFPNLPYYIDGDVKLTQSMAIIRYIADKHNMLGGCPKERAEISMLEGAVLDIRYGVSRIAYSKDFETLKVDFLSKLPEMLKMFEDRLCHKTYLNGDHVTHPDFMLYDALDVVLYMDPMCLDAFPKLVCFKKRIEAIPQIDKYLKSSKYIAWPLQGWQATFGGGDHPPKSDLVPRGSPGIHRDGGSGENLYFQSSDNGPQNQRNAPRITFGGPSDSTGSNQNGERSGARSKQRRPQGLPNNTASWFTALTQHGKEDLKFPRGQGVPINTNSSPDDQIGYYRRATRRIRGGDGKMKDLSPRWYFYYLGTGPEAGLPYGANKDGIIWVATEGALNTPKDHIGTRNPANNAAIVLQLPQGTTLPKGFYAEGSRGGSQASSRSSSRSRNSSRNSTPGSSRGTSPARMAGNGGDAALALLLLDRLNQLESKMSGKGQQQQGQTVTKKSAAEASKKPRQKRTATKAYNVTQAFGRRGPEQTQGNFGDQELIRQGTDYKHWPQIAQFAPSTSAFFGMSRIGMEVTPSGTWLTYTGAIKLDDKDPNFKDQVILLNKHIDAYKTFPPTEPKKDKKKKADETQALPQRQKKQQTVTLLPAADLDDFSKQLQQSMSSADSTQA

SEQ ID NO: 939 - protein, 671 aa, Artificial Sequence
  Description of Artificial Sequence: Synthetic polypeptide
MHHHHHHGGSGSPILGYWKIKGLVQPTRLLLEYLEEKYEEHLYERDEGDKWRNKKFELGLEFPNLPYYIDGDVKLTQSMAIIRYIADKHNMLGGCPKERAEISMLEGAVLDIRYGVSRIAYSKDFETLKVDFLSKLPEMLKMFEDRLCHKTYLNGDHVTHPDFMLYDALDVVLYMDPMCLDAFPKLVCFKKRIEAIPQIDKYLKSSKYIAWPLQGWQATFGGGDHPPKSDLVPRGSPGIHRDGGSGENLYFQSSDNGPQNQRNAPRITFGGPSDSTGSNQNGERSGARSKQRRPQGLPNNTASWFTALTQHGKEDLKFPRGQGVPINTNSSPDDQIGYYRRATRRIRGGDGKMKDLSPRWYFYYLGTGPEAGLPYGANKDGIIWVATEGALNTPKDHIGTRNPANNAAIVLQLPQGTTLPKGFYAEGSRGGSQASSRSSSRSRNSSRNSTPGSSRGTSPARMAGNGGDAALALLLLDRLNQLESKMSGKGQQQQGQTVTKKSAAEASKKPRQKRTATKAYNVTQAFGRRGPEQTQGNFGDQELIRQGTDYKHWPQIAQFAPSASAFFGMSRIGVEVTPSGTWLTYTGAIKLDDKDPNFKDQVILLNKHIDAYKTFPPTEPKKDKKKKADETQALPQRQKKQQTVTLLPAADLDDFSKQLQQSMSSADSTQA

SEQ ID NO: 940 - protein, 671 aa, Artificial Sequence
  Description of Artificial Sequence: Synthetic polypeptide
MHHHHHHGGSGSPILGYWKIKGLVQPTRLLLEYLEEKYEEHLYERDEGDKWRNKKFELGLEFPNLPYYIDGDVKLTQSMAIIRYIADKHNMLGGCPKERAEISMLEGAVLDIRYGVSRIAYSKDFETLKVDFLSKLPEMLKMFEDRLCHKTYLNGDHVTHPDFMLYDALDVVLYMDPMCLDAFPKLVCFKKRIEAIPQIDKYLKSSKYIAWPLQGWQATFGGGDHPPKSDLVPRGSPGIHRDGGSGENLYFQSSDNGPQNQRNAPRITFGGPSDSTGSNQNGERSGARSKQRRPQGLPNNTASWFTALTQHGKEDLKFPRGQGVPINTNSSPDDQIGYYRRATRRIRGGDGKMKDLSPRWYFYYLGTGPEAGLPYGANKDGIIWVATEGALNTPKDHIGTRNPANNAAIVLQLPQGTTLPKGFYAEGSRGGSQASSRSSSRSRNSSRNSTPGSSRGTSPARMAGNGGDAALALLLLDRLNQLESKMSGKGQQQQGQTVTKKSAAEASKKPRQKRTATKAYNVTQAFGRRGPEQTQGNFGDQKLIRQGTDYKHWPQIAQFAPSASAFFGMSRIGMEVTPSGTWLTYTGAIKLDDKDPNFKDQVILLNKHIDAYKTFPPTEPKKDKKKKADETQALPQRQKKQQTVTLLPAADLDDFSKQLQQSMSSADSTQA

SEQ ID NO: 941 - protein, 671 aa, Artificial Sequence
  Description of Artificial Sequence: Synthetic polypeptide
MHHHHHHGGSGSPILGYWKIKGLVQPTRLLLEYLEEKYEEHLYERDEGDKWRNKKFELGLEFPNLPYYIDGDVKLTQSMAIIRYIADKHNMLGGCPKERAEISMLEGAVLDIRYGVSRIAYSKDFETLKVDFLSKLPEMLKMFEDRLCHKTYLNGDHVTHPDFMLYDALDVVLYMDPMCLDAFPKLVCFKKRIEAIPQIDKYLKSSKYIAWPLQGWQATFGGGDHPPKSDLVPRGSPGIHRDGGSGENLYFQSSDNGPQNQRNAPRITFGGPSDSTGSNQNGERSGARSKQRRPQGLPNNTASWFTALTQHGKEDLKFPRGQGVPINTNSSPDDQIGYYRRATRRIRGGDGKMKDLSPRWYFYYLGTGPEAGLPYGANKDGIIWVATEGALNTPKDHIGTRNPANNAAIVLQLPQGTTLPKGFYAEGSRGGSQASSRSSSRSRNSSRNSTPGSSRGTSPARMAGNGGDAALALLLLDRLNQLESKMSGKGQQQQGQTVTKKSAAEASKKPRQKRTATKAYNVTQAFGRRGPEQTQGNFGDQELIRQGTDYKHWPQIAQFAPSASAFFGMSRIGMESTPSGTWLTYTGAIKLDDKDPNFKDQVILLNKHIDAYKTFPPTEPKKDKKKKADETQALPQRQKKQQTVTLLPAADLDDFSKQLQQSMSSADSTQA

SEQ ID NO: 942 - protein, 671 aa, Artificial Sequence
  Description of Artificial Sequence: Synthetic polypeptide
MHHHHHHGGSGSPILGYWKIKGLVQPTRLLLEYLEEKYEEHLYERDEGDKWRNKKFELGLEFPNLPYYIDGDVKLTQSMAIIRYIADKHNMLGGCPKERAEISMLEGAVLDIRYGVSRIAYSKDFETLKVDFLSKLPEMLKMFEDRLCHKTYLNGDHVTHPDFMLYDALDVVLYMDPMCLDAFPKLVCFKKRIEAIPQIDKYLKSSKYIAWPLQGWQATFGGGDHPPKSDLVPRGSPGIHRDGGSGENLYFQSSDNGPQNQRNAPRITFGGPSDSTGSNQNGERSGARSKQRRPQGLPNNTASWFTALTQHGKEDLKFPRGQGVPINTNSSPDDQIGYYRRATRRIRGGDGKMKDLSPRWYFYYLGTGPEAGLPYGANKDGIIWVATEGALNTPKDHIGTRNPANNAAIVLQLPQGTTLPKGFYAEGSRGGSQASSRSSSRSRNSSRNSTPGSSRGTSPARMAGNGGDAALALLLLDRLNQLESKMSGKGQQQQGQTVTKKSAAEMSKKPRQKRTATKGCNVTQCFGPRGPEQTQGNFGDADLNKKGTDYKHWPQIAQFAPSASAFFGMSRISSKETPSGTWLTYTGAIKLDKDDPNFKDQVILLNKHIDAYKTFPPTEPKKDKKKKADETQALPQRQKKQQTVTLLPAADLDDFSKQLQQSMSSADSTQA

SEQ ID NO: 943 - protein, 671 aa, Artificial Sequence
  Description of Artificial Sequence: Synthetic polypeptide
MHHHHHHGGSGSPILGYWKIKGLVQPTRLLLEYLEEKYEEHLYERDEGDKWRNKKFELGLEFPNLPYYIDGDVKLTQSMAIIRYIADKHNMLGGCPKERAEISMLEGAVLDIRYGVSRIAYSKDFETLKVDFLSKLPEMLKMFEDRLCHKTYLNGDHVTHPDFMLYDALDVVLYMDPMCLDAFPKLVCFKKRIEAIPQIDKYLKSSKYIAWPLQGWQATFGGGDHPPKSDLVPRGSPGIHRDGGSGENLYFQSSDNGPQNQRNAPRITFGGPSDSTGSNQNGERSGARSKQRRPQGLPNNTASWFTALTQHGKEDLKFPRGQGVPINTNSSPDDQIGYYRRATRRIRGGDGKMKDLSPRWYFYYLGTGPHAGLPYGANKDGIIWVATEGALNTPKDHIGTRNPANNAAIVLQLPQGTTLPKGFYAEGSRGGSQASSRSSSRSRNSSRNSTPGSSRGTSPARMAGNGGDAALALLLLDRLNQLESKMSGKGQQQQGQTVTKKSAAEASKKPRQKRTATKAYNVTQAFGRRGPEQTQGNFGDQELIRQGTDYKHWPQIAQFAPSASAFFGMSRIGMEVTPSGTWLTYTGAIKLDDKDPNFKDQVILLNKHIDAYKTFPPTEPKKDKKKKADETQALPQRQKKQQTVTLLPAADLDDFSKQLQQSMSSADSTQA

SEQ ID NO: 944 - protein, 671 aa, Artificial Sequence
  Description of Artificial Sequence: Synthetic polypeptide
MHHHHHHGGSGSPILGYWKIKGLVQPTRLLLEYLEEKYEEHLYERDEGDKWRNKKFELGLEFPNLPYYIDGDVKLTQSMAIIRYIADKHNMLGGCPKERAEISMLEGAVLDIRYGVSRIAYSKDFETLKVDFLSKLPEMLKMFEDRLCHKTYLNGDHVTHPDFMLYDALDVVLYMDPMCLDAFPKLVCFKKRIEAIPQIDKYLKSSKYIAWPLQGWQATFGGGDHPPKSDLVPRGSPGIHRDGGSGENLYFQSSDNGPQNQRNAPRITFGGPSDSTGSNQNGERSGARSKQRRPQGLPNNTASWFTALTQHGKEDLKFPRGQGVPINTNSSPDDQIGYYRRATRRIRGGDGKMKDLSPRWYFYYLGTGPEAGLPYGANMDGIIWVATEGALNTPKDHIGTRNPANNAAIVLQLPQGTTLPKGFYAEGSRGGSQASSRSSSRSRNSSRNSTPGSSRGTSPARMAGNGGDAALALLLLDRLNQLESKMSGKGQQQQGQTVTKKSAAEASKKPRQKRTATKAYNVTQAFGRRGPEQTQGNFGDQELIRQGTDYKHWPQIAQFAPSASAFFGMSRIGMEVTPSGTWLTYTGAIKLDDKDPNFKDQVILLNKHIDAYKTFPPTEPKKDKKKKADETQALPQRQKKQQTVTLLPAADLDDFSKQLQQSMSSADSTQA

SEQ ID NO: 945 - protein, 671 aa, Artificial Sequence
  Description of Artificial Sequence: Synthetic polypeptide
MHHHHHHGGSGSPILGYWKIKGLVQPTRLLLEYLEEKYEEHLYERDEGDKWRNKKFELGLEFPNLPYYIDGDVKLTQSMAIIRYIADKHNMLGGCPKERAEISMLEGAVLDIRYGVSRIAYSKDFETLKVDFLSKLPEMLKMFEDRLCHKTYLNGDHVTHPDFMLYDALDVVLYMDPMCLDAFPKLVCFKKRIEAIPQIDKYLKSSKYIAWPLQGWQATFGGGDHPPKSDLVPRGSPGIHRDGGSGENLYFQSSDNGPQNQRNAPRITFGGPSDSTGSNQNGERSGARSKQRRPQGLPNNTASWFTALTQHGKEDLKFPRGQGVPINTNSSPDDQIGYYRRATRRIRGGDGKMKDLSPRWYFYYLGTGPEAGLPYGANKDGIIWVAREGALNTPKDHIGTRNPANNAAIVLQLPQGTTLPKGFYAEGSRGGSQASSRSSSRSRNSSRNSTPGSSRGTSPARMAGNGGDAALALLLLDRLNQLESKMSGKGQQQQGQTVTKKSAAEASKKPRQKRTATKAYNVTQAFGRRGPEQTQGNFGDQELIRQGTDYKHWPQIAQFAPSASAFFGMSRIGMEVTPSGTWLTYTGAIKLDDKDPNFKDQVILLNKHIDAYKTFPPTEPKKDKKKKADETQALPQRQKKQQTVTLLPAADLDDFSKQLQQSMSSADSTQA

SEQ ID NO: 946 - protein, 671 aa, Artificial Sequence
  Description of Artificial Sequence: Synthetic polypeptide
MHHHHHHGGSGSPILGYWKIKGLVQPTRLLLEYLEEKYEEHLYERDEGDKWRNKKFELGLEFPNLPYYIDGDVKLTQSMAIIRYIADKHNMLGGCPKERAEISMLEGAVLDIRYGVSRIAYSKDFETLKVDFLSKLPEMLKMFEDRLCHKTYLNGDHVTHPDFMLYDALDVVLYMDPMCLDAFPKLVCFKKRIEAIPQIDKYLKSSKYIAWPLQGWQATFGGGDHPPKSDLVPRGSPGIHRDGGSGENLYFQSSDNGPQNQRNAPRITFGGPSDSTGSNQNGERSGARSKQRRPQGLPNNTASWFTALTQHGKEDLKFPRGQGVPINTNSSPDDQIGYYRRATRRIRGGDGKMKDLSPRWYFYYLGTGPEAGLPYGANKDGIIWVATEGALNTPKDHIGTRNPANNAAIVLQLPQGTTLPKGFYAEGSRGGSQASSRSSSRSRNSSRNSTPGSSRGTSPARMAGNGGDAALALLLLDRLNQLESKMSGKGQQQQGQTVTKKSAAEASKKPRQKRTATKEYNVTQAFGRRGPEQTQGNFGDQDLIKLGTDYKHWPQIAQFAPSASAFFGMSRISTRETPSGTWLTYTGAIKLDKKDPNFKDQVILLNKHIDAYKTFPPTEPKKDKKKKADETQALPQRQKKQQTVTLLPAADLDDFSKQLQQSMSSADSTQA

SEQ ID NO: 947 - protein, 671 aa, Artificial Sequence
  Description of Artificial Sequence: Synthetic polypeptide
MHHHHHHGGSGSPILGYWKIKGLVQPTRLLLEYLEEKYEEHLYERDEGDKWRNKKFELGLEFPNLPYYIDGDVKLTQSMAIIRYIADKHNMLGGCPKERAEISMLEGAVLDIRYGVSRIAYSKDFETLKVDFLSKLPEMLKMFEDRLCHKTYLNGDHVTHPDFMLYDALDVVLYMDPMCLDAFPKLVCFKKRIEAIPQIDKYLKSSKYIAWPLQGWQATFGGGDHPPKSDLVPRGSPGIHRDGGSGENLYFQSSDNGPQNQRNAPRITFGGPSDSTGSNQNGERSGARSKQRRPQGLPNNTASWFTALTQHGKEDLKFPRGQGAPINTNSSPDDQIGYYRRATRRIRGGDGKMKDLSPRWYFYYLGTGPEAGLPYGANKDGIIWVATEGALNTPKDHIGTRNPANNAAIVLQLPQGTTLPKGFYAEGSRGGSQASSRSSSRSRNSSRNSTPGSSRGTSPARMAGNGGDAALALLLLDRLNQLESKMSGKGQQQQGQTVTKKSAAEASKKPRQKRTATKAYNVTQAFGRRGPEQTQGNFGDQELIRQGTDYKHWPQIAQFAPSASAFFGMSRIGMEVTPSGTWLTYTGAIKLDDKDPNFKDQVILLNKHIDAYKTFPPTEPKKDKKKKADETQALPQRQKKQQTVTLLPAADLDDFSKQLQQSMSSADSTQA

SEQ ID NO: 948 - protein, 671 aa, Artificial Sequence
  Description of Artificial Sequence: Synthetic polypeptide
MHHHHHHGGSGSPILGYWKIKGLVQPTRLLLEYLEEKYEEHLYERDEGDKWRNKKFELGLEFPNLPYYIDGDVKLTQSMAIIRYIADKHNMLGGCPKERAEISMLEGAVLDIRYGVSRIAYSKDFETLKVDFLSKLPEMLKMFEDRLCHKTYLNGDHVTHPDFMLYDALDVVLYMDPMCLDAFPKLVCFKKRIEAIPQIDKYLKSSKYIAWPLQGWQATFGGGDHPPKSDLVPRGSPGIHRDGGSGENLYFQSSDNGPQNQRNAPRITFGGPSDSTGSNQNGERSGARSKQRRPQGLPNNTASWFTALTQHGKEDLKFPRGQGVPINTNSSPDDQIGYYRRATRRIRGGDGKMKDLSPRWYFYYLGTGPEAGLPYGANKDGIIWVATEGALNTPKDHIGTRNPANNAAIVLQLPQGTTLPKGFYAEGSRGGSQASSRSSSRSRNSSRNSTPGSSRGTSPARMAGNGGDAALALLLLDRLNQLESKMSGKGQQQQGQTVTKKSAAEASKKPRQKRTATKAYNVTQAFGRRGPEQTQGNFGDQELIRQGTDYKHWPQIAQFAPSASAFFGMSRIGMEVTPSGTWLTYTGSIKLDDKDPNFKDQVILLNKHIDAYKTFPPTEPKKDKKKKADETQALPQRQKKQQTVTLLPAADLDDFSKQLQQSMSSADSTQA

SEQ ID NO: 949 - protein, 671 aa, Artificial Sequence
  Description of Artificial Sequence: Synthetic polypeptide
MHHHHHHGGSGSPILGYWKIKGLVQPTRLLLEYLEEKYEEHLYERDEGDKWRNKKFELGLEFPNLPYYIDGDVKLTQSMAIIRYIADKHNMLGGCPKERAEISMLEGAVLDIRYGVSRIAYSKDFETLKVDFLSKLPEMLKMFEDRLCHKTYLNGDHVTHPDFMLYDALDVVLYMDPMCLDAFPKLVCFKKRIEAIPQIDKYLKSSKYIAWPLQGWQATFGGGDHPPKSDLVPRGSPGIHRDGGSGENLYFQSSDNGPQNQRNAPRITFGGPSDSTGSNQNGERSGARSKQRRPQGLPNNTASWFTALTQHGKEDLKFPRGQGVPINTNSSPDDQIGYYRRATRRIRGGDGKMKDLSPRWYFYYLGTGPEAGLPYGANKDGIIWVATEGALNTPKDHIGTRNPANNAAIVLQLPQGTTLPKGFYAEGSRGGSQASSRSSSRSRNSSRNSTPGSSRGTSPARMAGNGGDAALALLLLDRLNQLESKMSGKGQQQQGQTVTKKSAAEASKKPRQKRTATKKYNVTQAFGRRGPEQTQGNFGDQELIRQGTDYKHWPQIAQFAPSASAFFGMSRIGMEVTPSGTWLTYTGAIKLDDKDPNFKDQVILLNKHIDAYKTFPPTEPKKDKKKKADETQALPQRQKKQQTVTLLPAADLDDFSKQLQQSMSSADSTQA

SEQ ID NO: 950 - protein, 671 aa, Artificial Sequence
  Description of Artificial Sequence: Synthetic polypeptide
MHHHHHHGGSGSPILGYWKIKGLVQPTRLLLEYLEEKYEEHLYERDEGDKWRNKKFELGLEFPNLPYYIDGDVKLTQSMAIIRYIADKHNMLGGCPKERAEISMLEGAVLDIRYGVSRIAYSKDFETLKVDFLSKLPEMLKMFEDRLCHKTYLNGDHVTHPDFMLYDALDVVLYMDPMCLDAFPKLVCFKKRIEAIPQIDKYLKSSKYIAWPLQGWQATFGGGDHPPKSDLVPRGSPGIHRDGGSGENLYFQSSDNGPQNQRNAPRITFGGPSDSTGSNQNGERSGARSKQRRPQGLPNNTASWFTALTQHGKEDLKFPRGQGVPINTNSSPDDQIGYYRRATRRIRGGDGKMKDLSPRWYFYYLGTGPEAGLPYGANKDGIIWVATEGALNTPKDHIGTRNPANNAAIVLQLPQGTTLPKGFYAEGSRGGSQASSRSSSRSRNSSRNSTPGSSRGTSPARMAGNGGDAALALLLLDRLNQLESKMSGKGQQQQGQTVTKKSAAEASKKPRQKRTATKAYNVTQAFGRRGPEQTQGNFGDQELIRQGTDYKHWPQIAQFAPSASAFFGMSRIGMEVQPSGTWLTYTGAIKLDDKDPNFKDQVILLNKHIDAYKTFPPTEPKKDKKKKADETQALPQRQKKQQTVTLLPAADLDDFSKQLQQSMSSADSTQA

SEQ ID NO: 951 - protein, 671 aa, Artificial Sequence
  Description of Artificial Sequence: Synthetic polypeptide
MHHHHHHGGSGSPILGYWKIKGLVQPTRLLLEYLEEKYEEHLYERDEGDKWRNKKFELGLEFPNLPYYIDGDVKLTQSMAIIRYIADKHNMLGGCPKERAEISMLEGAVLDIRYGVSRIAYSKDFETLKVDFLSKLPEMLKMFEDRLCHKTYLNGDHVTHPDFMLYDALDVVLYMDPMCLDAFPKLVCFKKRIEAIPQIDKYLKSSKYIAWPLQGWQATFGGGDHPPKSDLVPRGSPGIHRDGGSGENLYFQSSDNGPQNQRNAPRITFGGPSDSTGSNQNGERSGARSKQRRPQGLPNNTASWFTALTQHGKEDLKFPRGQGVPINTNSSPDDQIGYYRRATRRIRGGDGKMKDLSPRWYFYYLGTGPEAGLPYGANKDGIIWVATEGALNTPKDHIGTRNPANNAAIVLQLPQGTTLPKGFYMEGSRGGSQASSRSSSRSRNSSRNSTPGSSRGTSPARMAGNGGDAALALLLLDRLNQLESKMSGKGQQQQGQTVTKKSAAEASKKPRQKRTATKAYNVTQAFGRRGPEQTQGNFGDQELIRQGTDYKHWPQIAQFAPSASAFFGMSRIGMEVTPSGTWLTYTGAIKLDDKDPNFKDQVILLNKHIDAYKTFPPTEPKKDKKKKADETQALPQRQKKQQTVTLLPAADLDDFSKQLQQSMSSADSTQA

SEQ ID NO: 952 - protein, 671 aa, Artificial Sequence
  Description of Artificial Sequence: Synthetic polypeptide
MHHHHHHGGSGSPILGYWKIKGLVQPTRLLLEYLEEKYEEHLYERDEGDKWRNKKFELGLEFPNLPYYIDGDVKLTQSMAIIRYIADKHNMLGGCPKERAEISMLEGAVLDIRYGVSRIAYSKDFETLKVDFLSKLPEMLKMFEDRLCHKTYLNGDHVTHPDFMLYDALDVVLYMDPMCLDAFPKLVCFKKRIEAIPQIDKYLKSSKYIAWPLQGWQATFGGGDHPPKSDLVPRGSPGIHRDGGSGENLYFQSSDNGPQNQRNAPRITFGGPSDSTGSNQNGERSGARSKQRRPQGLPNNTASWFTPLTQHGKEDLKFPPGQGVPINTNSSPDDQIGYYRRATRRIRGGDGKMKDLPPKWYFYYLGTGPHADLPYGQKQDGVVWVARPGALNTPKDHIGTRNPANNAAIPLQLPPGTKLPKGFYAEGSRGGSQASSRSSSRSRNSSRNSTPGSSRGTSPARMAGNGGDAALALLLLDRLNQLESKMSGKGQQQQGQTVTKKSAAEASKKPRQKRTATKAYNVTQAFGRRGPEQTQGNFGDQELIRQGTDYKHWPQIAQFAPSASAFFGMSRIGMEVTPSGTWLTYTGAIKLDDKDPNFKDQVILLNKHIDAYKTFPPTEPKKDKKKKADETQALPQRQKKQQTVTLLPAADLDDFSKQLQQSMSSADSTQA

SEQ ID NO: 953 - protein, 671 aa, Artificial Sequence
  Description of Artificial Sequence: Synthetic polypeptide
MHHHHHHGGSGSPILGYWKIKGLVQPTRLLLEYLEEKYEEHLYERDEGDKWRNKKFELGLEFPNLPYYIDGDVKLTQSMAIIRYIADKHNMLGGCPKERAEISMLEGAVLDIRYGVSRIAYSKDFETLKVDFLSKLPEMLKMFEDRLCHKTYLNGDHVTHPDFMLYDALDVVLYMDPMCLDAFPKLVCFKKRIEAIPQIDKYLKSSKYIAWPLQGWQATFGGGDHPPKSDLVPRGSPGIHRDGGSGENLYFQSSDNGPQNQRNAPRITFGGPSDSTGSNQNGERSGARSKQRRPQGLPNNTASWFTALTQHGKEDLKFPRGQGVPINTNSSPDDQIGYYRRATRRIRGGDGKMKDLSPRWYFYYLGTGPEAGLPYGANKDGIIWVATEGALNTPKDHIGTRNPANNAAIGLQLPQGTTLPKGFYAEGSRGGSQASSRSSSRSRNSSRNSTPGSSRGTSPARMAGNGGDAALALLLLDRLNQLESKMSGKGQQQQGQTVTKKSAAEASKKPRQKRTATKAYNVTQAFGRRGPEQTQGNFGDQELIRQGTDYKHWPQIAQFAPSASAFFGMSRIGMEVTPSGTWLTYTGAIKLDDKDPNFKDQVILLNKHIDAYKTFPPTEPKKDKKKKADETQALPQRQKKQQTVTLLPAADLDDFSKQLQQSMSSADSTQA

SEQ ID NO: 954 - protein, 671 aa, Artificial Sequence
  Description of Artificial Sequence: Synthetic polypeptide
MHHHHHHGGSGSPILGYWKIKGLVQPTRLLLEYLEEKYEEHLYERDEGDKWRNKKFELGLEFPNLPYYIDGDVKLTQSMAIIRYIADKHNMLGGCPKERAEISMLEGAVLDIRYGVSRIAYSKDFETLKVDFLSKLPEMLKMFEDRLCHKTYLNGDHVTHPDFMLYDALDVVLYMDPMCLDAFPKLVCFKKRIEAIPQIDKYLKSSKYIAWPLQGWQATFGGGDHPPKSDLVPRGSPGIHRDGGSGENLYFQSSDNGPQNQRNAPRITFGGPSDSTGSNQNGERSGARSKQRRPQGLPNNTASWFTALTQFGKEDLKFPRGQGVPINTNSSPDDQIGYYRRATRRIRGGDGKMKDLSPRWYFYYLGTGPEAGLPYGANKDGIIWVATEGALNTPKDHIGTRNPANNAAIVLQLPQGTTLPKGFYAEGSRGGSQASSRSSSRSRNSSRNSTPGSSRGTSPARMAGNGGDAALALLLLDRLNQLESKMSGKGQQQQGQTVTKKSAAEASKKPRQKRTATKAYNVTQAFGRRGPEQTQGNFGDQELIRQGTDYKHWPQIAQFAPSASAFFGMSRIGMEVTPSGTWLTYTGAIKLDDKDPNFKDQVILLNKHIDAYKTFPPTEPKKDKKKKADETQALPQRQKKQQTVTLLPAADLDDFSKQLQQSMSSADSTQA

SEQ ID NO: 955 - protein, 671 aa, Artificial Sequence
  Description of Artificial Sequence: Synthetic polypeptide
MHHHHHHGGSGSPILGYWKIKGLVQPTRLLLEYLEEKYEEHLYERDEGDKWRNKKFELGLEFPNLPYYIDGDVKLTQSMAIIRYIADKHNMLGGCPKERAEISMLEGAVLDIRYGVSRIAYSKDFETLKVDFLSKLPEMLKMFEDRLCHKTYLNGDHVTHPDFMLYDALDVVLYMDPMCLDAFPKLVCFKKRIEAIPQIDKYLKSSKYIAWPLQGWQATFGGGDHPPKSDLVPRGSPGIHRDGGSGENLYFQSSDNGPQNQRNAPRITFGGPSDSTGSNQNGERSGARSKQRRPQGLPNNTASWFTPLTQHGKEDLKFPPGQGVPINTNSSPDDQIGYYRRATRRIRGGDGKMKDLPPRWYFYYLGTGPEADLPYGAVKDGIFWVAEEGALNTPKDHIGTRNPANNAAIPLQLPPGTTLPKGFYAEGSRGGSQASSRSSSRSRNSSRNSTPGSSRGTSPARMAGNGGDAALALLLLDRLNQLESKMSGKGQQQQGQTVTKKSAAEASKKPRQKRTATKAYNVTQAFGRRGPEQTQGNFGDQELIRQGTDYKHWPQIAQFAPSASAFFGMSRIGMEVTPSGTWLTYTGAIKLDDKDPNFKDQVILLNKHIDAYKTFPPTEPKKDKKKKADETQALPQRQKKQQTVTLLPAADLDDFSKQLQQSMSSADSTQA

SEQ ID NO: 956 - protein, 671 aa, Artificial Sequence
  Description of Artificial Sequence: Synthetic polypeptide
MHHHHHHGGSGSPILGYWKIKGLVQPTRLLLEYLEEKYEEHLYERDEGDKWRNKKFELGLEFPNLPYYIDGDVKLTQSMAIIRYIADKHNMLGGCPKERAEISMLEGAVLDIRYGVSRIAYSKDFETLKVDFLSKLPEMLKMFEDRLCHKTYLNGDHVTHPDFMLYDALDVVLYMDPMCLDAFPKLVCFKKRIEAIPQIDKYLKSSKYIAWPLQGWQATFGGGDHPPKSDLVPRGSPGIHRDGGSGENLYFQSSDNGPQNQRNAPRITFGGPSDSTGSNQNGERSGARSKQRRPQGLPNNTASWFTALTQHGKEDLKFPPGQGVPINTNSSPDDQIGYYRRATRRIRGGDGKMKDLSPRWYFYYLGTGPEAGLPYGANKDGIIWVATEGALNTPKDHIGTRNPANNAAIVLQLPQGTTLPKGFYAEGSRGGSQASSRSSSRSRNSSRNSTPGSSRGTSPARMAGNGGDAALALLLLDRLNQLESKMSGKGQQQQGQTVTKKSAAEASKKPRQKRTATKAYNVTQAFGRRGPEQTQGNFGDQELIRQGTDYKHWPQIAQFAPSASAFFGMSRIGMEVTPSGTWLTYTGAIKLDDKDPNFKDQVILLNKHIDAYKTFPPTEPKKDKKKKADETQALPQRQKKQQTVTLLPAADLDDFSKQLQQSMSSADSTQA

SEQ ID NO: 957 - protein, 671 aa, Artificial Sequence
  Description of Artificial Sequence: Synthetic polypeptide
MHHHHHHGGSGSPILGYWKIKGLVQPTRLLLEYLEEKYEEHLYERDEGDKWRNKKFELGLEFPNLPYYIDGDVKLTQSMAIIRYIADKHNMLGGCPKERAEISMLEGAVLDIRYGVSRIAYSKDFETLKVDFLSKLPEMLKMFEDRLCHKTYLNGDHVTHPDFMLYDALDVVLYMDPMCLDAFPKLVCFKKRIEAIPQIDKYLKSSKYIAWPLQGWQATFGGGDHPPKSDLVPRGSPGIHRDGGSGENLYFQSSDNGPQNQRNAPRITFGGPSDSTGSNQNGERSGARSKQRRPQGLPNNTASWFTALTQHGKEDLKFPRGQGVPINTNSSPDDQIGYYRRATRRIRGGDGKMKDLSPRWYFYYLGTGPEAGLPYGANKDGIIWVATEGALNTPKDHIGTRNPANNAAIVLQLPQGTTLPKGFYAEGSRGGSQASSRSSSRSRNSSRNSTPGSSRGTSPARMAGNGGDAALALLLLDRLNQLESKMSGKGQQQQGQTVTKKSAAEASKKPRQKRTATKGYNVTQAFGRRGPEQTQGNFGDQDLNKLGTDYKHWPQIAQFAPSASAFFGMSRISTEETPSGTWLTYTGAIKLDKKDPNFKDQVILLNKHIDAYKTFPPTEPKKDKKKKADETQALPQRQKKQQTVTLLPAADLDDFSKQLQQSMSSADSTQA

SEQ ID NO: 958 - protein, 671 aa, Artificial Sequence
  Description of Artificial Sequence: Synthetic polypeptide
MHHHHHHGGSGSPILGYWKIKGLVQPTRLLLEYLEEKYEEHLYERDEGDKWRNKKFELGLEFPNLPYYIDGDVKLTQSMAIIRYIADKHNMLGGCPKERAEISMLEGAVLDIRYGVSRIAYSKDFETLKVDFLSKLPEMLKMFEDRLCHKTYLNGDHVTHPDFMLYDALDVVLYMDPMCLDAFPKLVCFKKRIEAIPQIDKYLKSSKYIAWPLQGWQATFGGGDHPPKSDLVPRGSPGIHRDGGSGENLYFQSSDNGPQNQRNAPRITFGGPSDSTGSNQNGERSGARSKQRRPQGLPNNTASWFTALTQHGKEDLKFPRGQGVPINTNSSPDDQIGYYRRATRRIRGGDGKMKDLSPRWYFYYLGTGPEAGLPYGANKDGIIWVATEGALNTPKDHIGTRNPANNAAIVLQLPQGTTLPKGFYAEGSRGGSQASSRSSSRSRNSSRNSTPGSSRGTSPARMAGNGGDAALALLLLDRLNQLESKMSGKGQQQQGQTVTKKSAAEASKKPRQKRTATKAYNVTQAFGRRGPEQTQGNFGDQELIRQGTDYKHWPQIAQFAPSASAFFGMSRIGMVVTPSGTWLTYTGAIKLDDKDPNFKDQVILLNKHIDAYKTFPPTEPKKDKKKKADETQALPQRQKKQQTVTLLPAADLDDFSKQLQQSMSSADSTQA

SEQ ID NO: 959 - protein, 671 aa, Artificial Sequence
  Description of Artificial Sequence: Synthetic polypeptide
MHHHHHHGGSGSPILGYWKIKGLVQPTRLLLEYLEEKYEEHLYERDEGDKWRNKKFELGLEFPNLPYYIDGDVKLTQSMAIIRYIADKHNMLGGCPKERAEISMLEGAVLDIRYGVSRIAYSKDFETLKVDFLSKLPEMLKMFEDRLCHKTYLNGDHVTHPDFMLYDALDVVLYMDPMCLDAFPKLVCFKKRIEAIPQIDKYLKSSKYIAWPLQGWQATFGGGDHPPKSDLVPRGSPGIHRDGGSGENLYFQSSDNGPQNQRNAPRITFGGPSDSTGSNQNGERSGARSKQRRPQGLPNNTASWFTALTQHGKEDLKFPRGQGVPINTNSSPDDQIGYYRRATRRIRGGDGKMKDLSPRWYFYYLGTGPEAGLPYGANKDGIIWVATEGALNTPKDHIGTRNPANNAAIVLQLPQGTTLPKGFYAEGSRGGSQASSRSSERSRNSSRNSTPGSERGTEPARMAGNGGDAALALLLLDRLNQLESKMSGKGQQQQGQTVTKKSAAEASKKPRQKRTATKAYNVTQAFGRRGPEQTQGNFGDQELIRQGTDYKHWPQIAQFAPSASAFFGMSRIGMEVTPSGTWLTYTGAIKLDDKDPNFKDQVILLNKHIDAYKTFPPTEPKKDKKKKADETQALPQRQKKQQTVTLLPAADLDDFSKQLQQSMSSADSTQA

SEQ ID NO: 960 - protein, 671 aa, Artificial Sequence
  Description of Artificial Sequence: Synthetic polypeptide
MHHHHHHGGSGSPILGYWKIKGLVQPTRLLLEYLEEKYEEHLYERDEGDKWRNKKFELGLEFPNLPYYIDGDVKLTQSMAIIRYIADKHNMLGGCPKERAEISMLEGAVLDIRYGVSRIAYSKDFETLKVDFLSKLPEMLKMFEDRLCHKTYLNGDHVTHPDFMLYDALDVVLYMDPMCLDAFPKLVCFKKRIEAIPQIDKYLKSSKYIAWPLQGWQATFGGGDHPPKSDLVPRGSPGIHRDGGSGENLYFQSSDNGPQNQRNAPRITFGGPSDSTGSNQNGERSGARSKQRRPQGLPNNTASWFTALTQHGKEDLKFPRGQGVPINTNSSPDDQIGYYRRATRRIRGGDGKMKDLSPRWYFYYLGTGPEAGLPYGANKDGIIWVATEGALNTPKDHIGTRNPANNAAIVLQLPQGTTLPKGFYAEGSRGGSQASSRSSSRSRNSSRNSTPGSSRGTSPARMAGNGGDAALALLLLDRLNQLESKMSGKGQQQQGQTVTKKSAAEASKKPRQKRTATKEYNVTQAFGRRGPEQTQGNFGDQDLIKLGTDYKHWPQIAQFAPSASAFFGMSRIGMEETPSGTWLTYTGAIKLDKKDPNFKDQVILLNKHIDAYKTFPPTEPKKDKKKKADETQALPQRQKKQQTVTLLPAADLDDFSKQLQQSMSSADSTQA

SEQ ID NO: 961 - protein, 671 aa, Artificial Sequence
  Description of Artificial Sequence: Synthetic polypeptide
MHHHHHHGGSGSPILGYWKIKGLVQPTRLLLEYLEEKYEEHLYERDEGDKWRNKKFELGLEFPNLPYYIDGDVKLTQSMAIIRYIADKHNMLGGCPKERAEISMLEGAVLDIRYGVSRIAYSKDFETLKVDFLSKLPEMLKMFEDRLCHKTYLNGDHVTHPDFMLYDALDVVLYMDPMCLDAFPKLVCFKKRIEAIPQIDKYLKSSKYIAWPLQGWQATFGGGDHPPKSDLVPRGSPGIHRDGGSGENLYFQSSDNGPQNQRNAPRITFGGPSDSTGSNQNGERSGARSKQRRPQGLPNNTASWFTGLTQHGKEDLKFPPGQGVPINTNSSPDDQIGYYRRATRRIRGGDGKMKDLPPRWYFYYLGTGPEADLPYGQVKDGIFWVAEEGALNTPKDHIGTRNPANNAAIPLQLPPGTTLPKGFYAEGSRGGSQASSRSSSRSRNSSRNSTPGSSRGTSPARMAGNGGDAALALLLLDRLNQLESKMSGKGQQQQGQTVTKKSAAEASKKPRQKRTATKAYNVTQAFGRRGPEQTQGNFGDQELIRQGTDYKHWPQIAQFAPSASAFFGMSRIGMEVTPSGTWLTYTGAIKLDDKDPNFKDQVILLNKHIDAYKTFPPTEPKKDKKKKADETQALPQRQKKQQTVTLLPAADLDDFSKQLQQSMSSADSTQA

SEQ ID NO: 962 - protein, 671 aa, Artificial Sequence
  Description of Artificial Sequence: Synthetic polypeptide
MHHHHHHGGSGSPILGYWKIKGLVQPTRLLLEYLEEKYEEHLYERDEGDKWRNKKFELGLEFPNLPYYIDGDVKLTQSMAIIRYIADKHNMLGGCPKERAEISMLEGAVLDIRYGVSRIAYSKDFETLKVDFLSKLPEMLKMFEDRLCHKTYLNGDHVTHPDFMLYDALDVVLYMDPMCLDAFPKLVCFKKRIEAIPQIDKYLKSSKYIAWPLQGWQATFGGGDHPPKSDLVPRGSPGIHRDGGSGENLYFQSSDNGPQNQRNAPRITFGGPSDSTGSNQNGERSGARSKQRRPQGLPNNTASWFTALTQHGKEDLKFPRGQGVPINTNSSPDDQIGYYRRATRRIRGGDGKMKDLSPRWYFYYLGTGPEAGLPYGANKDGIIWVATEGALNTPKDHIGKRNPANNAAIVLQLPQGTTLPKGFYAEGSRGGSQASSRSSSRSRNSSRNSTPGSSRGTSPARMAGNGGDAALALLLLDRLNQLESKMSGKGQQQQGQTVTKKSAAEASKKPRQKRTATKAYNVTQAFGRRGPEQTQGNFGDQELIRQGTDYKHWPQIAQFAPSASAFFGMSRIGMEVTPSGTWLTYTGAIKLDDKDPNFKDQVILLNKHIDAYKTFPPTEPKKDKKKKADETQALPQRQKKQQTVTLLPAADLDDFSKQLQQSMSSADSTQA

SEQ ID NO: 963 - protein, 671 aa, Artificial Sequence
  Description of Artificial Sequence: Synthetic polypeptide
MHHHHHHGGSGSPILGYWKIKGLVQPTRLLLEYLEEKYEEHLYERDEGDKWRNKKFELGLEFPNLPYYIDGDVKLTQSMAIIRYIADKHNMLGGCPKERAEISMLEGAVLDIRYGVSRIAYSKDFETLKVDFLSKLPEMLKMFEDRLCHKTYLNGDHVTHPDFMLYDALDVVLYMDPMCLDAFPKLVCFKKRIEAIPQIDKYLKSSKYIAWPLQGWQATFGGGDHPPKSDLVPRGSPGIHRDGGSGENLYFQSSDNGPQNQRNAPRITFGGPSDSTGSNQNGERSGARSKQRRPQGLPNNTASWFTALTQHGKEDLKFPRGQGVPINTNSSPDDQIGYYRRATRRIRGGDGKMKDLSPRWYFYYLGTGPEAGLPYGANKDGIIWVATEGALNTPKDHIGTRNPANNAAIVLQLPQGTTLPKGFYAEGSRGGSQASSRSSSRSRNSSRNSTPGSSRGTSPARMAGNGGDAALALLLLDRLNQLESKMSGKGQQQQGQTVTKKSAAEASKKPRQKRTATKAYNVTQAFGRRGPEQTQGNFGDQELIRQGTDYKHWPQIAQFAPSASAFFGMSRIDMEVTPSGTWLTYTGAIKLDDKDPNFKDQVILLNKHIDAYKTFPPTEPKKDKKKKADETQALPQRQKKQQTVTLLPAADLDDFSKQLQQSMSSADSTQA

SEQ ID NO: 964 - protein, 671 aa, Artificial Sequence
  Description of Artificial Sequence: Synthetic polypeptide
MHHHHHHGGSGSPILGYWKIKGLVQPTRLLLEYLEEKYEEHLYERDEGDKWRNKKFELGLEFPNLPYYIDGDVKLTQSMAIIRYIADKHNMLGGCPKERAEISMLEGAVLDIRYGVSRIAYSKDFETLKVDFLSKLPEMLKMFEDRLCHKTYLNGDHVTHPDFMLYDALDVVLYMDPMCLDAFPKLVCFKKRIEAIPQIDKYLKSSKYIAWPLQGWQATFGGGDHPPKSDLVPRGSPGIHRDGGSGENLYFQSSDNGPQNQRNAPRITFGGPSDSTGSNQNGERSGARSKQRRPQGLPNNTASWFTGLTQHGKEDLKFPRGQGVPINTNSSPDDQIGYYRRATRRIRGGDGKMKDLSPRWYFYYLGTGPEAGLPYGANKDGIIWVATEGALNTPKDHIGTRNPANNAAIVLQLPQGTTLPKGFYAEGSRGGSQASSRSSSRSRNSSRNSTPGSSRGTSPARMAGNGGDAALALLLLDRLNQLESKMSGKGQQQQGQTVTKKSAAEASKKPRQKRTATKAYNVTQAFGRRGPEQTQGNFGDQELIRQGTDYKHWPQIAQFAPSASAFFGMSRIGMEVTPSGTWLTYTGAIKLDDKDPNFKDQVILLNKHIDAYKTFPPTEPKKDKKKKADETQALPQRQKKQQTVTLLPAADLDDFSKQLQQSMSSADSTQA

SEQ ID NO: 965 - protein, 671 aa, Artificial Sequence
  Description of Artificial Sequence: Synthetic polypeptide
MHHHHHHGGSGSPILGYWKIKGLVQPTRLLLEYLEEKYEEHLYERDEGDKWRNKKFELGLEFPNLPYYIDGDVKLTQSMAIIRYIADKHNMLGGCPKERAEISMLEGAVLDIRYGVSRIAYSKDFETLKVDFLSKLPEMLKMFEDRLCHKTYLNGDHVTHPDFMLYDALDVVLYMDPMCLDAFPKLVCFKKRIEAIPQIDKYLKSSKYIAWPLQGWQATFGGGDHPPKSDLVPRGSPGIHRDGGSGENLYFQSSDNGPQNQRNAPRITFGGPSDSTGSNQNGERSGARSKQRRPQGLPNNTASWFTGLTQFGKEDLKFPPGQGVPINTNSSPDDQIGYYRRATRRIRGGDGKMKDLPPRWYFYYLGTGPHADLPYGQKQPGVFWVARPGALNTPKDHIGTRNPANNAAIPLQLPPGTKLPKGFYAEGSRGGSQASSRSSSRSRNSSRNSTPGSSRGTSPARMAGNGGDAALALLLLDRLNQLESKMSGKGQQQQGQTVTKKSAAEASKKPRQKRTATKAYNVTQAFGRRGPEQTQGNFGDQELIRQGTDYKHWPQIAQFAPSASAFFGMSRIGMEVTPSGTWLTYTGAIKLDDKDPNFKDQVILLNKHIDAYKTFPPTEPKKDKKKKADETQALPQRQKKQQTVTLLPAADLDDFSKQLQQSMSSADSTQA

SEQ ID NO: 966 - protein, 671 aa, Artificial Sequence
  Description of Artificial Sequence: Synthetic polypeptide
MHHHHHHGGSGSPILGYWKIKGLVQPTRLLLEYLEEKYEEHLYERDEGDKWRNKKFELGLEFPNLPYYIDGDVKLTQSMAIIRYIADKHNMLGGCPKERAEISMLEGAVLDIRYGVSRIAYSKDFETLKVDFLSKLPEMLKMFEDRLCHKTYLNGDHVTHPDFMLYDALDVVLYMDPMCLDAFPKLVCFKKRIEAIPQIDKYLKSSKYIAWPLQGWQATFGGGDHPPKSDLVPRGSPGIHRDGGSGENLYFQSSDNGPQNQRNAPRITFGGPSDSTGSNQNGERSGARSKQRRPQGLPNNTASWFTALTQHGKEDLKFPRGQGVPINTNSSPDDQIGYYRRATRRIRGGDGKMKDLSPRWYFYYLGTGPEAGLPYGANKDGIIWVATEGALNTPKDHIGTRNPANNAAIVLQLPQGTTLPPGFYAEGSRGGSQASSRSSSRSRNSSRNSTPGSSRGTSPARMAGNGGDAALALLLLDRLNQLESKMSGKGQQQQGQTVTKKSAAEASKKPRQKRTATKAYNVTQAFGRRGPEQTQGNFGDQELIRQGTDYKHWPQIAQFAPSASAFFGMSRIGMEVTPSGTWLTYTGAIKLDDKDPNFKDQVILLNKHIDAYKTFPPTEPKKDKKKKADETQALPQRQKKQQTVTLLPAADLDDFSKQLQQSMSSADSTQA

SEQ ID NO: 967 - protein, 671 aa, Artificial Sequence
  Description of Artificial Sequence: Synthetic polypeptide
MHHHHHHGGSGSPILGYWKIKGLVQPTRLLLEYLEEKYEEHLYERDEGDKWRNKKFELGLEFPNLPYYIDGDVKLTQSMAIIRYIADKHNMLGGCPKERAEISMLEGAVLDIRYGVSRIAYSKDFETLKVDFLSKLPEMLKMFEDRLCHKTYLNGDHVTHPDFMLYDALDVVLYMDPMCLDAFPKLVCFKKRIEAIPQIDKYLKSSKYIAWPLQGWQATFGGGDHPPKSDLVPRGSPGIHRDGGSGENLYFQSSDNGPQNQRNAPRITFGGPSDSTGSNQNGERSGARSKQRRPQGLPNNTASWFTALTQHGKEDLKFPRGQGVPINTNSSPDDQIGYYRRATRRIRGGDGKMKDLSPRWYFYYLGTGPEAGLPYGANKDGIIWVATEGALNTPKDHIGTRNPANNAAIVLQLPQGTTLPKGFYAEGSRGGSQASSRSSSRSRNSSRNSTPGSSRGTSPARMAGNGGDAALALLLLDRLNQLESKMSGKGQQQQGQTVTKKSAAEASKKPRQKRTATKAYNVTQAFGRRGPRQTQGNFGDQELIRQGTDYKHWPQIAQFAPSASAFFGMSRIGMEVTPSGTWLTYTGAIKLDDKDPNFKDQVILLNKHIDAYKTFPPTEPKKDKKKKADETQALPQRQKKQQTVTLLPAADLDDFSKQLQQSMSSADSTQA

SEQ ID NO: 968 - protein, 671 aa, Artificial Sequence
  Description of Artificial Sequence: Synthetic polypeptide
MHHHHHHGGSGSPILGYWKIKGLVQPTRLLLEYLEEKYEEHLYERDEGDKWRNKKFELGLEFPNLPYYIDGDVKLTQSMAIIRYIADKHNMLGGCPKERAEISMLEGAVLDIRYGVSRIAYSKDFETLKVDFLSKLPEMLKMFEDRLCHKTYLNGDHVTHPDFMLYDALDVVLYMDPMCLDAFPKLVCFKKRIEAIPQIDKYLKSSKYIAWPLQGWQATFGGGDHPPKSDLVPRGSPGIHRDGGSGENLYFQSSDNGPQNQRNAPRITFGGPSDSTGSNQNGERSGARSKQRRPQGLPNNTASWFTALTQHGKEDLKFPRGQGVPINTNSSPDDQIGYYRRATRRIRGGDGKMKDLSPRWYFYYLGTGPEAKLPYGANKDGIIWVATEGALNTPKDHIGTRNPANNAAIVLQLPQGTTLPKGFYAEGSRGGSQASSRSSSRSRNSSRNSTPGSSRGTSPARMAGNGGDAALALLLLDRLNQLESKMSGKGQQQQGQTVTKKSAAEASKKPRQKRTATKAYNVTQAFGRRGPEQTQGNFGDQELIRQGTDYKHWPQIAQFAPSASAFFGMSRIGMEVTPSGTWLTYTGAIKLDDKDPNFKDQVILLNKHIDAYKTFPPTEPKKDKKKKADETQALPQRQKKQQTVTLLPAADLDDFSKQLQQSMSSADSTQA

SEQ ID NO: 969 - protein, 671 aa, Artificial Sequence
  Description of Artificial Sequence: Synthetic polypeptide
MHHHHHHGGSGSPILGYWKIKGLVQPTRLLLEYLEEKYEEHLYERDEGDKWRNKKFELGLEFPNLPYYIDGDVKLTQSMAIIRYIADKHNMLGGCPKERAEISMLEGAVLDIRYGVSRIAYSKDFETLKVDFLSKLPEMLKMFEDRLCHKTYLNGDHVTHPDFMLYDALDVVLYMDPMCLDAFPKLVCFKKRIEAIPQIDKYLKSSKYIAWPLQGWQATFGGGDHPPKSDLVPRGSPGIHRDGGSGENLYFQSSDNGPQNQRNAPRITFGGPSDSTGSNQNGERSGARSKQRRPQGLPNNTASWFTALTQHGKEDLKFPRGQGVPINTNSSPDDQIGYYRRATRRIRGGDGKMKDLSPRWYFYYLGTGPEAGLPYGANKDGIIWVATEGALNTPKDHIGTRNPANNAAIVLQLPQGTTLPKGFYAEGSRGGSQASSRSSSRSRNSSRNSTPGESRGTEPARMAGNGGDAALALLLLDRLNQLESKMSGKGQQQQGQTVTKKSAAEASKKPRQKRTATKAYNVTQAFGRRGPEQTQGNFGDQELIRQGTDYKHWPQIAQFAPSASAFFGMSRIGMEVTPSGTWLTYTGAIKLDDKDPNFKDQVILLNKHIDAYKTFPPTEPKKDKKKKADETQALPQRQKKQQTVTLLPAADLDDFSKQLQQSMSSADSTQA

SEQ ID NO: 970 - protein, 671 aa, Artificial Sequence
  Description of Artificial Sequence: Synthetic polypeptide
MHHHHHHGGSGSPILGYWKIKGLVQPTRLLLEYLEEKYEEHLYERDEGDKWRNKKFELGLEFPNLPYYIDGDVKLTQSMAIIRYIADKHNMLGGCPKERAEISMLEGAVLDIRYGVSRIAYSKDFETLKVDFLSKLPEMLKMFEDRLCHKTYLNGDHVTHPDFMLYDALDVVLYMDPMCLDAFPKLVCFKKRIEAIPQIDKYLKSSKYIAWPLQGWQATFGGGDHPPKSDLVPRGSPGIHRDGGSGENLYFQSSDNGPQNQRNAPRITFGGPSDSTGSNQNGERSGARSKQRRPQGLPNNTASWFTALTQHGKEDLKFPRGQGVPINTNSSPDDQIGYYRRATRRIRGGDGKMKDLSPRWYFYYLGTGPEAGLPYGTNKDGIIWVATEGALNTPKDHIGTRNPANNAAIVLQLPQGTTLPKGFYAEGSRGGSQASSRSSSRSRNSSRNSTPGSSRGTSPARMAGNGGDAALALLLLDRLNQLESKMSGKGQQQQGQTVTKKSAAEASKKPRQKRTATKAYNVTQAFGRRGPEQTQGNFGDQELIRQGTDYKHWPQIAQFAPSASAFFGMSRIGMEVTPSGTWLTYTGAIKLDDKDPNFKDQVILLNKHIDAYKTFPPTEPKKDKKKKADETQALPQRQKKQQTVTLLPAADLDDFSKQLQQSMSSADSTQA

SEQ ID NO: 971 - protein, 671 aa, Artificial Sequence
  Description of Artificial Sequence: Synthetic polypeptide
MHHHHHHGGSGSPILGYWKIKGLVQPTRLLLEYLEEKYEEHLYERDEGDKWRNKKFELGLEFPNLPYYIDGDVKLTQSMAIIRYIADKHNMLGGCPKERAEISMLEGAVLDIRYGVSRIAYSKDFETLKVDFLSKLPEMLKMFEDRLCHKTYLNGDHVTHPDFMLYDALDVVLYMDPMCLDAFPKLVCFKKRIEAIPQIDKYLKSSKYIAWPLQGWQATFGGGDHPPKSDLVPRGSPGIHRDGGSGENLYFQSSDNGPQNQRNAPRITFGGPSDSTGSNQNGERSGARSKQRRPQGLPNNTASWFTALTQHGKEDLKFPRGQGVPINTNSSPDDQIGYYRRATRRIRGGDGKMKDLSPRWYFYYLGTGPEAGLPYGANKDGIIWVATEGALNTPKDHIGTRNPANNAAVVLQLPQGTTLPKGFYAEGSRGGSQASSRSSSRSRNSSRNSTPGSSRGTSPARMAGNGGDAALALLLLDRLNQLESKMSGKGQQQQGQTVTKKSAAEASKKPRQKRTATKAYNVTQAFGRRGPEQTQGNFGDQELIRQGTDYKHWPQIAQFAPSASAFFGMSRIGMEVTPSGTWLTYTGAIKLDDKDPNFKDQVILLNKHIDAYKTFPPTEPKKDKKKKADETQALPQRQKKQQTVTLLPAADLDDFSKQLQQSMSSADSTQA

SEQ ID NO: 972 - protein, 671 aa, Artificial Sequence
  Description of Artificial Sequence: Synthetic polypeptide
MHHHHHHGGSGSPILGYWKIKGLVQPTRLLLEYLEEKYEEHLYERDEGDKWRNKKFELGLEFPNLPYYIDGDVKLTQSMAIIRYIADKHNMLGGCPKERAEISMLEGAVLDIRYGVSRIAYSKDFETLKVDFLSKLPEMLKMFEDRLCHKTYLNGDHVTHPDFMLYDALDVVLYMDPMCLDAFPKLVCFKKRIEAIPQIDKYLKSSKYIAWPLQGWQATFGGGDHPPKSDLVPRGSPGIHRDGGSGENLYFQSSDNGPQNQRNAPRITFGGPSDSTGSNQNGERSGARSKQRRPQGLPNNTASWFTALTQHGKEDLKFPRGQGVPINTNSSPDDQIGYYRRATRRIRGGDGKMKDLSPRWYFYYLGTGPEAGLPYGANKDGIIWVATEGALNTPKDHIGTRNPANNAAIVLQLPQGTTLPKGFYAEGSRGGSQASSRSSSRSRNSSRNSTPGSSRGTSPARMAGNGGDAALALLLLDRLNQLESKMSGKGQQQQGQTVTKKSAAEASKKPRQKRTATKAYNVTQAFGRRGPEQTQGNFGDQELIRQGTDYKHWPQIAQFAPSASAFFGMSRIGMEVTPSGTWLTYTGAIKLDRKDPNFKDQVILLNKHIDAYKTFPPTEPKKDKKKKADETQALPQRQKKQQTVTLLPAADLDDFSKQLQQSMSSADSTQA

SEQ ID NO: 973 - protein, 671 aa, Artificial Sequence
  Description of Artificial Sequence: Synthetic polypeptide
MHHHHHHGGSGSPILGYWKIKGLVQPTRLLLEYLEEKYEEHLYERDEGDKWRNKKFELGLEFPNLPYYIDGDVKLTQSMAIIRYIADKHNMLGGCPKERAEISMLEGAVLDIRYGVSRIAYSKDFETLKVDFLSKLPEMLKMFEDRLCHKTYLNGDHVTHPDFMLYDALDVVLYMDPMCLDAFPKLVCFKKRIEAIPQIDKYLKSSKYIAWPLQGWQATFGGGDHPPKSDLVPRGSPGIHRDGGSGENLYFQSSDNGPQNQRNAPRITFGGPSDSTGSNQNGERSGARSKQRRPQGLPNNTASWFTALTQHGKEDLKFPRGQGVPINTNSSPDDQIGYYRRATRRIRGGDGKMKDLSPRWYFYYLGTGPEAGLPYGANKDGIIWVATEGALNTPKDHIGTRNPANNAAIVLQLPQGTTLPKGFYAEGSRGGSQASSRSSSRSRNSSRNSTPGEERGTEPARMAGNGGDAALALLLLDRLNQLESKMSGKGQQQQGQTVTKKSAAEASKKPRQKRTATKAYNVTQAFGRRGPEQTQGNFGDQELIRQGTDYKHWPQIAQFAPSASAFFGMSRIGMEVTPSGTWLTYTGAIKLDDKDPNFKDQVILLNKHIDAYKTFPPTEPKKDKKKKADETQALPQRQKKQQTVTLLPAADLDDFSKQLQQSMSSADSTQA

SEQ ID NO: 974 - protein, 671 aa, Artificial Sequence
  Description of Artificial Sequence: Synthetic polypeptide
MHHHHHHGGSGSPILGYWKIKGLVQPTRLLLEYLEEKYEEHLYERDEGDKWRNKKFELGLEFPNLPYYIDGDVKLTQSMAIIRYIADKHNMLGGCPKERAEISMLEGAVLDIRYGVSRIAYSKDFETLKVDFLSKLPEMLKMFEDRLCHKTYLNGDHVTHPDFMLYDALDVVLYMDPMCLDAFPKLVCFKKRIEAIPQIDKYLKSSKYIAWPLQGWQATFGGGDHPPKSDLVPRGSPGIHRDGGSGENLYFQSSDNGPQNQRNAPRITFGGPSDSTGSNQNGERSGARSKQRRPQGLPNNTASWFTALTQHGKEDLKFPRGQGVPINTNSSPDDQIGGYRRATRRIRGGDGKMKDLSPRWYFYYLGTGPEAGLPYGANKDGIIWVATEGALNTPKDHIGTRNPANNAAIVLQLPQGTTLPKGFYAEGSRGGSQASSRSSSRSRNSSRNSTPGSSRGTSPARMAGNGGDAALALLLLDRLNQLESKMSGKGQQQQGQTVTKKSAAEASKKPRQKRTATKAYNVTQAFGRRGPEQTQGNFGDQELIRQGTDYKHWPQIAQFAPSASAFFGMSRIGMEVTPSGTWLTYTGAIKLDDKDPNFKDQVILLNKHIDAYKTFPPTEPKKDKKKKADETQALPQRQKKQQTVTLLPAADLDDFSKQLQQSMSSADSTQA

SEQ ID NO: 975 - protein, 671 aa, Artificial Sequence
  Description of Artificial Sequence: Synthetic polypeptide
MHHHHHHGGSGSPILGYWKIKGLVQPTRLLLEYLEEKYEEHLYERDEGDKWRNKKFELGLEFPNLPYYIDGDVKLTQSMAIIRYIADKHNMLGGCPKERAEISMLEGAVLDIRYGVSRIAYSKDFETLKVDFLSKLPEMLKMFEDRLCHKTYLNGDHVTHPDFMLYDALDVVLYMDPMCLDAFPKLVCFKKRIEAIPQIDKYLKSSKYIAWPLQGWQATFGGGDHPPKSDLVPRGSPGIHRDGGSGENLYFQSSDNGPQNQRNAPRITFGGPSDSTGSNQNGERSGARSKQRRPQGLPNNTASWFTALTQHGKEDLKFPRGQGVPINTNSSPDDQIGYYRRATRRIRGGDGKMKDLSPFWYFYYLGTGPEAGLPYGANKDGIIWVATEGALNTPKDHIGTRNPANNAAIVLQLPQGTTLPKGFYAEGSRGGSQASSRSSSRSRNSSRNSTPGSSRGTSPARMAGNGGDAALALLLLDRLNQLESKMSGKGQQQQGQTVTKKSAAEASKKPRQKRTATKAYNVTQAFGRRGPEQTQGNFGDQELIRQGTDYKHWPQIAQFAPSASAFFGMSRIGMEVTPSGTWLTYTGAIKLDDKDPNFKDQVILLNKHIDAYKTFPPTEPKKDKKKKADETQALPQRQKKQQTVTLLPAADLDDFSKQLQQSMSSADSTQA

SEQ ID NO: 976 - protein, 671 aa, Artificial Sequence
  Description of Artificial Sequence: Synthetic polypeptide
MHHHHHHGGSGSPILGYWKIKGLVQPTRLLLEYLEEKYEEHLYERDEGDKWRNKKFELGLEFPNLPYYIDGDVKLTQSMAIIRYIADKHNMLGGCPKERAEISMLEGAVLDIRYGVSRIAYSKDFETLKVDFLSKLPEMLKMFEDRLCHKTYLNGDHVTHPDFMLYDALDVVLYMDPMCLDAFPKLVCFKKRIEAIPQIDKYLKSSKYIAWPLQGWQATFGGGDHPPKSDLVPRGSPGIHRDGGSGENLYFQSSDNGPQNQRNAPRITFGGPSDSTGSNQNGERSGARSKQRRPQGLPNNTASWFTALTQHGKEDLKFPRGQGVPINTNSSPDDQIGYYRRATRRIRGGDGKMKDLAPRWYFYYLGTGPEAGLPYGANKDGIIWVATEGALNTPKDHIGTRNPANNAAIVLQLPQGTTLPKGFYAEGSRGGSQASSRSSSRSRNSSRNSTPGSSRGTSPARMAGNGGDAALALLLLDRLNQLESKMSGKGQQQQGQTVTKKSAAEASKKPRQKRTATKAYNVTQAFGRRGPEQTQGNFGDQELIRQGTDYKHWPQIAQFAPSASAFFGMSRIGMEVTPSGTWLTYTGAIKLDDKDPNFKDQVILLNKHIDAYKTFPPTEPKKDKKKKADETQALPQRQKKQQTVTLLPAADLDDFSKQLQQSMSSADSTQA

SEQ ID NO: 977 - protein, 671 aa, Artificial Sequence
  Description of Artificial Sequence: Synthetic polypeptide
MHHHHHHGGSGSPILGYWKIKGLVQPTRLLLEYLEEKYEEHLYERDEGDKWRNKKFELGLEFPNLPYYIDGDVKLTQSMAIIRYIADKHNMLGGCPKERAEISMLEGAVLDIRYGVSRIAYSKDFETLKVDFLSKLPEMLKMFEDRLCHKTYLNGDHVTHPDFMLYDALDVVLYMDPMCLDAFPKLVCFKKRIEAIPQIDKYLKSSKYIAWPLQGWQATFGGGDHPPKSDLVPRGSPGIHRDGGSGENLYFQSSDNGPQNQRNAPRITFGGPSDSTGSNQNGERSGARSKQRRPQGLPNNTASWFTALTQHGKEDLKFPRGQGVPINTNSSPDDQIGYYRRETRRIRGGDGKMKDLSPRWYFYYLGTGPEAGLPYGANKDGIIWVATEGALNTPKDHIGTRNPANNAAIVLQLPQGTTLPKGFYAEGSRGGSQASSRSSSRSRNSSRNSTPGSSRGTSPARMAGNGGDAALALLLLDRLNQLESKMSGKGQQQQGQTVTKKSAAEASKKPRQKRTATKAYNVTQAFGRRGPEQTQGNFGDQELIRQGTDYKHWPQIAQFAPSASAFFGMSRIGMEVTPSGTWLTYTGAIKLDDKDPNFKDQVILLNKHIDAYKTFPPTEPKKDKKKKADETQALPQRQKKQQTVTLLPAADLDDFSKQLQQSMSSADSTQA

SEQ ID NO: 978 - protein, 671 aa, Artificial Sequence
  Description of Artificial Sequence: Synthetic polypeptide
MHHHHHHGGSGSPILGYWKIKGLVQPTRLLLEYLEEKYEEHLYERDEGDKWRNKKFELGLEFPNLPYYIDGDVKLTQSMAIIRYIADKHNMLGGCPKERAEISMLEGAVLDIRYGVSRIAYSKDFETLKVDFLSKLPEMLKMFEDRLCHKTYLNGDHVTHPDFMLYDALDVVLYMDPMCLDAFPKLVCFKKRIEAIPQIDKYLKSSKYIAWPLQGWQATFGGGDHPPKSDLVPRGSPGIHRDGGSGENLYFQSSDNGPQNQRNAPRITFGGPSDSTGSNQNGERSGARSKQRRPQGLPNNTASWFTALTQHGKEDLKFPRGQGVPINTNSSPDDQIGYYRRATRRIRGGDGKMKDLSPRWYFYYLGTGPEAGLPYGANKDGIIWVATEGALNTPKDHIGTRNPANNAAITLQLPQGTTLPKGFYAEGSRGGSQASSRSSSRSRNSSRNSTPGSSRGTSPARMAGNGGDAALALLLLDRLNQLESKMSGKGQQQQGQTVTKKSAAEASKKPRQKRTATKAYNVTQAFGRRGPEQTQGNFGDQELIRQGTDYKHWPQIAQFAPSASAFFGMSRIGMEVTPSGTWLTYTGAIKLDDKDPNFKDQVILLNKHIDAYKTFPPTEPKKDKKKKADETQALPQRQKKQQTVTLLPAADLDDFSKQLQQSMSSADSTQA

SEQ ID NO: 979 - protein, 671 aa, Artificial Sequence
  Description of Artificial Sequence: Synthetic polypeptide
MHHHHHHGGSGSPILGYWKIKGLVQPTRLLLEYLEEKYEEHLYERDEGDKWRNKKFELGLEFPNLPYYIDGDVKLTQSMAIIRYIADKHNMLGGCPKERAEISMLEGAVLDIRYGVSRIAYSKDFETLKVDFLSKLPEMLKMFEDRLCHKTYLNGDHVTHPDFMLYDALDVVLYMDPMCLDAFPKLVCFKKRIEAIPQIDKYLKSSKYIAWPLQGWQATFGGGDHPPKSDLVPRGSPGIHRDGGSGENLYFQSSDNGPQNQRNAPRITFGGPSDSTGSNQNGERSGARSKQRRPQGLPNNTASWFTALTQHGKEDLKFPRGQGVPINTNSSPDDQIGYYRRATRRIRGGDGKMKDLSPRWYFYYLGTGPEAGLPYGANKDGIIWVATEGALNTPKDHIGTRNPANNAAIVLQLPQGTTLPKGFYAEGSRGGSQASSRSSSRSRNSSRNSTPGSSRGTSPARMAGNGGDAALALLLLDRLNQLESKMSGKGQQQQGQTVTKKSAAEASKKPRQKRTATKAYNVTQAFGRRGPEQTQGNFGDQELIRQGTDYKHWPQIAQFAPSASAFFGMSRIGTEVTPSGTWLTYTGAIKLDDKDPNFKDQVILLNKHIDAYKTFPPTEPKKDKKKKADETQALPQRQKKQQTVTLLPAADLDDFSKQLQQSMSSADSTQA

SEQ ID NO: 980 - protein, 671 aa, Artificial Sequence
  Description of Artificial Sequence: Synthetic polypeptide
MHHHHHHGGSGSPILGYWKIKGLVQPTRLLLEYLEEKYEEHLYERDEGDKWRNKKFELGLEFPNLPYYIDGDVKLTQSMAIIRYIADKHNMLGGCPKERAEISMLEGAVLDIRYGVSRIAYSKDFETLKVDFLSKLPEMLKMFEDRLCHKTYLNGDHVTHPDFMLYDALDVVLYMDPMCLDAFPKLVCFKKRIEAIPQIDKYLKSSKYIAWPLQGWQATFGGGDHPPKSDLVPRGSPGIHRDGGSGENLYFQSSDNGPQNQRNAPRITFGGPSDSTGSNQNGERSGARSKQRRPQGLPNNTASWFTALTQHGKEDLKFPRGQGVPINTNSSPDDQIGYYRRATRRIRGGDGKMKDLSPRWYFYYLGTGPEAGLPYGANKDGIIWVATEGALNTPKDHIGTRNPANNAAIVLQLPSGTTLPKGFYAEGSRGGSQASSRSSSRSRNSSRNSTPGSSRGTSPARMAGNGGDAALALLLLDRLNQLESKMSGKGQQQQGQTVTKKSAAEASKKPRQKRTATKAYNVTQAFGRRGPEQTQGNFGDQELIRQGTDYKHWPQIAQFAPSASAFFGMSRIGMEVTPSGTWLTYTGAIKLDDKDPNFKDQVILLNKHIDAYKTFPPTEPKKDKKKKADETQALPQRQKKQQTVTLLPAADLDDFSKQLQQSMSSADSTQA

SEQ ID NO: 981 - protein, 671 aa, Artificial Sequence
  Description of Artificial Sequence: Synthetic polypeptide
MHHHHHHGGSGSPILGYWKIKGLVQPTRLLLEYLEEKYEEHLYERDEGDKWRNKKFELGLEFPNLPYYIDGDVKLTQSMAIIRYIADKHNMLGGCPKERAEISMLEGAVLDIRYGVSRIAYSKDFETLKVDFLSKLPEMLKMFEDRLCHKTYLNGDHVTHPDFMLYDALDVVLYMDPMCLDAFPKLVCFKKRIEAIPQIDKYLKSSKYIAWPLQGWQATFGGGDHPPKSDLVPRGSPGIHRDGGSGENLYFQSSDNGPQNQRNAPRITFGGPSDSTGSNQNGERSGARSKQRRPQGLPNNTASWFTALTQHGKEDLKFPRGQGVPINTNSSPDDQIGYYRRATRRIRGGDGKMKDLSPRWYFYYLGTGPEAGLPYGANKDGIIWVATEGALNTPKDHIGTRNPANNDAIVLQLPQGTTLPKGFYAEGSRGGSQASSRSSSRSRNSSRNSTPGSSRGTSPARMAGNGGDAALALLLLDRLNQLESKMSGKGQQQQGQTVTKKSAAEASKKPRQKRTATKAYNVTQAFGRRGPEQTQGNFGDQELIRQGTDYKHWPQIAQFAPSASAFFGMSRIGMEVTPSGTWLTYTGAIKLDDKDPNFKDQVILLNKHIDAYKTFPPTEPKKDKKKKADETQALPQRQKKQQTVTLLPAADLDDFSKQLQQSMSSADSTQA

SEQ ID NO: 982 - protein, 671 aa, Artificial Sequence
  Description of Artificial Sequence: Synthetic polypeptide
MHHHHHHGGSGSPILGYWKIKGLVQPTRLLLEYLEEKYEEHLYERDEGDKWRNKKFELGLEFPNLPYYIDGDVKLTQSMAIIRYIADKHNMLGGCPKERAEISMLEGAVLDIRYGVSRIAYSKDFETLKVDFLSKLPEMLKMFEDRLCHKTYLNGDHVTHPDFMLYDALDVVLYMDPMCLDAFPKLVCFKKRIEAIPQIDKYLKSSKYIAWPLQGWQATFGGGDHPPKSDLVPRGSPGIHRDGGSGENLYFQSSDNGPQNQRNAPRITFGGPSDSTGSNQNGERSGARSKQRRPQGLPNNTASWFTALTQHGKEDLKFPRGQGVPINTNSSPDDQIGMYRRATRRIRGGDGKMKDLSPRWYFYYLGTGPEAGLPYGANKDGIIWVATEGALNTPKDHIGTRNPANNAAIVLQLPQGTTLPKGFYAEGSRGGSQASSRSSSRSRNSSRNSTPGSSRGTSPARMAGNGGDAALALLLLDRLNQLESKMSGKGQQQQGQTVTKKSAAEASKKPRQKRTATKAYNVTQAFGRRGPEQTQGNFGDQELIRQGTDYKHWPQIAQFAPSASAFFGMSRIGMEVTPSGTWLTYTGAIKLDDKDPNFKDQVILLNKHIDAYKTFPPTEPKKDKKKKADETQALPQRQKKQQTVTLLPAADLDDFSKQLQQSMSSADSTQA

SEQ ID NO: 983 - protein, 671 aa, Artificial Sequence
  Description of Artificial Sequence: Synthetic polypeptide
MHHHHHHGGSGSPILGYWKIKGLVQPTRLLLEYLEEKYEEHLYERDEGDKWRNKKFELGLEFPNLPYYIDGDVKLTQSMAIIRYIADKHNMLGGCPKERAEISMLEGAVLDIRYGVSRIAYSKDFETLKVDFLSKLPEMLKMFEDRLCHKTYLNGDHVTHPDFMLYDALDVVLYMDPMCLDAFPKLVCFKKRIEAIPQIDKYLKSSKYIAWPLQGWQATFGGGDHPPKSDLVPRGSPGIHRDGGSGENLYFQSSDNGPQNQRNAPRITFGGPSDSTGSNQNGERSGARSKQRRPQGLPNNTASWFTALTQHGKEDLKFPRGQGVPINTNSSPDDQIGYYRRATRRIRGGDGKMKDLSPRWYFYYLGTGPEAGLPYGANKDGIIWVATEGALNTPKDHIGTRNPANNAAIVLQLPQGTTLPKGFYAEGSRGGSQASSRSSSRSRNSSRNSTPGSSRGTSPARMAGNGGDAALALLLLDRLNQLESKMSGKGQQQQGQTVTKKSAAEMSKKPRQKRTATKGYNVTQCFGPRGPEQTQGNFGDAELIKKGSDYKHWPQIAQFAPSASAFFGMSRISSKEQPSGTWLTYTGAIKLDKDDPNFKDQVILLNKHIDAYKTFPPTEPKKDKKKKADETQALPQRQKKQQTVTLLPAADLDDFSKQLQQSMSSADSTQA

SEQ ID NO: 984 - protein, 671 aa, Artificial Sequence
  Description of Artificial Sequence: Synthetic polypeptide
MHHHHHHGGSGSPILGYWKIKGLVQPTRLLLEYLEEKYEEHLYERDEGDKWRNKKFELGLEFPNLPYYIDGDVKLTQSMAIIRYIADKHNMLGGCPKERAEISMLEGAVLDIRYGVSRIAYSKDFETLKVDFLSKLPEMLKMFEDRLCHKTYLNGDHVTHPDFMLYDALDVVLYMDPMCLDAFPKLVCFKKRIEAIPQIDKYLKSSKYIAWPLQGWQATFGGGDHPPKSDLVPRGSPGIHRDGGSGENLYFQSSDNGPQNQRNAPRITFGGPSDSTGSNQNGERSGARSKQRRPQGLPNNTASWFTALTQHGKEDLKFPRGQGVPINTNSSPDDQIGYYRRATRRIRGGDGKMKDLSPRWYFYYLGTGPEAGLPYGANKDGIIWVATEGALNTPKDHIGTRNPANNAAIVLQLPQGTTLPKGFYAEGSRGGSQASSRSSSRSRNSSRNSTPGSSRGTSPARMAGNGGDAALALLLLDRLNQLESKMSGKGQQQQGQTVTKKSAAEASKKPRQKRTATKAYNVTQAFGRRGPEQTQGNFGDQELIRQGTDYKHWPQIAQFAPSASAFFGMSRIGMRVTPSGTWLTYTGAIKLDDKDPNFKDQVILLNKHIDAYKTFPPTEPKKDKKKKADETQALPQRQKKQQTVTLLPAADLDDFSKQLQQSMSSADSTQA

SEQ ID NO: 985 - protein, 671 aa, Artificial Sequence
  Description of Artificial Sequence: Synthetic polypeptide
MHHHHHHGGSGSPILGYWKIKGLVQPTRLLLEYLEEKYEEHLYERDEGDKWRNKKFELGLEFPNLPYYIDGDVKLTQSMAIIRYIADKHNMLGGCPKERAEISMLEGAVLDIRYGVSRIAYSKDFETLKVDFLSKLPEMLKMFEDRLCHKTYLNGDHVTHPDFMLYDALDVVLYMDPMCLDAFPKLVCFKKRIEAIPQIDKYLKSSKYIAWPLQGWQATFGGGDHPPKSDLVPRGSPGIHRDGGSGENLYFQSSDNGPQNQRNAPRITFGGPSDSTGSNQNGERSGARSKQRRPQGLPNNTASWFTALTQHGKEDLKFPRGQGVPINTNSSPDDQIGYYRRATRRIRGGDGKMKDLSPRWYFYYLGTGPEAGLPYGANKDGIIWVATEGALNTPKDHIGTRNPANNAAIRLQLPQGTTLPKGFYAEGSRGGSQASSRSSSRSRNSSRNSTPGSSRGTSPARMAGNGGDAALALLLLDRLNQLESKMSGKGQQQQGQTVTKKSAAEASKKPRQKRTATKAYNVTQAFGRRGPEQTQGNFGDQELIRQGTDYKHWPQIAQFAPSASAFFGMSRIGMEVTPSGTWLTYTGAIKLDDKDPNFKDQVILLNKHIDAYKTFPPTEPKKDKKKKADETQALPQRQKKQQTVTLLPAADLDDFSKQLQQSMSSADSTQA

SEQ ID NO: 986 - protein, 671 aa, Artificial Sequence
  Description of Artificial Sequence: Synthetic polypeptide
MHHHHHHGGSGSPILGYWKIKGLVQPTRLLLEYLEEKYEEHLYERDEGDKWRNKKFELGLEFPNLPYYIDGDVKLTQSMAIIRYIADKHNMLGGCPKERAEISMLEGAVLDIRYGVSRIAYSKDFETLKVDFLSKLPEMLKMFEDRLCHKTYLNGDHVTHPDFMLYDALDVVLYMDPMCLDAFPKLVCFKKRIEAIPQIDKYLKSSKYIAWPLQGWQATFGGGDHPPKSDLVPRGSPGIHRDGGSGENLYFQSSDNGPQNQRNAPRITFGGPSDSTGSNQNGERSGARSKQRRPQGLPNNTASWFTALTQHGKEDLKFPRGQGVPINTNSSPDDQIGYYRRATRRIRGGDGKMKDLSPRWYFYYLGTGPEAGLPYGANKDGIIWVATEGALNTPKDHIGTRNPANNAAIVLQLPQGTTLPKGFYAEGSRGGSQASSRSSSRSRNSSRNSTPGSSRGTSPARMAGNGGDAALALLLLDRLNQLESKMSGKGQQQQGQTVTKKSAAEASKKPRQKRTATKAYNVTQAFGRRGPEQTQGNFGDQELIRQGTDYKHWPQIAQFAPSASAFFGMSRIGMEVTPSGTWLTYTGAIKLDDDDPNFKDQVILLNKHIDAYKTFPPTEPKKDKKKKADETQALPQRQKKQQTVTLLPAADLDDFSKQLQQSMSSADSTQA

SEQ ID NO: 987 - protein, 671 aa, Artificial Sequence
  Description of Artificial Sequence: Synthetic polypeptide
MHHHHHHGGSGSPILGYWKIKGLVQPTRLLLEYLEEKYEEHLYERDEGDKWRNKKFELGLEFPNLPYYIDGDVKLTQSMAIIRYIADKHNMLGGCPKERAEISMLEGAVLDIRYGVSRIAYSKDFETLKVDFLSKLPEMLKMFEDRLCHKTYLNGDHVTHPDFMLYDALDVVLYMDPMCLDAFPKLVCFKKRIEAIPQIDKYLKSSKYIAWPLQGWQATFGGGDHPPKSDLVPRGSPGIHRDGGSGENLYFQSSDNGPQNQRNAPRITFGGPSDSTGSNQNGERSGARSKQRRPQGLPNNTASWFTALTQHGKEDLKFPRGQGVPINTNSSPDDQIGYYRRATRRIRGGDGKMKDLSPRWYFYYLGTGPEAGLPYGANKDGIIWVATEGALNTPKDHIGTRNPANNAAIVLQLPQGTTLPKGFYAEGSRGGSQASSRSSSRSRNSSRNSTPGSSRGTSPARMAGNGGDAALALLLLDRLNQLESKMSGKGQQQQGQTVTKKSAAEASKKPRQKRTATKGYNVTQAFGRRGPEQTQGNFGDQDLNKLGTDYKHWPQIAQFAPSASAFFGMSRISTRETPSGTWLTYTGAIKLDKKDPNFKDQVILLNKHIDAYKTFPPTEPKKDKKKKADETQALPQRQKKQQTVTLLPAADLDDFSKQLQQSMSSADSTQA

SEQ ID NO: 988 - protein, 671 aa, Artificial Sequence
  Description of Artificial Sequence: Synthetic polypeptide
MHHHHHHGGSGSPILGYWKIKGLVQPTRLLLEYLEEKYEEHLYERDEGDKWRNKKFELGLEFPNLPYYIDGDVKLTQSMAIIRYIADKHNMLGGCPKERAEISMLEGAVLDIRYGVSRIAYSKDFETLKVDFLSKLPEMLKMFEDRLCHKTYLNGDHVTHPDFMLYDALDVVLYMDPMCLDAFPKLVCFKKRIEAIPQIDKYLKSSKYIAWPLQGWQATFGGGDHPPKSDLVPRGSPGIHRDGGSGENLYFQSSDNGPQNQRNAPRITFGGPSDSTGSNQNGERSGARSKQRRPQGLPNNTASWFTALTQHGKEDLKFPRGQGVPINTNSSPDDQIGYYRRATRRIRGGDGKMKDLSPRWYFYYLGTGPEAGLPYGANKDGIIWVATEGARNTPKDHIGTRNPANNAAIVLQLPQGTTLPKGFYAEGSRGGSQASSRSSSRSRNSSRNSTPGSSRGTSPARMAGNGGDAALALLLLDRLNQLESKMSGKGQQQQGQTVTKKSAAEASKKPRQKRTATKAYNVTQAFGRRGPEQTQGNFGDQELIRQGTDYKHWPQIAQFAPSASAFFGMSRIGMEVTPSGTWLTYTGAIKLDDKDPNFKDQVILLNKHIDAYKTFPPTEPKKDKKKKADETQALPQRQKKQQTVTLLPAADLDDFSKQLQQSMSSADSTQA

SEQ ID NO: 989 - protein, 671 aa, Artificial Sequence
  Description of Artificial Sequence: Synthetic polypeptide
MHHHHHHGGSGSPILGYWKIKGLVQPTRLLLEYLEEKYEEHLYERDEGDKWRNKKFELGLEFPNLPYYIDGDVKLTQSMAIIRYIADKHNMLGGCPKERAEISMLEGAVLDIRYGVSRIAYSKDFETLKVDFLSKLPEMLKMFEDRLCHKTYLNGDHVTHPDFMLYDALDVVLYMDPMCLDAFPKLVCFKKRIEAIPQIDKYLKSSKYIAWPLQGWQATFGGGDHPPKSDLVPRGSPGIHRDGGSGENLYFQSSDNGPQNQRNAPRITFGGPSDSTGSNQNGERSGARSKQRRPQGLPNNTASWFTALTQHGKEDLKFPRGQGVPINTNSSPDDQIGYYRRATRRIRGGDGKMKDLSPRWYFYYLGTGPEAGLPYGANKDGIIWVATEGALNTPKDHIGTRNPANNAAIVLQLPQGTTLPKGFYAEGSRGGSQASSRSSSRSRNSSRNSTPGSSRGTSPARMAGNGGDAALALLLLDRLNQLESKMSGKGQQQQGQTVTKKSAAEASKKPRQKRTATKAYNVTQCFGRRGPEQTQGNFGDQELIRQGTDYKHWPQIAQFAPSASAFFGMSRIGMEVTPSGTWLTYTGAIKLDDKDPNFKDQVILLNKHIDAYKTFPPTEPKKDKKKKADETQALPQRQKKQQTVTLLPAADLDDFSKQLQQSMSSADSTQA

SEQ ID NO: 990 - protein, 671 aa, Artificial Sequence
  Description of Artificial Sequence: Synthetic polypeptide
MHHHHHHGGSGSPILGYWKIKGLVQPTRLLLEYLEEKYEEHLYERDEGDKWRNKKFELGLEFPNLPYYIDGDVKLTQSMAIIRYIADKHNMLGGCPKERAEISMLEGAVLDIRYGVSRIAYSKDFETLKVDFLSKLPEMLKMFEDRLCHKTYLNGDHVTHPDFMLYDALDVVLYMDPMCLDAFPKLVCFKKRIEAIPQIDKYLKSSKYIAWPLQGWQATFGGGDHPPKSDLVPRGSPGIHRDGGSGENLYFQSSDNGPQNQRNAPRITFGGPSDSTGSNQNGERSGARSKQRRPQGLPNNTASWFTALTQHGKEDLKFPRGQGVPINTNSSPDDQIGYYRRATRRIRGGDGKMKDLSPRWYFYYLGTGPEAGLPYGANKDGIIWVATEGALNTPKDHIGTRNPANNAAIVLQLPQGTTLPKGFYAEGSRGGSQASSRSSSRSRNSSRNSTPGSSRGTSPARMAGNGGDAALALLLLDRLNQLESKMSGKGQQQQGQTVTKKSAAEASKKPRQKRTATKAYNVTQAFGRRGPEQTQGNFGDQELIRQGTDYKHWPQIAQFAPSASAFFGMSRIGAEVTPSGTWLTYTGAIKLDDKDPNFKDQVILLNKHIDAYKTFPPTEPKKDKKKKADETQALPQRQKKQQTVTLLPAADLDDFSKQLQQSMSSADSTQA

SEQ ID NO: 991 - protein, 671 aa, Artificial Sequence
  Description of Artificial Sequence: Synthetic polypeptide
MHHHHHHGGSGSPILGYWKIKGLVQPTRLLLEYLEEKYEEHLYERDEGDKWRNKKFELGLEFPNLPYYIDGDVKLTQSMAIIRYIADKHNMLGGCPKERAEISMLEGAVLDIRYGVSRIAYSKDFETLKVDFLSKLPEMLKMFEDRLCHKTYLNGDHVTHPDFMLYDALDVVLYMDPMCLDAFPKLVCFKKRIEAIPQIDKYLKSSKYIAWPLQGWQATFGGGDHPPKSDLVPRGSPGIHRDGGSGENLYFQSSDNGPQNQRNAPRITFGGPSDSTGSNQNGERSGARSKQRRPQGLPNNTASWFTALTQHGKEDLKFPRGQGVPINTNSSPDDQIGYYRRATRRIRGGDGKMKDLSPRWYFYYLGTGPEAGLPYGANKDGIIWVHTEGALNTPKDHIGTRNPANNAAIVLQLPQGTTLPKGFYAEGSRGGSQASSRSSSRSRNSSRNSTPGSSRGTSPARMAGNGGDAALALLLLDRLNQLESKMSGKGQQQQGQTVTKKSAAEASKKPRQKRTATKAYNVTQAFGRRGPEQTQGNFGDQELIRQGTDYKHWPQIAQFAPSASAFFGMSRIGMEVTPSGTWLTYTGAIKLDDKDPNFKDQVILLNKHIDAYKTFPPTEPKKDKKKKADETQALPQRQKKQQTVTLLPAADLDDFSKQLQQSMSSADSTQA

SEQ ID NO: 992 - protein, 671 aa, Artificial Sequence
  Description of Artificial Sequence: Synthetic polypeptide
MHHHHHHGGSGSPILGYWKIKGLVQPTRLLLEYLEEKYEEHLYERDEGDKWRNKKFELGLEFPNLPYYIDGDVKLTQSMAIIRYIADKHNMLGGCPKERAEISMLEGAVLDIRYGVSRIAYSKDFETLKVDFLSKLPEMLKMFEDRLCHKTYLNGDHVTHPDFMLYDALDVVLYMDPMCLDAFPKLVCFKKRIEAIPQIDKYLKSSKYIAWPLQGWQATFGGGDHPPKSDLVPRGSPGIHRDGGSGENLYFQSSDNGPQNQRNAPRITFGGPSDSTGSNQNGERSGARSKQRRPQGLPNNTASWFTALTQHGKEDLKFPRGQGVPINTNSSPDDQIGWYRRATRRIRGGDGKMKDLSPRWYFYYLGTGPEAGLPYGANKDGIIWVATEGALNTPKDHIGTRNPANNAAIVLQLPQGTTLPKGFYAEGSRGGSQASSRSSSRSRNSSRNSTPGSSRGTSPARMAGNGGDAALALLLLDRLNQLESKMSGKGQQQQGQTVTKKSAAEASKKPRQKRTATKAYNVTQAFGRRGPEQTQGNFGDQELIRQGTDYKHWPQIAQFAPSASAFFGMSRIGMEVTPSGTWLTYTGAIKLDDKDPNFKDQVILLNKHIDAYKTFPPTEPKKDKKKKADETQALPQRQKKQQTVTLLPAADLDDFSKQLQQSMSSADSTQA

SEQ ID NO: 993 - protein, 671 aa, Artificial Sequence
  Description of Artificial Sequence: Synthetic polypeptide
MHHHHHHGGSGSPILGYWKIKGLVQPTRLLLEYLEEKYEEHLYERDEGDKWRNKKFELGLEFPNLPYYIDGDVKLTQSMAIIRYIADKHNMLGGCPKERAEISMLEGAVLDIRYGVSRIAYSKDFETLKVDFLSKLPEMLKMFEDRLCHKTYLNGDHVTHPDFMLYDALDVVLYMDPMCLDAFPKLVCFKKRIEAIPQIDKYLKSSKYIAWPLQGWQATFGGGDHPPKSDLVPRGSPGIHRDGGSGENLYFQSSDNGPQNQRNAPRITFGGPSDSTGSNQNGERSGARSKQRRPQGLPNNTASWFTALTQHGKEDLKFPRGQGVPINSNSSPDDQIGYYRRATRRIRGGDGKMKDLSPRWYFYYLGTGPEAGLPYGANKDGIIWVATEGALNTPKDHIGTRNPANNAAIVLQLPQGTTLPKGFYAEGSRGGSQASSRSSSRSRNSSRNSTPGSSRGTSPARMAGNGGDAALALLLLDRLNQLESKMSGKGQQQQGQTVTKKSAAEASKKPRQKRTATKAYNVTQAFGRRGPEQTQGNFGDQELIRQGTDYKHWPQIAQFAPSASAFFGMSRIGMEVTPSGTWLTYTGAIKLDDKDPNFKDQVILLNKHIDAYKTFPPTEPKKDKKKKADETQALPQRQKKQQTVTLLPAADLDDFSKQLQQSMSSADSTQA

SEQ ID NO: 994 - protein, 671 aa, Artificial Sequence
  Description of Artificial Sequence: Synthetic polypeptide
MHHHHHHGGSGSPILGYWKIKGLVQPTRLLLEYLEEKYEEHLYERDEGDKWRNKKFELGLEFPNLPYYIDGDVKLTQSMAIIRYIADKHNMLGGCPKERAEISMLEGAVLDIRYGVSRIAYSKDFETLKVDFLSKLPEMLKMFEDRLCHKTYLNGDHVTHPDFMLYDALDVVLYMDPMCLDAFPKLVCFKKRIEAIPQIDKYLKSSKYIAWPLQGWQATFGGGDHPPKSDLVPRGSPGIHRDGGSGENLYFQSSDNGPQNQRNAPRITFGGPSDSTGSNQNGERSGARSKQRRPQGLPNNTASWFTALTQHGKEDLKFPRGQGVPINTNSSPDDQIGYYRRATRRIRGGDGKMKDLSPRWYFYYLGTGPEAGLPYGANKDGIIWVATEGALNTPKDHIGTRNPANNAAHVLQLPQGTTLPKGFYAEGSRGGSQASSRSSSRSRNSSRNSTPGSSRGTSPARMAGNGGDAALALLLLDRLNQLESKMSGKGQQQQGQTVTKKSAAEASKKPRQKRTATKAYNVTQAFGRRGPEQTQGNFGDQELIRQGTDYKHWPQIAQFAPSASAFFGMSRIGMEVTPSGTWLTYTGAIKLDDKDPNFKDQVILLNKHIDAYKTFPPTEPKKDKKKKADETQALPQRQKKQQTVTLLPAADLDDFSKQLQQSMSSADSTQA

SEQ ID NO: 995 - protein, 671 aa, Artificial Sequence
  Description of Artificial Sequence: Synthetic polypeptide
MHHHHHHGGSGSPILGYWKIKGLVQPTRLLLEYLEEKYEEHLYERDEGDKWRNKKFELGLEFPNLPYYIDGDVKLTQSMAIIRYIADKHNMLGGCPKERAEISMLEGAVLDIRYGVSRIAYSKDFETLKVDFLSKLPEMLKMFEDRLCHKTYLNGDHVTHPDFMLYDALDVVLYMDPMCLDAFPKLVCFKKRIEAIPQIDKYLKSSKYIAWPLQGWQATFGGGDHPPKSDLVPRGSPGIHRDGGSGENLYFQSSDNGPQNQRNAPRITFGGPSDSTGSNQNGERSGARSKQRRPQGLPNNTASWFTPLTQHGKEDLKFPPGQGVPINTNSSPDDQIGYYRRATRRIRGGDGKMKDLPPRWYFYYLGTGPEADLPYGAVKDGIVWVAEEGALNTPKDHIGTRNPANNAAIPLQLPPGTTLPKGFYAEGSRGGSQASSRSSSRSRNSSRNSTPGSSRGTSPARMAGNGGDAALALLLLDRLNQLESKMSGKGQQQQGQTVTKKSAAEASKKPRQKRTATKAYNVTQAFGRRGPEQTQGNFGDQELIRQGTDYKHWPQIAQFAPSASAFFGMSRIGMEVTPSGTWLTYTGAIKLDDKDPNFKDQVILLNKHIDAYKTFPPTEPKKDKKKKADETQALPQRQKKQQTVTLLPAADLDDFSKQLQQSMSSADSTQA

SEQ ID NO: 996 - protein, 671 aa, Artificial Sequence
  Description of Artificial Sequence: Synthetic polypeptide
MHHHHHHGGSGSPILGYWKIKGLVQPTRLLLEYLEEKYEEHLYERDEGDKWRNKKFELGLEFPNLPYYIDGDVKLTQSMAIIRYIADKHNMLGGCPKERAEISMLEGAVLDIRYGVSRIAYSKDFETLKVDFLSKLPEMLKMFEDRLCHKTYLNGDHVTHPDFMLYDALDVVLYMDPMCLDAFPKLVCFKKRIEAIPQIDKYLKSSKYIAWPLQGWQATFGGGDHPPKSDLVPRGSPGIHRDGGSGENLYFQSSDNGPQNQRNAPRITFGGPSDSTGSNQNGERSGARSKQRRPQGLPNNTASWFTALTQHGKEDLKFPRGQGVPINKNSSPDDQIGYYRRATRRIRGGDGKMKDLSPRWYFYYLGTGPEAGLPYGANKDGIIWVATEGALNTPKDHIGTRNPANNAAIVLQLPQGTTLPKGFYAEGSRGGSQASSRSSSRSRNSSRNSTPGSSRGTSPARMAGNGGDAALALLLLDRLNQLESKMSGKGQQQQGQTVTKKSAAEASKKPRQKRTATKAYNVTQAFGRRGPEQTQGNFGDQELIRQGTDYKHWPQIAQFAPSASAFFGMSRIGMEVTPSGTWLTYTGAIKLDDKDPNFKDQVILLNKHIDAYKTFPPTEPKKDKKKKADETQALPQRQKKQQTVTLLPAADLDDFSKQLQQSMSSADSTQA

SEQ ID NO: 997 - protein, 671 aa, Artificial Sequence
  Description of Artificial Sequence: Synthetic polypeptide
MHHHHHHGGSGSPILGYWKIKGLVQPTRLLLEYLEEKYEEHLYERDEGDKWRNKKFELGLEFPNLPYYIDGDVKLTQSMAIIRYIADKHNMLGGCPKERAEISMLEGAVLDIRYGVSRIAYSKDFETLKVDFLSKLPEMLKMFEDRLCHKTYLNGDHVTHPDFMLYDALDVVLYMDPMCLDAFPKLVCFKKRIEAIPQIDKYLKSSKYIAWPLQGWQATFGGGDHPPKSDLVPRGSPGIHRDGGSGENLYFQSSDNGPQNQRNAPRITFGGPSDSTGSNQNGERSGARSKQRRPQGLPNNTASWFTALTQHGKEDLKFPRGQGVPINTNSSPDDQIGYYRRATRRIRGGDGKMKDLSPRWYFYYLGTGPEAGLPYGSNKDGIIWVATEGALNTPKDHIGTRNPANNAAIVLQLPQGTTLPKGFYAEGSRGGSQASSRSSSRSRNSSRNSTPGSSRGTSPARMAGNGGDAALALLLLDRLNQLESKMSGKGQQQQGQTVTKKSAAEASKKPRQKRTATKAYNVTQAFGRRGPEQTQGNFGDQELIRQGTDYKHWPQIAQFAPSASAFFGMSRIGMEVTPSGTWLTYTGAIKLDDKDPNFKDQVILLNKHIDAYKTFPPTEPKKDKKKKADETQALPQRQKKQQTVTLLPAADLDDFSKQLQQSMSSADSTQA

SEQ ID NO: 998 - protein, 671 aa, Artificial Sequence
  Description of Artificial Sequence: Synthetic polypeptide
MHHHHHHGGSGSPILGYWKIKGLVQPTRLLLEYLEEKYEEHLYERDEGDKWRNKKFELGLEFPNLPYYIDGDVKLTQSMAIIRYIADKHNMLGGCPKERAEISMLEGAVLDIRYGVSRIAYSKDFETLKVDFLSKLPEMLKMFEDRLCHKTYLNGDHVTHPDFMLYDALDVVLYMDPMCLDAFPKLVCFKKRIEAIPQIDKYLKSSKYIAWPLQGWQATFGGGDHPPKSDLVPRGSPGIHRDGGSGENLYFQSSDNGPQNQRNAPRITFGGPSDSTGSNQNGERSGARSKQRRPQGLPNNTASWFTALTQHGKEDLKFPRGQGVPINTNSSPDDQIGYYRRATRRIRGGDGKMKDLSPRWYFYYLGTGPEAGLPYGANKDGIIWVATEGANNTPKDHIGTRNPANNAAIVLQLPQGTTLPKGFYAEGSRGGSQASSRSSSRSRNSSRNSTPGSSRGTSPARMAGNGGDAALALLLLDRLNQLESKMSGKGQQQQGQTVTKKSAAEASKKPRQKRTATKAYNVTQAFGRRGPEQTQGNFGDQELIRQGTDYKHWPQIAQFAPSASAFFGMSRIGMEVTPSGTWLTYTGAIKLDDKDPNFKDQVILLNKHIDAYKTFPPTEPKKDKKKKADETQALPQRQKKQQTVTLLPAADLDDFSKQLQQSMSSADSTQA

SEQ ID NO: 999 - protein, 671 aa, Artificial Sequence
  Description of Artificial Sequence: Synthetic polypeptide
MHHHHHHGGSGSPILGYWKIKGLVQPTRLLLEYLEEKYEEHLYERDEGDKWRNKKFELGLEFPNLPYYIDGDVKLTQSMAIIRYIADKHNMLGGCPKERAEISMLEGAVLDIRYGVSRIAYSKDFETLKVDFLSKLPEMLKMFEDRLCHKTYLNGDHVTHPDFMLYDALDVVLYMDPMCLDAFPKLVCFKKRIEAIPQIDKYLKSSKYIAWPLQGWQATFGGGDHPPKSDLVPRGSPGIHRDGGSGENLYFQSSDNGPQNQRNAPRITFGGPSDSTGSNQNGERSGARSKQRRPQGLPNNTASWFTALTQHGKEDLKFPRGQGVPINTNSSPDDQIGYYRRATRRIRGGDGKMKDLSPRWYFYYLGTGPEATLPYGANKDGIIWVATEGALNTPKDHIGTRNPANNAAIVLQLPQGTTLPKGFYAEGSRGGSQASSRSSSRSRNSSRNSTPGSSRGTSPARMAGNGGDAALALLLLDRLNQLESKMSGKGQQQQGQTVTKKSAAEASKKPRQKRTATKAYNVTQAFGRRGPEQTQGNFGDQELIRQGTDYKHWPQIAQFAPSASAFFGMSRIGMEVTPSGTWLTYTGAIKLDDKDPNFKDQVILLNKHIDAYKTFPPTEPKKDKKKKADETQALPQRQKKQQTVTLLPAADLDDFSKQLQQSMSSADSTQA

SEQ ID NO: 1000 - protein, 671 aa, Artificial Sequence
  Description of Artificial Sequence: Synthetic polypeptide
MHHHHHHGGSGSPILGYWKIKGLVQPTRLLLEYLEEKYEEHLYERDEGDKWRNKKFELGLEFPNLPYYIDGDVKLTQSMAIIRYIADKHNMLGGCPKERAEISMLEGAVLDIRYGVSRIAYSKDFETLKVDFLSKLPEMLKMFEDRLCHKTYLNGDHVTHPDFMLYDALDVVLYMDPMCLDAFPKLVCFKKRIEAIPQIDKYLKSSKYIAWPLQGWQATFGGGDHPPKSDLVPRGSPGIHRDGGSGENLYFQSSDNGPQNQRNAPRITFGGPSDSTGSNQNGERSGARSKQRRPQGLPNNTASWFTALTQHGKEDLKFPRGQGVPINTNSSPDDQIGYYRRATRRIRGGDGKMKDLSPRWYFYYLGTGPEAGLPYGANKDGIIWVATEGALNTPKDHIGTRNPANNAAIVLQLPQGTTLPKGFYAEGSRGGSQASSRSSSRSRNSSRNSTPGSSRGTSPARMAGNGGDAALALLLLDRLNQLESKMSGKGQQQQGQTVTKKSAAEASKVPRQKRTATKAYNVTQAFGRRGPEQTQGNFGDQELIRQGTDYKHWPQIAQFAPSASAFFGMSRIGMEVTPSGTWLTYTGAIKLDDKDPNFKDQVILLNKHIDAYKTFPPTEPKKDKKKKADETQALPQRQKKQQTVTLLPAADLDDFSKQLQQSMSSADSTQA

SEQ ID NO: 1001 - protein, 671 aa, Artificial Sequence
  Description of Artificial Sequence: Synthetic polypeptide
MHHHHHHGGSGSPILGYWKIKGLVQPTRLLLEYLEEKYEEHLYERDEGDKWRNKKFELGLEFPNLPYYIDGDVKLTQSMAIIRYIADKHNMLGGCPKERAEISMLEGAVLDIRYGVSRIAYSKDFETLKVDFLSKLPEMLKMFEDRLCHKTYLNGDHVTHPDFMLYDALDVVLYMDPMCLDAFPKLVCFKKRIEAIPQIDKYLKSSKYIAWPLQGWQATFGGGDHPPKSDLVPRGSPGIHRDGGSGENLYFQSSDNGPQNQRNAPRITFGGPSDSTGSNQNGERSGARSKQRRPQGLPNNTASWFTALTQHGKEDLKFPRGQGVPINTNSSPDDQIGYYRRATRRIRGGDGKMKDLSPRWYFYYLGTGPEAGLPYGANKVGIIWVATEGALNTPKDHIGTRNPANNAAIVLQLPQGTTLPKGFYAEGSRGGSQASSRSSSRSRNSSRNSTPGSSRGTSPARMAGNGGDAALALLLLDRLNQLESKMSGKGQQQQGQTVTKKSAAEASKKPRQKRTATKAYNVTQAFGRRGPEQTQGNFGDQELIRQGTDYKHWPQIAQFAPSASAFFGMSRIGMEVTPSGTWLTYTGAIKLDDKDPNFKDQVILLNKHIDAYKTFPPTEPKKDKKKKADETQALPQRQKKQQTVTLLPAADLDDFSKQLQQSMSSADSTQA

SEQ ID NO: 1002 - protein, 671 aa, Artificial Sequence
  Description of Artificial Sequence: Synthetic polypeptide
MHHHHHHGGSGSPILGYWKIKGLVQPTRLLLEYLEEKYEEHLYERDEGDKWRNKKFELGLEFPNLPYYIDGDVKLTQSMAIIRYIADKHNMLGGCPKERAEISMLEGAVLDIRYGVSRIAYSKDFETLKVDFLSKLPEMLKMFEDRLCHKTYLNGDHVTHPDFMLYDALDVVLYMDPMCLDAFPKLVCFKKRIEAIPQIDKYLKSSKYIAWPLQGWQATFGGGDHPPKSDLVPRGSPGIHRDGGSGENLYFQSSDNGPQNQRNAPRITFGGPSDSTGSNQNGERSGARSKQRRPQGLPNNTASWFTALTQHGKEDLKFPRGQGVPINTNSSPDDQIGYYRRATRRIRGGDGKMKDLSPRWYFYYLGTGPEAGLPYGANKDGIHWVATEGALNTPKDHIGTRNPANNAAIVLQLPQGTTLPKGFYAEGSRGGSQASSRSSSRSRNSSRNSTPGSSRGTSPARMAGNGGDAALALLLLDRLNQLESKMSGKGQQQQGQTVTKKSAAEASKKPRQKRTATKAYNVTQAFGRRGPEQTQGNFGDQELIRQGTDYKHWPQIAQFAPSASAFFGMSRIGMEVTPSGTWLTYTGAIKLDDKDPNFKDQVILLNKHIDAYKTFPPTEPKKDKKKKADETQALPQRQKKQQTVTLLPAADLDDFSKQLQQSMSSADSTQA

SEQ ID NO: 1003 - protein, 671 aa, Artificial Sequence
  Description of Artificial Sequence: Synthetic polypeptide
MHHHHHHGGSGSPILGYWKIKGLVQPTRLLLEYLEEKYEEHLYERDEGDKWRNKKFELGLEFPNLPYYIDGDVKLTQSMAIIRYIADKHNMLGGCPKERAEISMLEGAVLDIRYGVSRIAYSKDFETLKVDFLSKLPEMLKMFEDRLCHKTYLNGDHVTHPDFMLYDALDVVLYMDPMCLDAFPKLVCFKKRIEAIPQIDKYLKSSKYIAWPLQGWQATFGGGDHPPKSDLVPRGSPGIHRDGGSGENLYFQSSDNGPQNQRNAPRITFGGPSDSTGSNQNGERSGARSKQRRPQGLPNNTASWFTALTQHGKEDLKFPRGQGVPINTNSSPDDQIGYYRRATRRIRGGDGKMKDLSPRWYFYYLGTGPEAGLPYGANKDGIIWVATEGALNTPKDHIGTRNPANNAAIVLQLPQGTTLPKGFYAEGSRGGSQASSRSSSRSRNSSRNSTPGSSRGTSPARMAGNGGDAALALLLLDRLNQLESKMSGKGQQQQGQTVTKKKAAEASKKPRQKRTATKAYNVTQAFGRRGPEQTQGNFGDQELIRQGTDYKHWPQIAQFAPSASAFFGMSRIGMEVTPSGTWLTYTGAIKLDDKDPNFKDQVILLNKHIDAYKTFPPTEPKKDKKKKADETQALPQRQKKQQTVTLLPAADLDDFSKQLQQSMSSADSTQA

SEQ ID NO: 1004 - protein, 671 aa, Artificial Sequence
  Description of Artificial Sequence: Synthetic polypeptide
MHHHHHHGGSGSPILGYWKIKGLVQPTRLLLEYLEEKYEEHLYERDEGDKWRNKKFELGLEFPNLPYYIDGDVKLTQSMAIIRYIADKHNMLGGCPKERAEISMLEGAVLDIRYGVSRIAYSKDFETLKVDFLSKLPEMLKMFEDRLCHKTYLNGDHVTHPDFMLYDALDVVLYMDPMCLDAFPKLVCFKKRIEAIPQIDKYLKSSKYIAWPLQGWQATFGGGDHPPKSDLVPRGSPGIHRDGGSGENLYFQSSDNGPQNQRNAPRITFGGPSDSTGSNQNGERSGARSKQRRPQGLPNNTASWFTALTQHGKEDLKFPRGQGVPINTNSSPDDQIGYYRRATRRIRGGDGKMKDLSPRWYFYYLGTGPEAGLPYGANKDGIIWVATEGALNTPKDHIGTRNPANNAAIVLQLPQGTTLPKGFYAEGSRGGSQASSRSSSRSRNSSRNSTPGSSRGTSPARMAGNGGDAALALLLLDRLNQLESKMSGKGQQQQGQTVTKKSAAEASKKPRQKRTATKAYNVTQAFGRRGPEQTQGNFGDQELIRQGTDYKHWPQIAQFAPSASAFFGMSRIGMEVTPSGTWLTYTGAIKLDDKDPNFKDQVILLNQHIDAYKTFPPTEPKKDKKKKADETQALPQRQKKQQTVTLLPAADLDDFSKQLQQSMSSADSTQA

SEQ ID NO: 1005 - protein, 671 aa, Artificial Sequence
  Description of Artificial Sequence: Synthetic polypeptide
MHHHHHHGGSGSPILGYWKIKGLVQPTRLLLEYLEEKYEEHLYERDEGDKWRNKKFELGLEFPNLPYYIDGDVKLTQSMAIIRYIADKHNMLGGCPKERAEISMLEGAVLDIRYGVSRIAYSKDFETLKVDFLSKLPEMLKMFEDRLCHKTYLNGDHVTHPDFMLYDALDVVLYMDPMCLDAFPKLVCFKKRIEAIPQIDKYLKSSKYIAWPLQGWQATFGGGDHPPKSDLVPRGSPGIHRDGGSGENLYFQSSDNGPQNQRNAPRITFGGPSDSTGSNQNGERSGARSKQRRPQGLPNNTASWFTALTQHGKEDLKFPRGQGTPINTNSSPDDQIGYYRRATRRIRGGDGKMKDLSPRWYFYYLGTGPEAGLPYGANKDGIIWVATEGALNTPKDHIGTRNPANNAAIVLQLPQGTTLPKGFYAEGSRGGSQASSRSSSRSRNSSRNSTPGSSRGTSPARMAGNGGDAALALLLLDRLNQLESKMSGKGQQQQGQTVTKKSAAEASKKPRQKRTATKAYNVTQAFGRRGPEQTQGNFGDQELIRQGTDYKHWPQIAQFAPSASAFFGMSRIGMEVTPSGTWLTYTGAIKLDDKDPNFKDQVILLNKHIDAYKTFPPTEPKKDKKKKADETQALPQRQKKQQTVTLLPAADLDDFSKQLQQSMSSADSTQA

SEQ ID NO: 1006 - protein, 671 aa, Artificial Sequence
  Description of Artificial Sequence: Synthetic polypeptide
MHHHHHHGGSGSPILGYWKIKGLVQPTRLLLEYLEEKYEEHLYERDEGDKWRNKKFELGLEFPNLPYYIDGDVKLTQSMAIIRYIADKHNMLGGCPKERAEISMLEGAVLDIRYGVSRIAYSKDFETLKVDFLSKLPEMLKMFEDRLCHKTYLNGDHVTHPDFMLYDALDVVLYMDPMCLDAFPKLVCFKKRIEAIPQIDKYLKSSKYIAWPLQGWQATFGGGDHPPKSDLVPRGSPGIHRDGGSGENLYFQSSDNGPQNQRNAPRITFGGPSDSTGSNQNGERSGARSKQRRPQGLPNNTASWFTALTQHGKEDLKFPRGQGVPINTNSSPDDQIGYYRRATRRIRGGDGKMKDLSPRWYFYYLGTGPEAGLPYGANKDGIIWVATEGAQNTPKDHIGTRNPANNAAIVLQLPQGTTLPKGFYAEGSRGGSQASSRSSSRSRNSSRNSTPGSSRGTSPARMAGNGGDAALALLLLDRLNQLESKMSGKGQQQQGQTVTKKSAAEASKKPRQKRTATKAYNVTQAFGRRGPEQTQGNFGDQELIRQGTDYKHWPQIAQFAPSASAFFGMSRIGMEVTPSGTWLTYTGAIKLDDKDPNFKDQVILLNKHIDAYKTFPPTEPKKDKKKKADETQALPQRQKKQQTVTLLPAADLDDFSKQLQQSMSSADSTQA

SEQ ID NO: 1007 - protein, 671 aa, Artificial Sequence
  Description of Artificial Sequence: Synthetic polypeptide
MHHHHHHGGSGSPILGYWKIKGLVQPTRLLLEYLEEKYEEHLYERDEGDKWRNKKFELGLEFPNLPYYIDGDVKLTQSMAIIRYIADKHNMLGGCPKERAEISMLEGAVLDIRYGVSRIAYSKDFETLKVDFLSKLPEMLKMFEDRLCHKTYLNGDHVTHPDFMLYDALDVVLYMDPMCLDAFPKLVCFKKRIEAIPQIDKYLKSSKYIAWPLQGWQATFGGGDHPPKSDLVPRGSPGIHRDGGSGENLYFQSSDNGPQNQRNAPRITFGGPSDSTGSNQNGERSGARSKQRRPQGLPNNTASWFTALTQHGKEDLKFPRGQGVPINTNSSPDDQIGYYRRATRRIRGGDGKMKDLSPRWYFYYLGTGPEAGLPYGANKDGIIWVATEGALNTPKDHIGTRNPANNAAIVLQLPQGTTLPKGFYAEGSRGGSQASSRSSSRSRNSSRNSTPGSSRGTSPARMAGNGGDAALALLLLDRLNQLESKMSGKGQQQQGQTVTKKSAAEASKKPRQKRTATKAYNVTQAFGRRGPEQTQGNFGDQQLIRQGTDYKHWPQIAQFAPSASAFFGMSRIGMEVTPSGTWLTYTGAIKLDDKDPNFKDQVILLNKHIDAYKTFPPTEPKKDKKKKADETQALPQRQKKQQTVTLLPAADLDDFSKQLQQSMSSADSTQA

SEQ ID NO: 1008 - protein, 671 aa, Artificial Sequence
  Description of Artificial Sequence: Synthetic polypeptide
MHHHHHHGGSGSPILGYWKIKGLVQPTRLLLEYLEEKYEEHLYERDEGDKWRNKKFELGLEFPNLPYYIDGDVKLTQSMAIIRYIADKHNMLGGCPKERAEISMLEGAVLDIRYGVSRIAYSKDFETLKVDFLSKLPEMLKMFEDRLCHKTYLNGDHVTHPDFMLYDALDVVLYMDPMCLDAFPKLVCFKKRIEAIPQIDKYLKSSKYIAWPLQGWQATFGGGDHPPKSDLVPRGSPGIHRDGGSGENLYFQSSDNGPQNQRNAPRITFGGPSDSTGSNQNGERSGARSKQRRPQGLPNNTASWFTALTQHGKEDLKFPRGQGVPINTNSSPDDQIGYYRRATRRIRGGDGKMKDLSPRWYFYYLGTGPEAGLPYGANKDGIIWVATEGALNTPKDHIGTRNPANNAAIVLQLPQGTTLPKGFYAEGSRGGSQASSRSSSRSRNSSRNSTPGSSRGTSPARMAGNGGDAALALLLLDRLNQLESKMSGKGQQQQGQTVTKKSAAEASKRPRQKRTATKAYNVTQAFGRRGPEQTQGNFGDQELIRQGTDYKHWPQIAQFAPSASAFFGMSRIGMEVTPSGTWLTYTGAIKLDDKDPNFKDQVILLNKHIDAYKTFPPTEPKKDKKKKADETQALPQRQKKQQTVTLLPAADLDDFSKQLQQSMSSADSTQA

SEQ ID NO: 1009 - protein, 671 aa, Artificial Sequence
  Description of Artificial Sequence: Synthetic polypeptide
MHHHHHHGGSGSPILGYWKIKGLVQPTRLLLEYLEEKYEEHLYERDEGDKWRNKKFELGLEFPNLPYYIDGDVKLTQSMAIIRYIADKHNMLGGCPKERAEISMLEGAVLDIRYGVSRIAYSKDFETLKVDFLSKLPEMLKMFEDRLCHKTYLNGDHVTHPDFMLYDALDVVLYMDPMCLDAFPKLVCFKKRIEAIPQIDKYLKSSKYIAWPLQGWQATFGGGDHPPKSDLVPRGSPGIHRDGGSGENLYFQSSDNGPQNQRNAPRITFGGPSDSTGSNQNGERSGARSKQRRPQGLPNNTASWFTALTQHGKEDLKFPRGQGVPINTNSSPDDQIGSYRRATRRIRGGDGKMKDLSPRWYFYYLGTGPEAGLPYGANKDGIIWVATEGALNTPKDHIGTRNPANNAAIVLQLPQGTTLPKGFYAEGSRGGSQASSRSSSRSRNSSRNSTPGSSRGTSPARMAGNGGDAALALLLLDRLNQLESKMSGKGQQQQGQTVTKKSAAEASKKPRQKRTATKAYNVTQAFGRRGPEQTQGNFGDQELIRQGTDYKHWPQIAQFAPSASAFFGMSRIGMEVTPSGTWLTYTGAIKLDDKDPNFKDQVILLNKHIDAYKTFPPTEPKKDKKKKADETQALPQRQKKQQTVTLLPAADLDDFSKQLQQSMSSADSTQA

SEQ ID NO: 1010 - protein, 671 aa, Artificial Sequence
  Description of Artificial Sequence: Synthetic polypeptide
MHHHHHHGGSGSPILGYWKIKGLVQPTRLLLEYLEEKYEEHLYERDEGDKWRNKKFELGLEFPNLPYYIDGDVKLTQSMAIIRYIADKHNMLGGCPKERAEISMLEGAVLDIRYGVSRIAYSKDFETLKVDFLSKLPEMLKMFEDRLCHKTYLNGDHVTHPDFMLYDALDVVLYMDPMCLDAFPKLVCFKKRIEAIPQIDKYLKSSKYIAWPLQGWQATFGGGDHPPKSDLVPRGSPGIHRDGGSGENLYFQSSDNGPQNQRNAPRITFGGPSDSTGSNQNGERSGARSKQRRPQGLPNNTASWFTALTQHGKEDLKFPRGQGVPINTNSSPDDQIGYYRRATRRIRGGDGKMKDLSPEWYFYYLGTGPEAGLPYGANKDGIIWVATEGALNTPKDHIGTRNPANNAAIVLQLPQGTTLPKGFYAEGSRGGSQASSRSSSRSRNSSRNSTPGSSRGTSPARMAGNGGDAALALLLLDRLNQLESKMSGKGQQQQGQTVTKKSAAEASKKPRQKRTATKAYNVTQAFGRRGPEQTQGNFGDQELIRQGTDYKHWPQIAQFAPSASAFFGMSRIGMEVTPSGTWLTYTGAIKLDDKDPNFKDQVILLNKHIDAYKTFPPTEPKKDKKKKADETQALPQRQKKQQTVTLLPAADLDDFSKQLQQSMSSADSTQA

SEQ ID NO: 1011 - protein, 671 aa, Artificial Sequence
  Description of Artificial Sequence: Synthetic polypeptide
MHHHHHHGGSGSPILGYWKIKGLVQPTRLLLEYLEEKYEEHLYERDEGDKWRNKKFELGLEFPNLPYYIDGDVKLTQSMAIIRYIADKHNMLGGCPKERAEISMLEGAVLDIRYGVSRIAYSKDFETLKVDFLSKLPEMLKMFEDRLCHKTYLNGDHVTHPDFMLYDALDVVLYMDPMCLDAFPKLVCFKKRIEAIPQIDKYLKSSKYIAWPLQGWQATFGGGDHPPKSDLVPRGSPGIHRDGGSGENLYFQSSDNGPQNQRNAPRITFGGPSDSTGSNQNGERSGARSKQRRPQGLPNNTASWFTALTQHGKEDLKFPRGQGVPINTNSSPDDQIGYYRRATRRIRGGDGKMKDLSPRWYFYYLGTGPEAGLPYGANKDGIIWVATEGALNKPKDHIGTRNPANNAAIVLQLPQGTTLPKGFYAEGSRGGSQASSRSSSRSRNSSRNSTPGSSRGTSPARMAGNGGDAALALLLLDRLNQLESKMSGKGQQQQGQTVTKKSAAEASKKPRQKRTATKAYNVTQAFGRRGPEQTQGNFGDQELIRQGTDYKHWPQIAQFAPSASAFFGMSRIGMEVTPSGTWLTYTGAIKLDDKDPNFKDQVILLNKHIDAYKTFPPTEPKKDKKKKADETQALPQRQKKQQTVTLLPAADLDDFSKQLQQSMSSADSTQA

SEQ ID NO: 1012 - protein, 671 aa, Artificial Sequence
  Description of Artificial Sequence: Synthetic polypeptide
MHHHHHHGGSGSPILGYWKIKGLVQPTRLLLEYLEEKYEEHLYERDEGDKWRNKKFELGLEFPNLPYYIDGDVKLTQSMAIIRYIADKHNMLGGCPKERAEISMLEGAVLDIRYGVSRIAYSKDFETLKVDFLSKLPEMLKMFEDRLCHKTYLNGDHVTHPDFMLYDALDVVLYMDPMCLDAFPKLVCFKKRIEAIPQIDKYLKSSKYIAWPLQGWQATFGGGDHPPKSDLVPRGSPGIHRDGGSGENLYFQSSDNGPQNQRNAPRITFGGPSDSTGSNQNGERSGARSKQRRPQGLPNNTASWFTALTQHGKEDLKFPRGQGVPINTNSSPDDQIGYYRRATRRIRGGDGKMKDLSPRWYFYYLGTGPEAGLPYGANKDGIIWVAQEGALNTPKDHIGTRNPANNAAIVLQLPQGTTLPKGFYAEGSRGGSQASSRSSSRSRNSSRNSTPGSSRGTSPARMAGNGGDAALALLLLDRLNQLESKMSGKGQQQQGQTVTKKSAAEASKKPRQKRTATKAYNVTQAFGRRGPEQTQGNFGDQELIRQGTDYKHWPQIAQFAPSASAFFGMSRIGMEVTPSGTWLTYTGAIKLDDKDPNFKDQVILLNKHIDAYKTFPPTEPKKDKKKKADETQALPQRQKKQQTVTLLPAADLDDFSKQLQQSMSSADSTQA

SEQ ID NO: 1013 - protein, 671 aa, Artificial Sequence
  Description of Artificial Sequence: Synthetic polypeptide
MHHHHHHGGSGSPILGYWKIKGLVQPTRLLLEYLEEKYEEHLYERDEGDKWRNKKFELGLEFPNLPYYIDGDVKLTQSMAIIRYIADKHNMLGGCPKERAEISMLEGAVLDIRYGVSRIAYSKDFETLKVDFLSKLPEMLKMFEDRLCHKTYLNGDHVTHPDFMLYDALDVVLYMDPMCLDAFPKLVCFKKRIEAIPQIDKYLKSSKYIAWPLQGWQATFGGGDHPPKSDLVPRGSPGIHRDGGSGENLYFQSSDNGPQNQRNAPRITFGGPSDSTGSNQNGERSGARSKQRRPQGLPNNTASWFTALTQHGKEDLKFPRGQGVPINTNSSPDDQIGYYRRATRRIRGGDGKMKDLSPRWYFYYLGTGPEAGLPYGANKDGIIWVATEGALNTPKDHIGTRNPANNAAIPLQLPQGTTLPKGFYAEGSRGGSQASSRSSSRSRNSSRNSTPGSSRGTSPARMAGNGGDAALALLLLDRLNQLESKMSGKGQQQQGQTVTKKSAAEASKKPRQKRTATKAYNVTQAFGRRGPEQTQGNFGDQELIRQGTDYKHWPQIAQFAPSASAFFGMSRIGMEVTPSGTWLTYTGAIKLDDKDPNFKDQVILLNKHIDAYKTFPPTEPKKDKKKKADETQALPQRQKKQQTVTLLPAADLDDFSKQLQQSMSSADSTQA

SEQ ID NO: 1014 - protein, 671 aa, Artificial Sequence
  Description of Artificial Sequence: Synthetic polypeptide
MHHHHHHGGSGSPILGYWKIKGLVQPTRLLLEYLEEKYEEHLYERDEGDKWRNKKFELGLEFPNLPYYIDGDVKLTQSMAIIRYIADKHNMLGGCPKERAEISMLEGAVLDIRYGVSRIAYSKDFETLKVDFLSKLPEMLKMFEDRLCHKTYLNGDHVTHPDFMLYDALDVVLYMDPMCLDAFPKLVCFKKRIEAIPQIDKYLKSSKYIAWPLQGWQATFGGGDHPPKSDLVPRGSPGIHRDGGSGENLYFQSSDNGPQNQRNAPRITFGGPSDSTGSNQNGERSGARSKQRRPQGLPNNTASWFTALTQHGKEDLKFPRGQGVPINTNSSPDDQIGYYRRATRRMRGGDGKMKDLSPRWYFYYLGTGPEAGLPYGANKDGIIWVATEGALNTPKDHIGTRNPANNAAIVLQLPQGTTLPKGFYAEGSRGGSQASSRSSSRSRNSSRNSTPGSSRGTSPARMAGNGGDAALALLLLDRLNQLESKMSGKGQQQQGQTVTKKSAAEASKKPRQKRTATKAYNVTQAFGRRGPEQTQGNFGDQELIRQGTDYKHWPQIAQFAPSASAFFGMSRIGMEVTPSGTWLTYTGAIKLDDKDPNFKDQVILLNKHIDAYKTFPPTEPKKDKKKKADETQALPQRQKKQQTVTLLPAADLDDFSKQLQQSMSSADSTQA

SEQ ID NO: 1015 - protein, 671 aa, Artificial Sequence
  Description of Artificial Sequence: Synthetic polypeptide
MHHHHHHGGSGSPILGYWKIKGLVQPTRLLLEYLEEKYEEHLYERDEGDKWRNKKFELGLEFPNLPYYIDGDVKLTQSMAIIRYIADKHNMLGGCPKERAEISMLEGAVLDIRYGVSRIAYSKDFETLKVDFLSKLPEMLKMFEDRLCHKTYLNGDHVTHPDFMLYDALDVVLYMDPMCLDAFPKLVCFKKRIEAIPQIDKYLKSSKYIAWPLQGWQATFGGGDHPPKSDLVPRGSPGIHRDGGSGENLYFQSSDNGPQNQRNAPRITFGGPSDSTGSNQNGERSGARSKQRRPQGLPNNTASWFTALTQHGKEDLKFPRGQGVPINTNSSPDDQIGYYRRATRRIRGGDGKMKDLSPRWYFYYLGTGPEAGLPYGANKTGIIWVATEGALNTPKDHIGTRNPANNAAIVLQLPQGTTLPKGFYAEGSRGGSQASSRSSSRSRNSSRNSTPGSSRGTSPARMAGNGGDAALALLLLDRLNQLESKMSGKGQQQQGQTVTKKSAAEASKKPRQKRTATKAYNVTQAFGRRGPEQTQGNFGDQELIRQGTDYKHWPQIAQFAPSASAFFGMSRIGMEVTPSGTWLTYTGAIKLDDKDPNFKDQVILLNKHIDAYKTFPPTEPKKDKKKKADETQALPQRQKKQQTVTLLPAADLDDFSKQLQQSMSSADSTQA

SEQ ID NO: 1016 - protein, 671 aa, Artificial Sequence
  Description of Artificial Sequence: Synthetic polypeptide
MHHHHHHGGSGSPILGYWKIKGLVQPTRLLLEYLEEKYEEHLYERDEGDKWRNKKFELGLEFPNLPYYIDGDVKLTQSMAIIRYIADKHNMLGGCPKERAEISMLEGAVLDIRYGVSRIAYSKDFETLKVDFLSKLPEMLKMFEDRLCHKTYLNGDHVTHPDFMLYDALDVVLYMDPMCLDAFPKLVCFKKRIEAIPQIDKYLKSSKYIAWPLQGWQATFGGGDHPPKSDLVPRGSPGIHRDGGSGENLYFQSSDNGPQNQRNAPRITFGGPSDSTGSNQNGERSGARSKQRRPQGLPNNTASWFTALTQHGKEDLKFPRGQGVPINTNSSPDDQIGYYRRATRRIRGGDGKMKDLSPRWYFYYLGTGPEAGLPYGANKDGIIWVATEGALNTPKDHIGTRNPANNAAIVLQLPQGTTLPKGFYAEGSRGGSQASSRSSSRSRNSSRNSTPGSSRGTSPARMAGNGGDAALALLLLDRLNQLESKMSGKGQQQQGQTVTKKSAAEASKKPRQKRTATKAYNVTQAFGARGPEQTQGNFGDQELIRQGTDYKHWPQIAQFAPSASAFFGMSRIGMEVTPSGTWLTYTGAIKLDDKDPNFKDQVILLNKHIDAYKTFPPTEPKKDKKKKADETQALPQRQKKQQTVTLLPAADLDDFSKQLQQSMSSADSTQA

SEQ ID NO: 1017 - protein, 671 aa, Artificial Sequence
  Description of Artificial Sequence: Synthetic polypeptide
MHHHHHHGGSGSPILGYWKIKGLVQPTRLLLEYLEEKYEEHLYERDEGDKWRNKKFELGLEFPNLPYYIDGDVKLTQSMAIIRYIADKHNMLGGCPKERAEISMLEGAVLDIRYGVSRIAYSKDFETLKVDFLSKLPEMLKMFEDRLCHKTYLNGDHVTHPDFMLYDALDVVLYMDPMCLDAFPKLVCFKKRIEAIPQIDKYLKSSKYIAWPLQGWQATFGGGDHPPKSDLVPRGSPGIHRDGGSGENLYFQSSDNGPQNQRNAPRITFGGPSDSTGSNQNGERSGARSKQRRPQGLPNNTASWFTALTQHGKEDLKFPRGQGVPINTNSSPDDQIGYYRRSTRRIRGGDGKMKDLSPRWYFYYLGTGPEAGLPYGANKDGIIWVATEGALNTPKDHIGTRNPANNAAIVLQLPQGTTLPKGFYAEGSRGGSQASSRSSSRSRNSSRNSTPGSSRGTSPARMAGNGGDAALALLLLDRLNQLESKMSGKGQQQQGQTVTKKSAAEASKKPRQKRTATKAYNVTQAFGRRGPEQTQGNFGDQELIRQGTDYKHWPQIAQFAPSASAFFGMSRIGMEVTPSGTWLTYTGAIKLDDKDPNFKDQVILLNKHIDAYKTFPPTEPKKDKKKKADETQALPQRQKKQQTVTLLPAADLDDFSKQLQQSMSSADSTQA

SEQ ID NO: 1018 - protein, 671 aa, Artificial Sequence
  Description of Artificial Sequence: Synthetic polypeptide
MHHHHHHGGSGSPILGYWKIKGLVQPTRLLLEYLEEKYEEHLYERDEGDKWRNKKFELGLEFPNLPYYIDGDVKLTQSMAIIRYIADKHNMLGGCPKERAEISMLEGAVLDIRYGVSRIAYSKDFETLKVDFLSKLPEMLKMFEDRLCHKTYLNGDHVTHPDFMLYDALDVVLYMDPMCLDAFPKLVCFKKRIEAIPQIDKYLKSSKYIAWPLQGWQATFGGGDHPPKSDLVPRGSPGIHRDGGSGENLYFQSSDNGPQNQRNAPRITFGGPSDSTGSNQNGERSGARSKQRRPQGLPNNTASWFTALTQHGKEDLKFPPGQGVPINPNSKPDDQIGYYRRQVRRYRGGDGQMKDLPPRWYFYYLGTGPEAGLPYGANKDGIIWVATEGALNTPKDHIGTRNPANNAAIVLQLPQGTTLPKGFYAEGSRGGSQASSRSSSRSRNSSRNSTPGSSRGTSPARMAGNGGDAALALLLLDRLNQLESKMSGKGQQQQGQTVTKKSAAEASKKPRQKRTATKAYNVTQAFGRRGPEQTQGNFGDQELIRQGTDYKHWPQIAQFAPSASAFFGMSRIGMEVTPSGTWLTYTGAIKLDDKDPNFKDQVILLNKHIDAYKTFPPTEPKKDKKKKADETQALPQRQKKQQTVTLLPAADLDDFSKQLQQSMSSADSTQA

SEQ ID NO: 1019 - protein, 671 aa, Artificial Sequence
  Description of Artificial Sequence: Synthetic polypeptide
MHHHHHHGGSGSPILGYWKIKGLVQPTRLLLEYLEEKYEEHLYERDEGDKWRNKKFELGLEFPNLPYYIDGDVKLTQSMAIIRYIADKHNMLGGCPKERAEISMLEGAVLDIRYGVSRIAYSKDFETLKVDFLSKLPEMLKMFEDRLCHKTYLNGDHVTHPDFMLYDALDVVLYMDPMCLDAFPKLVCFKKRIEAIPQIDKYLKSSKYIAWPLQGWQATFGGGDHPPKSDLVPRGSPGIHRDGGSGENLYFQSSDNGPQNQRNAPRITFGGPSDSTGSNQNGERSGARSKQRRPQGLPNNTASWFTALTQHGKEDLKFPRGQGVPINTNSSPDDQIGYYRRHTRRIRGGDGKMKDLSPRWYFYYLGTGPEAGLPYGANKDGIIWVATEGALNTPKDHIGTRNPANNAAIVLQLPQGTTLPKGFYAEGSRGGSQASSRSSSRSRNSSRNSTPGSSRGTSPARMAGNGGDAALALLLLDRLNQLESKMSGKGQQQQGQTVTKKSAAEASKKPRQKRTATKAYNVTQAFGRRGPEQTQGNFGDQELIRQGTDYKHWPQIAQFAPSASAFFGMSRIGMEVTPSGTWLTYTGAIKLDDKDPNFKDQVILLNKHIDAYKTFPPTEPKKDKKKKADETQALPQRQKKQQTVTLLPAADLDDFSKQLQQSMSSADSTQA

SEQ ID NO: 1020 - protein, 671 aa, Artificial Sequence
  Description of Artificial Sequence: Synthetic polypeptide
MHHHHHHGGSGSPILGYWKIKGLVQPTRLLLEYLEEKYEEHLYERDEGDKWRNKKFELGLEFPNLPYYIDGDVKLTQSMAIIRYIADKHNMLGGCPKERAEISMLEGAVLDIRYGVSRIAYSKDFETLKVDFLSKLPEMLKMFEDRLCHKTYLNGDHVTHPDFMLYDALDVVLYMDPMCLDAFPKLVCFKKRIEAIPQIDKYLKSSKYIAWPLQGWQATFGGGDHPPKSDLVPRGSPGIHRDGGSGENLYFQSSDNGPQNQRNAPRITFGGPSDSTGSNQNGERSGARSKQRRPQGLPNNTASWFTALTQHGKEDLKFPRGQGVPINTNSSPDDQIGYYRRATRRIRGGDGKMKDLSPRWYFYYLGTGPEAGLPYGANKDGIIWVATEGALNTPKDHIGTRNPANNAAIVLQLPQGTTLPKGFYAEGSRGGSQASSRSSSRSRNSSRNSTPGSSRGTSPARMAGNGGDAALALLLLDRLNQLESKMSGKGQQQQGQTVTKKSAAEASKKPRQKRTATKVYNVTQAFGRRGPEQTQGNFGDQELIRQGTDYKHWPQIAQFAPSASAFFGMSRIGMEVTPSGTWLTYTGAIKLDDKDPNFKDQVILLNKHIDAYKTFPPTEPKKDKKKKADETQALPQRQKKQQTVTLLPAADLDDFSKQLQQSMSSADSTQA

SEQ ID NO: 1021 - protein, 671 aa, Artificial Sequence
  Description of Artificial Sequence: Synthetic polypeptide
MHHHHHHGGSGSPILGYWKIKGLVQPTRLLLEYLEEKYEEHLYERDEGDKWRNKKFELGLEFPNLPYYIDGDVKLTQSMAIIRYIADKHNMLGGCPKERAEISMLEGAVLDIRYGVSRIAYSKDFETLKVDFLSKLPEMLKMFEDRLCHKTYLNGDHVTHPDFMLYDALDVVLYMDPMCLDAFPKLVCFKKRIEAIPQIDKYLKSSKYIAWPLQGWQATFGGGDHPPKSDLVPRGSPGIHRDGGSGENLYFQSSDNGPQNQRNAPRITFGGPSDSTGSNQNGERSGARSKQRRPQGLPNNTASWFTALTQHGKEDLSFPRGQGVPINTNSSPDDQIGYYRRATRRIRGGDGKMKDLSPRWYFYYLGTGPEAGLPYGANKDGIIWVATEGALNTPKDHIGTRNPANNAAIVLQLPQGTTLPKGFYAEGSRGGSQASSRSSSRSRNSSRNSTPGSSRGTSPARMAGNGGDAALALLLLDRLNQLESKMSGKGQQQQGQTVTKKSAAEASKKPRQKRTATKAYNVTQAFGRRGPEQTQGNFGDQELIRQGTDYKHWPQIAQFAPSASAFFGMSRIGMEVTPSGTWLTYTGAIKLDDKDPNFKDQVILLNKHIDAYKTFPPTEPKKDKKKKADETQALPQRQKKQQTVTLLPAADLDDFSKQLQQSMSSADSTQA

SEQ ID NO: 1022 - protein, 671 aa, Artificial Sequence
  Description of Artificial Sequence: Synthetic polypeptide
MHHHHHHGGSGSPILGYWKIKGLVQPTRLLLEYLEEKYEEHLYERDEGDKWRNKKFELGLEFPNLPYYIDGDVKLTQSMAIIRYIADKHNMLGGCPKERAEISMLEGAVLDIRYGVSRIAYSKDFETLKVDFLSKLPEMLKMFEDRLCHKTYLNGDHVTHPDFMLYDALDVVLYMDPMCLDAFPKLVCFKKRIEAIPQIDKYLKSSKYIAWPLQGWQATFGGGDHPPKSDLVPRGSPGIHRDGGSGENLYFQSSDNGPQNQRNAPRITFGGPSDSTGSNQNGERSGARSKQRRPQGLPNNTASWFTALTQHGKEDLKFPRGQGVPINTNSSPDDQIGYYRRATRRIRGGDGKMKDLSPRWYFYYLGTGPEAGLPYGANKDGIIWVATEGALNTPKDHIGVRNPANNAAIVLQLPQGTTLPKGFYAEGSRGGSQASSRSSSRSRNSSRNSTPGSSRGTSPARMAGNGGDAALALLLLDRLNQLESKMSGKGQQQQGQTVTKKSAAEASKKPRQKRTATKAYNVTQAFGRRGPEQTQGNFGDQELIRQGTDYKHWPQIAQFAPSASAFFGMSRIGMEVTPSGTWLTYTGAIKLDDKDPNFKDQVILLNKHIDAYKTFPPTEPKKDKKKKADETQALPQRQKKQQTVTLLPAADLDDFSKQLQQSMSSADSTQA

SEQ ID NO: 1023 - protein, 671 aa, Artificial Sequence
  Description of Artificial Sequence: Synthetic polypeptide
MHHHHHHGGSGSPILGYWKIKGLVQPTRLLLEYLEEKYEEHLYERDEGDKWRNKKFELGLEFPNLPYYIDGDVKLTQSMAIIRYIADKHNMLGGCPKERAEISMLEGAVLDIRYGVSRIAYSKDFETLKVDFLSKLPEMLKMFEDRLCHKTYLNGDHVTHPDFMLYDALDVVLYMDPMCLDAFPKLVCFKKRIEAIPQIDKYLKSSKYIAWPLQGWQATFGGGDHPPKSDLVPRGSPGIHRDGGSGENLYFQSSDNGPQNQRNAPRITFGGPSDSTGSNQNGERSGARSKQRRPQGLPNNTASWFTALTQHGKEDLKFPRGQGVPINTNSSPDDQIGYYRRATRRIRGGDGKMKDLSPRWYFYYLGTGPEAGLPYGANKDGIIWVATEGALNTPKDHIGTRNPANNAAIVLQLPQGTVLPKGFYAEGSRGGSQASSRSSSRSRNSSRNSTPGSSRGTSPARMAGNGGDAALALLLLDRLNQLESKMSGKGQQQQGQTVTKKSAAEASKKPRQKRTATKAYNVTQAFGRRGPEQTQGNFGDQELIRQGTDYKHWPQIAQFAPSASAFFGMSRIGMEVTPSGTWLTYTGAIKLDDKDPNFKDQVILLNKHIDAYKTFPPTEPKKDKKKKADETQALPQRQKKQQTVTLLPAADLDDFSKQLQQSMSSADSTQA

SEQ ID NO: 1024 - protein, 671 aa, Artificial Sequence
  Description of Artificial Sequence: Synthetic polypeptide
MHHHHHHGGSGSPILGYWKIKGLVQPTRLLLEYLEEKYEEHLYERDEGDKWRNKKFELGLEFPNLPYYIDGDVKLTQSMAIIRYIADKHNMLGGCPKERAEISMLEGAVLDIRYGVSRIAYSKDFETLKVDFLSKLPEMLKMFEDRLCHKTYLNGDHVTHPDFMLYDALDVVLYMDPMCLDAFPKLVCFKKRIEAIPQIDKYLKSSKYIAWPLQGWQATFGGGDHPPKSDLVPRGSPGIHRDGGSGENLYFQSSDNGPQNQRNAPRITFGGPSDSTGSNQNGERSGARSKQRRPQGLPNNTASWFTALTQHGKEDLKFPRGQGVPINTNSSPDDQIGYYRRATRRIRGGDGKMKDLSPRWYFYYLGTGPEAGLPYGANKDGIIWVATEGALNTPKDHIGTRNPANNAAIVLQLPQGTTLPKGFYAEGSRGGSQASSRSSSRSRNSSRNSTPGSSRGTSPARMAGNGGDAALALLLLDRLNQLESKMSGKGQQQQGQTVTKKSAAEASKKPRQKRTATKAYNVTQAFGRRGPEQTQGNFGDQELIRQGTDYKHWPQIAQFAPSAAAFFGMSRIGMEVTPSGTWLTYTGAIKLDDKDPNFKDQVILLNKHIDAYKTFPPTEPKKDKKKKADETQALPQRQKKQQTVTLLPAADLDDFSKQLQQSMSSADSTQA

SEQ ID NO: 1025 - protein, 671 aa, Artificial Sequence
  Description of Artificial Sequence: Synthetic polypeptide
MHHHHHHGGSGSPILGYWKIKGLVQPTRLLLEYLEEKYEEHLYERDEGDKWRNKKFELGLEFPNLPYYIDGDVKLTQSMAIIRYIADKHNMLGGCPKERAEISMLEGAVLDIRYGVSRIAYSKDFETLKVDFLSKLPEMLKMFEDRLCHKTYLNGDHVTHPDFMLYDALDVVLYMDPMCLDAFPKLVCFKKRIEAIPQIDKYLKSSKYIAWPLQGWQATFGGGDHPPKSDLVPRGSPGIHRDGGSGENLYFQSSDNGPQNQRNAPRITFGGPSDSTGSNQNGERSGARSKQRRPQGLPNNTASWFTALTQHGKEDLKFPRGQGVPINTNSSPDDQIGYYRRATRRIRGGDGKMKDLSPRWYFYYIGTGPEAGLPYGANKDGIIWVATEGALNTPKDHIGTRNPANNAAIVLQLPQGTTLPKGFYAEGSRGGSQASSRSSSRSRNSSRNSTPGSSRGTSPARMAGNGGDAALALLLLDRLNQLESKMSGKGQQQQGQTVTKKSAAEASKKPRQKRTATKAYNVTQAFGRRGPEQTQGNFGDQELIRQGTDYKHWPQIAQFAPSASAFFGMSRIGMEVTPSGTWLTYTGAIKLDDKDPNFKDQVILLNKHIDAYKTFPPTEPKKDKKKKADETQALPQRQKKQQTVTLLPAADLDDFSKQLQQSMSSADSTQA

SEQ ID NO: 1026 - protein, 671 aa, Artificial Sequence
  Description of Artificial Sequence: Synthetic polypeptide
MHHHHHHGGSGSPILGYWKIKGLVQPTRLLLEYLEEKYEEHLYERDEGDKWRNKKFELGLEFPNLPYYIDGDVKLTQSMAIIRYIADKHNMLGGCPKERAEISMLEGAVLDIRYGVSRIAYSKDFETLKVDFLSKLPEMLKMFEDRLCHKTYLNGDHVTHPDFMLYDALDVVLYMDPMCLDAFPKLVCFKKRIEAIPQIDKYLKSSKYIAWPLQGWQATFGGGDHPPKSDLVPRGSPGIHRDGGSGENLYFQSSDNGPQNQRNAPRITFGGPSDSTGSNQNGERSGARSKQRRPQGLPNNTASWFTALTQHGKEDLKFPRGQGVPINTNSSPDDQIGYYRRATRRIRGGDGKMKDLSPRWYFYYLGTGPEAGLPYGANKDGIIWVATEGALNTPKDHIGTRNPANNAAIVLQLPQGTTLPKGFYAEGSRGGSQASSRSSSRSRNSSRNSTPGSSRGTSPARMAGNGGDAALALLLLDRLNQLESKMSGKGQQQQGQTVTKKSAAEASKKPRQKRTATKFYNVTQAFGRRGPEQTQGNFGDQELIRQGTDYKHWPQIAQFAPSASAFFGMSRIGMEVTPSGTWLTYTGAIKLDDKDPNFKDQVILLNKHIDAYKTFPPTEPKKDKKKKADETQALPQRQKKQQTVTLLPAADLDDFSKQLQQSMSSADSTQA

SEQ ID NO: 1027 - protein, 671 aa, Artificial Sequence
  Description of Artificial Sequence: Synthetic polypeptide
MHHHHHHGGSGSPILGYWKIKGLVQPTRLLLEYLEEKYEEHLYERDEGDKWRNKKFELGLEFPNLPYYIDGDVKLTQSMAIIRYIADKHNMLGGCPKERAEISMLEGAVLDIRYGVSRIAYSKDFETLKVDFLSKLPEMLKMFEDRLCHKTYLNGDHVTHPDFMLYDALDVVLYMDPMCLDAFPKLVCFKKRIEAIPQIDKYLKSSKYIAWPLQGWQATFGGGDHPPKSDLVPRGSPGIHRDGGSGENLYFQSSDNGPQNQRNAPRITFGGPSDSTGSNQNGERSGARSKQRRPQGLPNNTASWFTAITQHGKEDLKFPRGQGVPINTNSSPDDQIGYYRRATRRIRGGDGKMKDLSPRWYFYYLGTGPEAGLPYGANKDGIIWVATEGALNTPKDHIGTRNPANNAAIVLQLPQGTTLPKGFYAEGSRGGSQASSRSSSRSRNSSRNSTPGSSRGTSPARMAGNGGDAALALLLLDRLNQLESKMSGKGQQQQGQTVTKKSAAEASKKPRQKRTATKAYNVTQAFGRRGPEQTQGNFGDQELIRQGTDYKHWPQIAQFAPSASAFFGMSRIGMEVTPSGTWLTYTGAIKLDDKDPNFKDQVILLNKHIDAYKTFPPTEPKKDKKKKADETQALPQRQKKQQTVTLLPAADLDDFSKQLQQSMSSADSTQA

SEQ ID NO: 1028 - protein, 671 aa, Artificial Sequence
  Description of Artificial Sequence: Synthetic polypeptide
MHHHHHHGGSGSPILGYWKIKGLVQPTRLLLEYLEEKYEEHLYERDEGDKWRNKKFELGLEFPNLPYYIDGDVKLTQSMAIIRYIADKHNMLGGCPKERAEISMLEGAVLDIRYGVSRIAYSKDFETLKVDFLSKLPEMLKMFEDRLCHKTYLNGDHVTHPDFMLYDALDVVLYMDPMCLDAFPKLVCFKKRIEAIPQIDKYLKSSKYIAWPLQGWQATFGGGDHPPKSDLVPRGSPGIHRDGGSGENLYFQSSDNGPQNQRNAPRITFGGPSDSTGSNQNGERSGARSKQRRPQGLPNNTASWFTALTQHGKEDLKFPRGQGVPINTNSSPDDQIGYYRRATRRIRGGDGKMKDLSPRWYFYYLGTGPEAGLPYGANKDGIIWVATEGALNTPKDHIGTRNPANNAAIVLQLPQGTTLPKGFYAEGSRGGSQASSRSSSRSRNSSRNSTPGSSRGTSPARMAGNGGDAALALLLLDRLNQLESKMSGKGQQQQGQTVTKKSAAEASKKPRQKRTATKAYNVTQAFGRRGPEQLQGNFGDQELIRQGTDYKHWPQIAQFAPSASAFFGMSRIGMEVTPSGTWLTYTGAIKLDDKDPNFKDQVILLNKHIDAYKTFPPTEPKKDKKKKADETQALPQRQKKQQTVTLLPAADLDDFSKQLQQSMSSADSTQA

SEQ ID NO: 1029 - protein, 671 aa, Artificial Sequence
  Description of Artificial Sequence: Synthetic polypeptide
MHHHHHHGGSGSPILGYWKIKGLVQPTRLLLEYLEEKYEEHLYERDEGDKWRNKKFELGLEFPNLPYYIDGDVKLTQSMAIIRYIADKHNMLGGCPKERAEISMLEGAVLDIRYGVSRIAYSKDFETLKVDFLSKLPEMLKMFEDRLCHKTYLNGDHVTHPDFMLYDALDVVLYMDPMCLDAFPKLVCFKKRIEAIPQIDKYLKSSKYIAWPLQGWQATFGGGDHPPKSDLVPRGSPGIHRDGGSGENLYFQSSDNGPQNQRNAPRITFGGPSDSTGSNQNGERSGARSKQRRPQGLPNNTASWFTALTQHGKEDLKFPRGQGVPINTNSSPDDQIGYYRRATRRIRGGDGKMKDLSPRWYFYYLGTGPEAGLPYGANKDGIIWVATEGALNTPKDHIGTRNPANNAAIVLQLPTGTTLPKGFYAEGSRGGSQASSRSSSRSRNSSRNSTPGSSRGTSPARMAGNGGDAALALLLLDRLNQLESKMSGKGQQQQGQTVTKKSAAEASKKPRQKRTATKAYNVTQAFGRRGPEQTQGNFGDQELIRQGTDYKHWPQIAQFAPSASAFFGMSRIGMEVTPSGTWLTYTGAIKLDDKDPNFKDQVILLNKHIDAYKTFPPTEPKKDKKKKADETQALPQRQKKQQTVTLLPAADLDDFSKQLQQSMSSADSTQA

SEQ ID NO: 1030 - protein, 671 aa, Artificial Sequence
  Description of Artificial Sequence: Synthetic polypeptide
MHHHHHHGGSGSPILGYWKIKGLVQPTRLLLEYLEEKYEEHLYERDEGDKWRNKKFELGLEFPNLPYYIDGDVKLTQSMAIIRYIADKHNMLGGCPKERAEISMLEGAVLDIRYGVSRIAYSKDFETLKVDFLSKLPEMLKMFEDRLCHKTYLNGDHVTHPDFMLYDALDVVLYMDPMCLDAFPKLVCFKKRIEAIPQIDKYLKSSKYIAWPLQGWQATFGGGDHPPKSDLVPRGSPGIHRDGGSGENLYFQSSDNGPQNQRNAPRITFGGPSDSTGSNQNGERSGARSKQRRPQGLPNNTASWFTALTQHGKEDLKFPRGQGVPINTNSSPDDQIGYYRRATRRIRGGDGKMKDLSPRWYFYYLGTGPEAGLPYGANKDGIIWVATEGALNTPKDHIGTRNPANNAAIVLQLPQGTTLPKGFYAEGSRGGSQASSRSSSRSRNSSRNSTPGSSRGTSPARMAGNGGDAALALLLLDRLNQLESKMSGKGQQQQGQTVTKKSAAEASKIPRQKRTATKAYNVTQAFGRRGPEQTQGNFGDQELIRQGTDYKHWPQIAQFAPSASAFFGMSRIGMEVTPSGTWLTYTGAIKLDDKDPNFKDQVILLNKHIDAYKTFPPTEPKKDKKKKADETQALPQRQKKQQTVTLLPAADLDDFSKQLQQSMSSADSTQA

SEQ ID NO: 1031 - protein, 671 aa, Artificial Sequence
  Description of Artificial Sequence: Synthetic polypeptide
MHHHHHHGGSGSPILGYWKIKGLVQPTRLLLEYLEEKYEEHLYERDEGDKWRNKKFELGLEFPNLPYYIDGDVKLTQSMAIIRYIADKHNMLGGCPKERAEISMLEGAVLDIRYGVSRIAYSKDFETLKVDFLSKLPEMLKMFEDRLCHKTYLNGDHVTHPDFMLYDALDVVLYMDPMCLDAFPKLVCFKKRIEAIPQIDKYLKSSKYIAWPLQGWQATFGGGDHPPKSDLVPRGSPGIHRDGGSGENLYFQSSDNGPQNQRNAPRITFGGPSDSTGSNQNGERSGARSKQRRPQGLPNNTASWFTALTQHGKEDLKFPRGQGVPINTNSSPDDQIGYYRRATRRIRGGDGKMKDLSPRWYFYYLGTGPEAGLPYGANKDGIIWVATEGALNTPKDHIGTRNPANNAAIVLQLPQGTTLPKGFYAEGSRGGSQASSRSSSRSRNSSRNSTPGSSRGTSPARMAGNGGDAALALLLLDRLNQLESKMSGKGQQQQGQTVTKKSAAEASKKPRQKRTATKAYNVTQAFGRRGPEQTQGNFGDQELIRQGTDYSHWPQIAQFAPSASAFFGMSRIGMEVTPSGTWLTYTGAIKLDDKDPNFKDQVILLNKHIDAYKTFPPTEPKKDKKKKADETQALPQRQKKQQTVTLLPAADLDDFSKQLQQSMSSADSTQA

SEQ ID NO: 1032 - protein, 671 aa, Artificial Sequence
  Description of Artificial Sequence: Synthetic polypeptide
MHHHHHHGGSGSPILGYWKIKGLVQPTRLLLEYLEEKYEEHLYERDEGDKWRNKKFELGLEFPNLPYYIDGDVKLTQSMAIIRYIADKHNMLGGCPKERAEISMLEGAVLDIRYGVSRIAYSKDFETLKVDFLSKLPEMLKMFEDRLCHKTYLNGDHVTHPDFMLYDALDVVLYMDPMCLDAFPKLVCFKKRIEAIPQIDKYLKSSKYIAWPLQGWQATFGGGDHPPKSDLVPRGSPGIHRDGGSGENLYFQSSDNGPQNQRNAPRITFGGPSDSTGSNQNGERSGARSKQRRPQGLPNNTASWFTALTQHGKEDLKFPRGQGVPINTNSSPDDQIGYYRRATRRIRGGDGKMKDLSPRWYFYYLGTGPEAGLPYGANKDGIIWVATEGALNTPKDHIGTRNPANNAAIVLQLPQGTELPKGFYAEGSRGGSQASSRSSSRSRNSSRNSTPGSSRGTSPARMAGNGGDAALALLLLDRLNQLESKMSGKGQQQQGQTVTKKSAAEASKKPRQKRTATKAYNVTQAFGRRGPEQTQGNFGDQELIRQGTDYKHWPQIAQFAPSASAFFGMSRIGMEVTPSGTWLTYTGAIKLDDKDPNFKDQVILLNKHIDAYKTFPPTEPKKDKKKKADETQALPQRQKKQQTVTLLPAADLDDFSKQLQQSMSSADSTQA

SEQ ID NO: 1033 - protein, 671 aa, Artificial Sequence
  Description of Artificial Sequence: Synthetic polypeptide
MHHHHHHGGSGSPILGYWKIKGLVQPTRLLLEYLEEKYEEHLYERDEGDKWRNKKFELGLEFPNLPYYIDGDVKLTQSMAIIRYIADKHNMLGGCPKERAEISMLEGAVLDIRYGVSRIAYSKDFETLKVDFLSKLPEMLKMFEDRLCHKTYLNGDHVTHPDFMLYDALDVVLYMDPMCLDAFPKLVCFKKRIEAIPQIDKYLKSSKYIAWPLQGWQATFGGGDHPPKSDLVPRGSPGIHRDGGSGENLYFQSSDNGPQNQRNAPRITFGGPSDSTGSNQNGERSGARSKQRRPQGLPNNTASWFTALTQHGKEDLKFPRGQGVPINTNSSPDDQIGYYRRATRRIRGGDGKMKDLSPRWYFYYLGTGPEAGLPYGANKDGIIWVAMEGALNTPKDHIGTRNPANNAAIVLQLPQGTTLPKGFYAEGSRGGSQASSRSSSRSRNSSRNSTPGSSRGTSPARMAGNGGDAALALLLLDRLNQLESKMSGKGQQQQGQTVTKKSAAEASKKPRQKRTATKAYNVTQAFGRRGPEQTQGNFGDQELIRQGTDYKHWPQIAQFAPSASAFFGMSRIGMEVTPSGTWLTYTGAIKLDDKDPNFKDQVILLNKHIDAYKTFPPTEPKKDKKKKADETQALPQRQKKQQTVTLLPAADLDDFSKQLQQSMSSADSTQA

SEQ ID NO: 1034 - protein, 671 aa, Artificial Sequence
  Description of Artificial Sequence: Synthetic polypeptide
MHHHHHHGGSGSPILGYWKIKGLVQPTRLLLEYLEEKYEEHLYERDEGDKWRNKKFELGLEFPNLPYYIDGDVKLTQSMAIIRYIADKHNMLGGCPKERAEISMLEGAVLDIRYGVSRIAYSKDFETLKVDFLSKLPEMLKMFEDRLCHKTYLNGDHVTHPDFMLYDALDVVLYMDPMCLDAFPKLVCFKKRIEAIPQIDKYLKSSKYIAWPLQGWQATFGGGDHPPKSDLVPRGSPGIHRDGGSGENLYFQSSDNGPQNQRNAPRITFGGPSDSTGSNQNGERSGARSKQRRPQGLPNNTASWFTALTQHGKEDLKFPRGQGVPINTNSSPDDQIGYYRRATRRIRGGDGKMKDLLPRWYFYYLGTGPEAGLPYGANKDGIIWVATEGALNTPKDHIGTRNPANNAAIVLQLPQGTTLPKGFYAEGSRGGSQASSRSSSRSRNSSRNSTPGSSRGTSPARMAGNGGDAALALLLLDRLNQLESKMSGKGQQQQGQTVTKKSAAEASKKPRQKRTATKAYNVTQAFGRRGPEQTQGNFGDQELIRQGTDYKHWPQIAQFAPSASAFFGMSRIGMEVTPSGTWLTYTGAIKLDDKDPNFKDQVILLNKHIDAYKTFPPTEPKKDKKKKADETQALPQRQKKQQTVTLLPAADLDDFSKQLQQSMSSADSTQA

SEQ ID NO: 1035 - protein, 671 aa, Artificial Sequence
  Description of Artificial Sequence: Synthetic polypeptide
MHHHHHHGGSGSPILGYWKIKGLVQPTRLLLEYLEEKYEEHLYERDEGDKWRNKKFELGLEFPNLPYYIDGDVKLTQSMAIIRYIADKHNMLGGCPKERAEISMLEGAVLDIRYGVSRIAYSKDFETLKVDFLSKLPEMLKMFEDRLCHKTYLNGDHVTHPDFMLYDALDVVLYMDPMCLDAFPKLVCFKKRIEAIPQIDKYLKSSKYIAWPLQGWQATFGGGDHPPKSDLVPRGSPGIHRDGGSGENLYFQSSDNGPQNQRNAPRITFGGPSDSTGSNQNGERSGARSKQRRPQGLPNNTASWFTALTQHGKEDLKFPRGQGVPINTNSSPDDQIGYYRRATRRIRGGDGKMKDLSPRWYFYYLGTGPEAGLPYGANKDGIIWVATEGALNTPKDHIGTRNPANNAAIVLQLPQGTTLPKGFYAEGSRGGSQASSRSSSRSRNSSRNSTPGSSRGTSPARMAGNGGDAALALLLLDRLNQLESKMSGKGQQQQGQTVTKKSAAEASKKPRQKRTATKAYNVTQAFGRRGPEQTQGNFGDQELIRQGTDYKHWPQIAQFAPSASAFFGMSRIGMEATPSGTWLTYTGAIKLDDKDPNFKDQVILLNKHIDAYKTFPPTEPKKDKKKKADETQALPQRQKKQQTVTLLPAADLDDFSKQLQQSMSSADSTQA

SEQ ID NO: 1036 - protein, 671 aa, Artificial Sequence
  Description of Artificial Sequence: Synthetic polypeptide
MHHHHHHGGSGSPILGYWKIKGLVQPTRLLLEYLEEKYEEHLYERDEGDKWRNKKFELGLEFPNLPYYIDGDVKLTQSMAIIRYIADKHNMLGGCPKERAEISMLEGAVLDIRYGVSRIAYSKDFETLKVDFLSKLPEMLKMFEDRLCHKTYLNGDHVTHPDFMLYDALDVVLYMDPMCLDAFPKLVCFKKRIEAIPQIDKYLKSSKYIAWPLQGWQATFGGGDHPPKSDLVPRGSPGIHRDGGSGENLYFQSSDNGPQNQRNAPRITFGGPSDSTGSNQNGERSGARSKQRRPQGLPNNTASWFTALTQHGKEDLKFPRGQGVPINTNSSPDDQIGYYRRATRRIRGGDGKMKDLSPRWYFYYLGTGPEAGLPYGANKDGIIWVATEGALNTPKDHIGTRNPANNAAIVLQLPQGTTLPKGFYAEGSRGGSQASSRSSSRSRNSSRNSTPGSSRGTSPARMAGNGGDAALALLLLDRLNQLESKMSGKGQQQQGQTVTKKSAAEASKKPRQKRTATKAYNVTQAFGRRGPEQTQGNFGDQELIRQGTDYKHWPQIAQFAPSASAFFGMSEIGMEVTPSGTWLTYTGAIKLDDKDPNFKDQVILLNKHIDAYKTFPPTEPKKDKKKKADETQALPQRQKKQQTVTLLPAADLDDFSKQLQQSMSSADSTQA

SEQ ID NO: 1037 - protein, 671 aa, Artificial Sequence
  Description of Artificial Sequence: Synthetic polypeptide
MHHHHHHGGSGSPILGYWKIKGLVQPTRLLLEYLEEKYEEHLYERDEGDKWRNKKFELGLEFPNLPYYIDGDVKLTQSMAIIRYIADKHNMLGGCPKERAEISMLEGAVLDIRYGVSRIAYSKDFETLKVDFLSKLPEMLKMFEDRLCHKTYLNGDHVTHPDFMLYDALDVVLYMDPMCLDAFPKLVCFKKRIEAIPQIDKYLKSSKYIAWPLQGWQATFGGGDHPPKSDLVPRGSPGIHRDGGSGENLYFQSSDNGPQNQRNAPRITFGGPSDSTGSNQNGERSGARSKQRRPQGLPNNTASWFTALTQHGKEDLKFPRGQGVPINTNSSPDDQIGYYRRATRRIRGGDGKMKDLSPRWYFYYLGTGPEAGLPYGANKDGIIWVATEGALNTPKDHIGTRNPANNAAIVLQLPAGTTLPKGFYAEGSRGGSQASSRSSSRSRNSSRNSTPGSSRGTSPARMAGNGGDAALALLLLDRLNQLESKMSGKGQQQQGQTVTKKSAAEASKKPRQKRTATKAYNVTQAFGRRGPEQTQGNFGDQELIRQGTDYKHWPQIAQFAPSASAFFGMSRIGMEVTPSGTWLTYTGAIKLDDKDPNFKDQVILLNKHIDAYKTFPPTEPKKDKKKKADETQALPQRQKKQQTVTLLPAADLDDFSKQLQQSMSSADSTQA

SEQ ID NO: 1038 - protein, 671 aa, Artificial Sequence
  Description of Artificial Sequence: Synthetic polypeptide
MHHHHHHGGSGSPILGYWKIKGLVQPTRLLLEYLEEKYEEHLYERDEGDKWRNKKFELGLEFPNLPYYIDGDVKLTQSMAIIRYIADKHNMLGGCPKERAEISMLEGAVLDIRYGVSRIAYSKDFETLKVDFLSKLPEMLKMFEDRLCHKTYLNGDHVTHPDFMLYDALDVVLYMDPMCLDAFPKLVCFKKRIEAIPQIDKYLKSSKYIAWPLQGWQATFGGGDHPPKSDLVPRGSPGIHRDGGSGENLYFQSSDNGPQNQRNAPRITFGGPSDSTGSNQNGERSGARSKQRRPQGLPNNTASWFTALTQHGKEDLKFPRGQGVPINTNSSPDDQIGYYRRATRRIRGGDGKMKDLSPRWYFYYLGTGPEAGLPYGANKDGIIWVATEGALNTPKDHIGTRNPANNAAIVLQLPQGTTLPKGFYAEGSRGGSQASSRSSSRSRNSSRNSTPGSSRGTSPARMAGNGGDAALALLLLDRLNQLESKMSGKGQQQQGQTVTKKSAAEASKKPRQKRTATKTYNVTQAFGRRGPEQTQGNFGDQELIRQGTDYKHWPQIAQFAPSASAFFGMSRIGMEVTPSGTWLTYTGAIKLDDKDPNFKDQVILLNKHIDAYKTFPPTEPKKDKKKKADETQALPQRQKKQQTVTLLPAADLDDFSKQLQQSMSSADSTQA

SEQ ID NO: 1039 - protein, 671 aa, Artificial Sequence
  Description of Artificial Sequence: Synthetic polypeptide
MHHHHHHGGSGSPILGYWKIKGLVQPTRLLLEYLEEKYEEHLYERDEGDKWRNKKFELGLEFPNLPYYIDGDVKLTQSMAIIRYIADKHNMLGGCPKERAEISMLEGAVLDIRYGVSRIAYSKDFETLKVDFLSKLPEMLKMFEDRLCHKTYLNGDHVTHPDFMLYDALDVVLYMDPMCLDAFPKLVCFKKRIEAIPQIDKYLKSSKYIAWPLQGWQATFGGGDHPPKSDLVPRGSPGIHRDGGSGENLYFQSSDNGPQNQRNAPRITFGGPSDSTGSNQNGERSGARSKQRRPQGLPNNTASWFTALTQHGKEDLKFPRGQGVPINTNSSPDDQIGYYRRATRRIRGGDGKMKDLSPRWYFYYLGTGPEAGLPYGANKDGIIWVATEGALNTPKDHIGTRNPANNAAIVLQLPQGTTLPKGFYAEGSRGGSQASSRSSSRSRNSSRNSTPGSSRGTSPARMAGNGGDAALALLLLDRLNQLESKMSGKGQQQQGQTVTKKSAAEASKKPRQKRTATKGYNVTQAFGRRGPEQTQGNFGDQDLIKLGTDYKHWPQIAQFAPSASAFFGMSRIGMRETPSGTWLTYTGAIKLDKKDPNFKDQVILLNKHIDAYKTFPPTEPKKDKKKKADETQALPQRQKKQQTVTLLPAADLDDFSKQLQQSMSSADSTQA

SEQ ID NO: 1040 - protein, 671 aa, Artificial Sequence
  Description of Artificial Sequence: Synthetic polypeptide
MHHHHHHGGSGSPILGYWKIKGLVQPTRLLLEYLEEKYEEHLYERDEGDKWRNKKFELGLEFPNLPYYIDGDVKLTQSMAIIRYIADKHNMLGGCPKERAEISMLEGAVLDIRYGVSRIAYSKDFETLKVDFLSKLPEMLKMFEDRLCHKTYLNGDHVTHPDFMLYDALDVVLYMDPMCLDAFPKLVCFKKRIEAIPQIDKYLKSSKYIAWPLQGWQATFGGGDHPPKSDLVPRGSPGIHRDGGSGENLYFQSSDNGPQNQRNAPRITFGGPSDSTGSNQNGERSGARSKQRRPQGLPNNTASWFTALTQHGKEDLKFPRGQGVPINTNSSPDDQIGYYRRATRRIRGGDGKMKDLSPRWYFYYLGTGPEAHLPYGANKDGIIWVATEGALNTPKDHIGTRNPANNAAIVLQLPQGTTLPKGFYAEGSRGGSQASSRSSSRSRNSSRNSTPGSSRGTSPARMAGNGGDAALALLLLDRLNQLESKMSGKGQQQQGQTVTKKSAAEASKKPRQKRTATKAYNVTQAFGRRGPEQTQGNFGDQELIRQGTDYKHWPQIAQFAPSASAFFGMSRIGMEVTPSGTWLTYTGAIKLDDKDPNFKDQVILLNKHIDAYKTFPPTEPKKDKKKKADETQALPQRQKKQQTVTLLPAADLDDFSKQLQQSMSSADSTQA

SEQ ID NO: 1041 - protein, 671 aa, Artificial Sequence
  Description of Artificial Sequence: Synthetic polypeptide
MHHHHHHGGSGSPILGYWKIKGLVQPTRLLLEYLEEKYEEHLYERDEGDKWRNKKFELGLEFPNLPYYIDGDVKLTQSMAIIRYIADKHNMLGGCPKERAEISMLEGAVLDIRYGVSRIAYSKDFETLKVDFLSKLPEMLKMFEDRLCHKTYLNGDHVTHPDFMLYDALDVVLYMDPMCLDAFPKLVCFKKRIEAIPQIDKYLKSSKYIAWPLQGWQATFGGGDHPPKSDLVPRGSPGIHRDGGSGENLYFQSSDNGPQNQRNAPRITFGGPSDSTGSNQNGERSGARSKQRRPQGLPNNTASWFTALTQHGKEDLKFPRGQGVPINTNSSPDDQIGYYRRATRRIRGGDGKMKDLSPRWYFYYLGTGPEAGLPYGANKDGIIWVATEGALNTPKDHIGTRNPANNAAIVLQLPQGTTLPKGFYAEGSRGGSQASSRSSSRSRNSSRNSTPGSSRGTSPARMAGNGGDAALALLLLDRLNQLESKMSGKGQQQQGQTVTKKSAAEASKKPRQKRTATKAYNVTQAFGRRGPEQTQGNFGDQELIRQGTDYKHWPQIAQFLPSASAFFGMSRIGMEVTPSGTWLTYTGAIKLDDKDPNFKDQVILLNKHIDAYKTFPPTEPKKDKKKKADETQALPQRQKKQQTVTLLPAADLDDFSKQLQQSMSSADSTQA

SEQ ID NO: 1042 - protein, 671 aa, Artificial Sequence
  Description of Artificial Sequence: Synthetic polypeptide
MHHHHHHGGSGSPILGYWKIKGLVQPTRLLLEYLEEKYEEHLYERDEGDKWRNKKFELGLEFPNLPYYIDGDVKLTQSMAIIRYIADKHNMLGGCPKERAEISMLEGAVLDIRYGVSRIAYSKDFETLKVDFLSKLPEMLKMFEDRLCHKTYLNGDHVTHPDFMLYDALDVVLYMDPMCLDAFPKLVCFKKRIEAIPQIDKYLKSSKYIAWPLQGWQATFGGGDHPPKSDLVPRGSPGIHRDGGSGENLYFQSSDNGPQNQRNAPRITFGGPSDSTGSNQNGERSGARSKQRRPQGLPNNTASWFTALTQHGKEDLKFPRGQGVPINTNSSPDDQIGYYRRATRRIRGGDGKMKDLSPRWYFYYLGTGPEAGLPYGANKDGIIWVATEGALNTPKDHIGTRNPANNAAIVLQLPQGTTLPKGFYAEGSRGGSQASSRSSSRSRNSSRNSTPGSSRGTSPARMAGNGGDAALALLLLDRLNQLESKMSGKGQQQQGQTVTKKSAAEASKKPRQKRTATKAYNVTQAFGRRGPEQTQGNFGDQELIRQGTDYKHWPQIAQFAPSASAFFGMSRIGMEQTPSGTWLTYTGAIKLDDKDPNFKDQVILLNKHIDAYKTFPPTEPKKDKKKKADETQALPQRQKKQQTVTLLPAADLDDFSKQLQQSMSSADSTQA

SEQ ID NO: 1043 - protein, 671 aa, Artificial Sequence
  Description of Artificial Sequence: Synthetic polypeptide
MHHHHHHGGSGSPILGYWKIKGLVQPTRLLLEYLEEKYEEHLYERDEGDKWRNKKFELGLEFPNLPYYIDGDVKLTQSMAIIRYIADKHNMLGGCPKERAEISMLEGAVLDIRYGVSRIAYSKDFETLKVDFLSKLPEMLKMFEDRLCHKTYLNGDHVTHPDFMLYDALDVVLYMDPMCLDAFPKLVCFKKRIEAIPQIDKYLKSSKYIAWPLQGWQATFGGGDHPPKSDLVPRGSPGIHRDGGSGENLYFQSSDNGPQNQRNAPRITFGGPSDSTGSNQNGERSGARSKQRRPQGLPNNTASWFTALTQHGKEDLKFPRGQGVPINTNSSPDDQIGYYRRATRRIRGGDGKMKDLSPRWYFYYLGTGPEADLPYGANKDGIIWVATEGALNTPKDHIGTRNPANNAAIVLQLPQGTTLPKGFYAEGSRGGSQASSRSSSRSRNSSRNSTPGSSRGTSPARMAGNGGDAALALLLLDRLNQLESKMSGKGQQQQGQTVTKKSAAEASKKPRQKRTATKAYNVTQAFGRRGPEQTQGNFGDQELIRQGTDYKHWPQIAQFAPSASAFFGMSRIGMEVTPSGTWLTYTGAIKLDDKDPNFKDQVILLNKHIDAYKTFPPTEPKKDKKKKADETQALPQRQKKQQTVTLLPAADLDDFSKQLQQSMSSADSTQA

SEQ ID NO: 1044 - protein, 671 aa, Artificial Sequence
  Description of Artificial Sequence: Synthetic polypeptide
MHHHHHHGGSGSPILGYWKIKGLVQPTRLLLEYLEEKYEEHLYERDEGDKWRNKKFELGLEFPNLPYYIDGDVKLTQSMAIIRYIADKHNMLGGCPKERAEISMLEGAVLDIRYGVSRIAYSKDFETLKVDFLSKLPEMLKMFEDRLCHKTYLNGDHVTHPDFMLYDALDVVLYMDPMCLDAFPKLVCFKKRIEAIPQIDKYLKSSKYIAWPLQGWQATFGGGDHPPKSDLVPRGSPGIHRDGGSGENLYFQSSDNGPQNQRNAPRITFGGPSDSTGSNQNGERSGARSKQRRPQGLPNNTASWFTALTQHGKEDLKFPKGQGVPINTNSKPDDQIGYWRRQVRRYRGGDGQMKDLNPRWYFYYLGTGPEAGLPYGANKDGIIWVATEGALNTPKDHIGTRNPANNAAIVLQLPQGTTLPKGFYAEGSRGGSQASSRSSSRSRNSSRNSTPGSSRGTSPARMAGNGGDAALALLLLDRLNQLESKMSGKGQQQQGQTVTKKSAAEASKKPRQKRTATKAYNVTQAFGRRGPEQTQGNFGDQELIRQGTDYKHWPQIAQFAPSASAFFGMSRIGMEVTPSGTWLTYTGAIKLDDKDPNFKDQVILLNKHIDAYKTFPPTEPKKDKKKKADETQALPQRQKKQQTVTLLPAADLDDFSKQLQQSMSSADSTQA

SEQ ID NO: 1045 - protein, 671 aa, Artificial Sequence
  Description of Artificial Sequence: Synthetic polypeptide
MHHHHHHGGSGSPILGYWKIKGLVQPTRLLLEYLEEKYEEHLYERDEGDKWRNKKFELGLEFPNLPYYIDGDVKLTQSMAIIRYIADKHNMLGGCPKERAEISMLEGAVLDIRYGVSRIAYSKDFETLKVDFLSKLPEMLKMFEDRLCHKTYLNGDHVTHPDFMLYDALDVVLYMDPMCLDAFPKLVCFKKRIEAIPQIDKYLKSSKYIAWPLQGWQATFGGGDHPPKSDLVPRGSPGIHRDGGSGENLYFQSSDNGPQNQRNAPRITFGGPSDSTGSNQNGERSGARSKQRRPQGLPNNTASWFTALTQHGKEDLKFPRGQGVPINTNSSPDDQIGYYRRATRRIRGGDGKMKDLSPRWSFYYLGTGPEAGLPYGANKDGIIWVATEGALNTPKDHIGTRNPANNAAIVLQLPQGTTLPKGFYAEGSRGGSQASSRSSSRSRNSSRNSTPGSSRGTSPARMAGNGGDAALALLLLDRLNQLESKMSGKGQQQQGQTVTKKSAAEASKKPRQKRTATKAYNVTQAFGRRGPEQTQGNFGDQELIRQGTDYKHWPQIAQFAPSASAFFGMSRIGMEVTPSGTWLTYTGAIKLDDKDPNFKDQVILLNKHIDAYKTFPPTEPKKDKKKKADETQALPQRQKKQQTVTLLPAADLDDFSKQLQQSMSSADSTQA

SEQ ID NO: 1046 - protein, 671 aa, Artificial Sequence
  Description of Artificial Sequence: Synthetic polypeptide
MHHHHHHGGSGSPILGYWKIKGLVQPTRLLLEYLEEKYEEHLYERDEGDKWRNKKFELGLEFPNLPYYIDGDVKLTQSMAIIRYIADKHNMLGGCPKERAEISMLEGAVLDIRYGVSRIAYSKDFETLKVDFLSKLPEMLKMFEDRLCHKTYLNGDHVTHPDFMLYDALDVVLYMDPMCLDAFPKLVCFKKRIEAIPQIDKYLKSSKYIAWPLQGWQATFGGGDHPPKSDLVPRGSPGIHRDGGSGENLYFQSSDNGPQNQRNAPRITFGGPSDSTGSNQNGERSGARSKQRRPQGLPNNTASWFTALTQHGKEDLKFPRGQGVPINTNSSPDDQIGYYRRATRRIRGGDGKMKDLSPRWYFYYLGTGPEAGLPYGAKKDGIIWVATEGALNTPKDHIGTRNPANNAAIVLQLPQGTTLPKGFYAEGSRGGSQASSRSSSRSRNSSRNSTPGSSRGTSPARMAGNGGDAALALLLLDRLNQLESKMSGKGQQQQGQTVTKKSAAEASKKPRQKRTATKAYNVTQAFGRRGPEQTQGNFGDQELIRQGTDYKHWPQIAQFAPSASAFFGMSRIGMEVTPSGTWLTYTGAIKLDDKDPNFKDQVILLNKHIDAYKTFPPTEPKKDKKKKADETQALPQRQKKQQTVTLLPAADLDDFSKQLQQSMSSADSTQA

SEQ ID NO: 1047 - protein, 671 aa, Artificial Sequence
  Description of Artificial Sequence: Synthetic polypeptide
MHHHHHHGGSGSPILGYWKIKGLVQPTRLLLEYLEEKYEEHLYERDEGDKWRNKKFELGLEFPNLPYYIDGDVKLTQSMAIIRYIADKHNMLGGCPKERAEISMLEGAVLDIRYGVSRIAYSKDFETLKVDFLSKLPEMLKMFEDRLCHKTYLNGDHVTHPDFMLYDALDVVLYMDPMCLDAFPKLVCFKKRIEAIPQIDKYLKSSKYIAWPLQGWQATFGGGDHPPKSDLVPRGSPGIHRDGGSGENLYFQSSDNGPQNQRNAPRITFGGPSDSTGSNQNGERSGARSKQRRPQGLPNNTASWFTALTQHGKEDLKFPRGQGVPINTNSSPDDQIGYYRRATRRIRGGDGKMKDLSPRWYFYYLGTGPEAGLPYGANKDGIIWVATEGALNTPKGHIGTRNPANNAAIVLQLPQGTTLPKGFYAEGSRGGSQASSRSSSRSRNSSRNSTPGSSRGTSPARMAGNGGDAALALLLLDRLNQLESKMSGKGQQQQGQTVTKKSAAEASKKPRQKRTATKAYNVTQAFGRRGPEQTQGNFGDQELIRQGTDYKHWPQIAQFAPSASAFFGMSRIGMEVTPSGTWLTYTGAIKLDDKDPNFKDQVILLNKHIDAYKTFPPTEPKKDKKKKADETQALPQRQKKQQTVTLLPAADLDDFSKQLQQSMSSADSTQA

SEQ ID NO: 1048 - protein, 671 aa, Artificial Sequence
  Description of Artificial Sequence: Synthetic polypeptide
MHHHHHHGGSGSPILGYWKIKGLVQPTRLLLEYLEEKYEEHLYERDEGDKWRNKKFELGLEFPNLPYYIDGDVKLTQSMAIIRYIADKHNMLGGCPKERAEISMLEGAVLDIRYGVSRIAYSKDFETLKVDFLSKLPEMLKMFEDRLCHKTYLNGDHVTHPDFMLYDALDVVLYMDPMCLDAFPKLVCFKKRIEAIPQIDKYLKSSKYIAWPLQGWQATFGGGDHPPKSDLVPRGSPGIHRDGGSGENLYFQSSDNGPQNQRNAPRITFGGPSDSTGSNQNGERSGARSKQRRPQGLPNNTASWFTALTQHGKEDLKFPRGQGVPINTNSSPDDQIGAYRRATRRIRGGDGKMKDLSPRWYFYYLGTGPEAGLPYGANKDGIIWVATEGALNTPKDHIGTRNPANNAAIVLQLPQGTTLPKGFYAEGSRGGSQASSRSSSRSRNSSRNSTPGSSRGTSPARMAGNGGDAALALLLLDRLNQLESKMSGKGQQQQGQTVTKKSAAEASKKPRQKRTATKAYNVTQAFGRRGPEQTQGNFGDQELIRQGTDYKHWPQIAQFAPSASAFFGMSRIGMEVTPSGTWLTYTGAIKLDDKDPNFKDQVILLNKHIDAYKTFPPTEPKKDKKKKADETQALPQRQKKQQTVTLLPAADLDDFSKQLQQSMSSADSTQA

SEQ ID NO: 1049 - protein, 671 aa, Artificial Sequence
  Description of Artificial Sequence: Synthetic polypeptide
MHHHHHHGGSGSPILGYWKIKGLVQPTRLLLEYLEEKYEEHLYERDEGDKWRNKKFELGLEFPNLPYYIDGDVKLTQSMAIIRYIADKHNMLGGCPKERAEISMLEGAVLDIRYGVSRIAYSKDFETLKVDFLSKLPEMLKMFEDRLCHKTYLNGDHVTHPDFMLYDALDVVLYMDPMCLDAFPKLVCFKKRIEAIPQIDKYLKSSKYIAWPLQGWQATFGGGDHPPKSDLVPRGSPGIHRDGGSGENLYFQSSDNGPQNQRNAPRITFGGPSDSTGSNQNGERSGARSKQRRPQGLPNNTASWFTALTQHGKEDLKFPRGQGVPINTNSSPDDQIGYYRRATRRIRGGDGKMKDLSPRWYFYYLGTGPEAGLPYGANKDGIIWVATEGALNTPKDHIGTRNPANNAAIVLQLPQGTTLPKGFYNEGSRGGSQASSRSSSRSRNSSRNSTPGSSRGTSPARMAGNGGDAALALLLLDRLNQLESKMSGKGQQQQGQTVTKKSAAEASKKPRQKRTATKAYNVTQAFGRRGPEQTQGNFGDQELIRQGTDYKHWPQIAQFAPSASAFFGMSRIGMEVTPSGTWLTYTGAIKLDDKDPNFKDQVILLNKHIDAYKTFPPTEPKKDKKKKADETQALPQRQKKQQTVTLLPAADLDDFSKQLQQSMSSADSTQA

SEQ ID NO: 1050 - protein, 671 aa, Artificial Sequence
  Description of Artificial Sequence: Synthetic polypeptide
MHHHHHHGGSGSPILGYWKIKGLVQPTRLLLEYLEEKYEEHLYERDEGDKWRNKKFELGLEFPNLPYYIDGDVKLTQSMAIIRYIADKHNMLGGCPKERAEISMLEGAVLDIRYGVSRIAYSKDFETLKVDFLSKLPEMLKMFEDRLCHKTYLNGDHVTHPDFMLYDALDVVLYMDPMCLDAFPKLVCFKKRIEAIPQIDKYLKSSKYIAWPLQGWQATFGGGDHPPKSDLVPRGSPGIHRDGGSGENLYFQSSDNGPQNQRNAPRITFGGPSDSTGSNQNGERSGARSKQRRPQGLPNNTASWFTALTQHGKEDLKFPRGQGVPINNNSSPDDQIGYYRRATRRIRGGDGKMKDLSPRWYFYYLGTGPEAGLPYGANKDGIIWVATEGALNTPKDHIGTRNPANNAAIVLQLPQGTTLPKGFYAEGSRGGSQASSRSSSRSRNSSRNSTPGSSRGTSPARMAGNGGDAALALLLLDRLNQLESKMSGKGQQQQGQTVTKKSAAEASKKPRQKRTATKAYNVTQAFGRRGPEQTQGNFGDQELIRQGTDYKHWPQIAQFAPSASAFFGMSRIGMEVTPSGTWLTYTGAIKLDDKDPNFKDQVILLNKHIDAYKTFPPTEPKKDKKKKADETQALPQRQKKQQTVTLLPAADLDDFSKQLQQSMSSADSTQA

SEQ ID NO: 1051 - protein, 671 aa, Artificial Sequence
  Description of Artificial Sequence: Synthetic polypeptide
MHHHHHHGGSGSPILGYWKIKGLVQPTRLLLEYLEEKYEEHLYERDEGDKWRNKKFELGLEFPNLPYYIDGDVKLTQSMAIIRYIADKHNMLGGCPKERAEISMLEGAVLDIRYGVSRIAYSKDFETLKVDFLSKLPEMLKMFEDRLCHKTYLNGDHVTHPDFMLYDALDVVLYMDPMCLDAFPKLVCFKKRIEAIPQIDKYLKSSKYIAWPLQGWQATFGGGDHPPKSDLVPRGSPGIHRDGGSGENLYFQSSDNGPQNQRNAPRITFGGPSDSTGSNQNGERSGARSKQRRPQGLPNNTASWFTALTQHGKEDLKFPRGQGVPINTNSSPDDQIGYYRRATRRIRGGDGKMKDLSPRWYFYYLGTGPEAGLPYGANKDGIIWVATEGALNTPKDHIGTRNPANNAAIVLRLPQGTTLPKGFYAEGSRGGSQASSRSSSRSRNSSRNSTPGSSRGTSPARMAGNGGDAALALLLLDRLNQLESKMSGKGQQQQGQTVTKKSAAEASKKPRQKRTATKAYNVTQAFGRRGPEQTQGNFGDQELIRQGTDYKHWPQIAQFAPSASAFFGMSRIGMEVTPSGTWLTYTGAIKLDDKDPNFKDQVILLNKHIDAYKTFPPTEPKKDKKKKADETQALPQRQKKQQTVTLLPAADLDDFSKQLQQSMSSADSTQA

SEQ ID NO: 1052 - protein, 671 aa, Artificial Sequence
  Description of Artificial Sequence: Synthetic polypeptide
MHHHHHHGGSGSPILGYWKIKGLVQPTRLLLEYLEEKYEEHLYERDEGDKWRNKKFELGLEFPNLPYYIDGDVKLTQSMAIIRYIADKHNMLGGCPKERAEISMLEGAVLDIRYGVSRIAYSKDFETLKVDFLSKLPEMLKMFEDRLCHKTYLNGDHVTHPDFMLYDALDVVLYMDPMCLDAFPKLVCFKKRIEAIPQIDKYLKSSKYIAWPLQGWQATFGGGDHPPKSDLVPRGSPGIHRDGGSGENLYFQSSDNGPQNQRNAPRITFGGPSDSTGSNQNGERSGARSKQRRPQGLPNNTASWFTPLTQNGKEDLKFPPGQGVPINTNSSPDDQIGYYRRATRRIRGGDGKMKDLPPKWYFYYLGTGPHADLPYGQKQPGVFWVARPGALNTPKDHIGTRNPANNAAIPLQLPPGTKLPKGFYAEGSRGGSQASSRSSSRSRNSSRNSTPGSSRGTSPARMAGNGGDAALALLLLDRLNQLESKMSGKGQQQQGQTVTKKSAAEASKKPRQKRTATKAYNVTQAFGRRGPEQTQGNFGDQELIRQGTDYKHWPQIAQFAPSASAFFGMSRIGMEVTPSGTWLTYTGAIKLDDKDPNFKDQVILLNKHIDAYKTFPPTEPKKDKKKKADETQALPQRQKKQQTVTLLPAADLDDFSKQLQQSMSSADSTQA

SEQ ID NO: 1053 - protein, 671 aa, Artificial Sequence
  Description of Artificial Sequence: Synthetic polypeptide
MHHHHHHGGSGSPILGYWKIKGLVQPTRLLLEYLEEKYEEHLYERDEGDKWRNKKFELGLEFPNLPYYIDGDVKLTQSMAIIRYIADKHNMLGGCPKERAEISMLEGAVLDIRYGVSRIAYSKDFETLKVDFLSKLPEMLKMFEDRLCHKTYLNGDHVTHPDFMLYDALDVVLYMDPMCLDAFPKLVCFKKRIEAIPQIDKYLKSSKYIAWPLQGWQATFGGGDHPPKSDLVPRGSPGIHRDGGSGENLYFQSSDNGPQNQRNAPRITFGGPSDSTGSNQNGERSGARSKQRRPQGLPNNTASWFTALTQHGKEDLKFPPGQGVPINPNSKPDDQIGYYRRQTRRYRGGDGQMKDLPPRWYFYYLGTGPEAGLPYGANKDGIIWVATEGALNTPKDHIGTRNPANNAAIVLQLPQGTTLPKGFYAEGSRGGSQASSRSSSRSRNSSRNSTPGSSRGTSPARMAGNGGDAALALLLLDRLNQLESKMSGKGQQQQGQTVTKKSAAEASKKPRQKRTATKAYNVTQAFGRRGPEQTQGNFGDQELIRQGTDYKHWPQIAQFAPSASAFFGMSRIGMEVTPSGTWLTYTGAIKLDDKDPNFKDQVILLNKHIDAYKTFPPTEPKKDKKKKADETQALPQRQKKQQTVTLLPAADLDDFSKQLQQSMSSADSTQA

SEQ ID NO: 1054 - protein, 671 aa, Artificial Sequence
  Description of Artificial Sequence: Synthetic polypeptide
MHHHHHHGGSGSPILGYWKIKGLVQPTRLLLEYLEEKYEEHLYERDEGDKWRNKKFELGLEFPNLPYYIDGDVKLTQSMAIIRYIADKHNMLGGCPKERAEISMLEGAVLDIRYGVSRIAYSKDFETLKVDFLSKLPEMLKMFEDRLCHKTYLNGDHVTHPDFMLYDALDVVLYMDPMCLDAFPKLVCFKKRIEAIPQIDKYLKSSKYIAWPLQGWQATFGGGDHPPKSDLVPRGSPGIHRDGGSGENLYFQSSDNGPQNQRNAPRITFGGPSDSTGSNQNGERSGARSKQRRPQGLPNNTASWFTALTQHGKEDLKFPRGQGVPINTNSSPDDQIGYYRRATRRIRGGDGKMKDLSPRWYFYYLGTGPEAGLPYGANKDGIIWVATEGALNTPKDHIGTRNPANNAAIVLQLPQGTTLPKGFYAEGSRGGSQASSRSSSRSRNSSRNSTPGSSRGTSPARMAGNGGDAALALLLLDRLNQLESKMSGKGQQQQGQTVTKKSAAEASKKPRQKRTATKAYNVTQAFGRRGPEQTQGNFGDQELIRQGTDYKHWPQIAQFAPSASAFFGMSRIGMEVTPSGIWLTYTGAIKLDDKDPNFKDQVILLNKHIDAYKTFPPTEPKKDKKKKADETQALPQRQKKQQTVTLLPAADLDDFSKQLQQSMSSADSTQA

SEQ ID NO: 1055 - protein, 671 aa, Artificial Sequence
  Description of Artificial Sequence: Synthetic polypeptide
MHHHHHHGGSGSPILGYWKIKGLVQPTRLLLEYLEEKYEEHLYERDEGDKWRNKKFELGLEFPNLPYYIDGDVKLTQSMAIIRYIADKHNMLGGCPKERAEISMLEGAVLDIRYGVSRIAYSKDFETLKVDFLSKLPEMLKMFEDRLCHKTYLNGDHVTHPDFMLYDALDVVLYMDPMCLDAFPKLVCFKKRIEAIPQIDKYLKSSKYIAWPLQGWQATFGGGDHPPKSDLVPRGSPGIHRDGGSGENLYFQSSDNGPQNQRNAPRITFGGPSDSTGSNQNGERSGARSKQRRPQGLPNNTASWFTALTQHGKEDLKFPRGQGVPINTNSSPDDQIGYYRRATRRIRGGDGKMKDLSPRWYFYYLGTGPEAGLPYGANKDGIIWVATEGALNTPKDHIGTRNPANNAAIVLQLPQGTTLPKGFYAEGSRGGSQASSRSSSRSRNSSRNSTPGSSRGTSPARMAGNGGDAALALLLLDRLNQLESKMSGKGQQQQGQTVTKKSAAEASKKPRQKRTATKSYNVTQAFGRRGPEQTQGNFGDQELIRQGTDYKHWPQIAQFAPSASAFFGMSRIGMEVTPSGTWLTYTGAIKLDDKDPNFKDQVILLNKHIDAYKTFPPTEPKKDKKKKADETQALPQRQKKQQTVTLLPAADLDDFSKQLQQSMSSADSTQA

SEQ ID NO: 1056 - protein, 671 aa, Artificial Sequence
  Description of Artificial Sequence: Synthetic polypeptide
MHHHHHHGGSGSPILGYWKIKGLVQPTRLLLEYLEEKYEEHLYERDEGDKWRNKKFELGLEFPNLPYYIDGDVKLTQSMAIIRYIADKHNMLGGCPKERAEISMLEGAVLDIRYGVSRIAYSKDFETLKVDFLSKLPEMLKMFEDRLCHKTYLNGDHVTHPDFMLYDALDVVLYMDPMCLDAFPKLVCFKKRIEAIPQIDKYLKSSKYIAWPLQGWQATFGGGDHPPKSDLVPRGSPGIHRDGGSGENLYFQSSDNGPQNQRNAPRITFGGPSDSTGSNQNGERSGARSKQRRPQGLPNNTASWFTALTQHGKEDLKFPRGQGVPINTNSSPDDQIGYYRRATRRIRGGDGKMKDLSPRWYFYYLGTGPEAGLPYGANKDGIIWVATEGALNTPKDHIGTRNPANNAAIVLQLPQGTTLPKGFYAEGSRGGSQASSRSSSRSRNSSRNSTPGSSRGTSPARMAGNGGDAALALLLLDRLNQLESKMSGKGQQQQGQTVTKKSAAEASKKPRQKRTATKAYNVTQAFGRRGPEQTQGNFGDQELIRQGTDYKHWPQIAQFAPSASAFFGMSRIGMKVTPSGTWLTYTGAIKLDDKDPNFKDQVILLNKHIDAYKTFPPTEPKKDKKKKADETQALPQRQKKQQTVTLLPAADLDDFSKQLQQSMSSADSTQA

SEQ ID NO: 1057 - protein, 671 aa, Artificial Sequence
  Description of Artificial Sequence: Synthetic polypeptide
MHHHHHHGGSGSPILGYWKIKGLVQPTRLLLEYLEEKYEEHLYERDEGDKWRNKKFELGLEFPNLPYYIDGDVKLTQSMAIIRYIADKHNMLGGCPKERAEISMLEGAVLDIRYGVSRIAYSKDFETLKVDFLSKLPEMLKMFEDRLCHKTYLNGDHVTHPDFMLYDALDVVLYMDPMCLDAFPKLVCFKKRIEAIPQIDKYLKSSKYIAWPLQGWQATFGGGDHPPKSDLVPRGSPGIHRDGGSGENLYFQSSDNGPQNQRNAPRITFGGPSDSTGSNQNGERSGARSKQRRPQGLPNNTASWFTALTQHGKEDLKFPRGQGVPINTNSSPDDQIGYYRRATRRIRGGDGKMKDLSPRWYFYYLGTGPEAGLPYGANKDGIIWVATEGALNTPKDHIGTRNPANNAAIVLQLPQGTTLPKGFYAEGSRGGSQASSRSSSRSRNSSRNSTPGSSRGTSPARMAGNGGDAALALLLLDRLNQLESKMSGKGQQQQGQTVTKKSAAEASKKPRQKRTATKAYNVTQAFGRRGPEQTQGNFGDQELIRQGTDYKHWPQIAQFAPSVSAFFGMSRIGMEVTPSGTWLTYTGAIKLDDKDPNFKDQVILLNKHIDAYKTFPPTEPKKDKKKKADETQALPQRQKKQQTVTLLPAADLDDFSKQLQQSMSSADSTQA

SEQ ID NO: 1058 - protein, 671 aa, Artificial Sequence
  Description of Artificial Sequence: Synthetic polypeptide
MHHHHHHGGSGSPILGYWKIKGLVQPTRLLLEYLEEKYEEHLYERDEGDKWRNKKFELGLEFPNLPYYIDGDVKLTQSMAIIRYIADKHNMLGGCPKERAEISMLEGAVLDIRYGVSRIAYSKDFETLKVDFLSKLPEMLKMFEDRLCHKTYLNGDHVTHPDFMLYDALDVVLYMDPMCLDAFPKLVCFKKRIEAIPQIDKYLKSSKYIAWPLQGWQATFGGGDHPPKSDLVPRGSPGIHRDGGSGENLYFQSSDNGPQNQRNAPRITFGGPSDSTGSNQNGERSGARSKQRRPQGLPNNTASWFTALTQHGKEDLKFPRGQGVPINTNSSPDDQIGYYRRATRRIRGGDGKMKDLSPRWYFYYLGTGPEAGLPYGANKDGIIWVATEGALNTPKDHIGTRNPANNAAIVLQLPQGTTLPKGFYAEGSRGGSQASSRSSSRSRNSSRNSTPGSSRGTSPARMAGNGGDAALALLLLDRLNQLESKMSGKGQQQQGQTVTKKSAAEASKKPRQKRTATKAYNVTQAFGRRGPEQTQGNFGDQELIRQGTDYPHWPQIAQFAPSASAFFGMSRIGMEVTPSGTWLTYTGAIKLDDKDPNFKDQVILLNKHIDAYKTFPPTEPKKDKKKKADETQALPQRQKKQQTVTLLPAADLDDFSKQLQQSMSSADSTQA

SEQ ID NO: 1059 - protein, 671 aa, Artificial Sequence
  Description of Artificial Sequence: Synthetic polypeptide
MHHHHHHGGSGSPILGYWKIKGLVQPTRLLLEYLEEKYEEHLYERDEGDKWRNKKFELGLEFPNLPYYIDGDVKLTQSMAIIRYIADKHNMLGGCPKERAEISMLEGAVLDIRYGVSRIAYSKDFETLKVDFLSKLPEMLKMFEDRLCHKTYLNGDHVTHPDFMLYDALDVVLYMDPMCLDAFPKLVCFKKRIEAIPQIDKYLKSSKYIAWPLQGWQATFGGGDHPPKSDLVPRGSPGIHRDGGSGENLYFQSSDNGPQNQRNAPRITFGGPSDSTGSNQNGERSGARSKQRRPQGLPNNTASWFTALTQHGKEDLKFPRGQGVPINTNSSPDDQIGYYRRATRRIRGGDGKMKDLSPRWYFYYLGTGPEAGLPYGANKDGIIWVATEGALNTPKDHIGTRNPANNAAEVLQLPQGTTLPKGFYAEGSRGGSQASSRSSSRSRNSSRNSTPGSSRGTSPARMAGNGGDAALALLLLDRLNQLESKMSGKGQQQQGQTVTKKSAAEASKKPRQKRTATKAYNVTQAFGRRGPEQTQGNFGDQELIRQGTDYKHWPQIAQFAPSASAFFGMSRIGMEVTPSGTWLTYTGAIKLDDKDPNFKDQVILLNKHIDAYKTFPPTEPKKDKKKKADETQALPQRQKKQQTVTLLPAADLDDFSKQLQQSMSSADSTQA

SEQ ID NO: 1060 - protein, 671 aa, Artificial Sequence
  Description of Artificial Sequence: Synthetic polypeptide
MHHHHHHGGSGSPILGYWKIKGLVQPTRLLLEYLEEKYEEHLYERDEGDKWRNKKFELGLEFPNLPYYIDGDVKLTQSMAIIRYIADKHNMLGGCPKERAEISMLEGAVLDIRYGVSRIAYSKDFETLKVDFLSKLPEMLKMFEDRLCHKTYLNGDHVTHPDFMLYDALDVVLYMDPMCLDAFPKLVCFKKRIEAIPQIDKYLKSSKYIAWPLQGWQATFGGGDHPPKSDLVPRGSPGIHRDGGSGENLYFQSSDNGPQNQRNAPRITFGGPSDSTGSNQNGERSGARSKQRRPQGLPNNTASWFTALTQHGKEDLKFPRGQGVPINTNSSPDDQIGYYRRKTRRIRGGDGKMKDLSPRWYFYYLGTGPEAGLPYGANKDGIIWVATEGALNTPKDHIGTRNPANNAAIVLQLPQGTTLPKGFYAEGSRGGSQASSRSSSRSRNSSRNSTPGSSRGTSPARMAGNGGDAALALLLLDRLNQLESKMSGKGQQQQGQTVTKKSAAEASKKPRQKRTATKAYNVTQAFGRRGPEQTQGNFGDQELIRQGTDYKHWPQIAQFAPSASAFFGMSRIGMEVTPSGTWLTYTGAIKLDDKDPNFKDQVILLNKHIDAYKTFPPTEPKKDKKKKADETQALPQRQKKQQTVTLLPAADLDDFSKQLQQSMSSADSTQA

SEQ ID NO: 1061 - protein, 671 aa, Artificial Sequence
  Description of Artificial Sequence: Synthetic polypeptide
MHHHHHHGGSGSPILGYWKIKGLVQPTRLLLEYLEEKYEEHLYERDEGDKWRNKKFELGLEFPNLPYYIDGDVKLTQSMAIIRYIADKHNMLGGCPKERAEISMLEGAVLDIRYGVSRIAYSKDFETLKVDFLSKLPEMLKMFEDRLCHKTYLNGDHVTHPDFMLYDALDVVLYMDPMCLDAFPKLVCFKKRIEAIPQIDKYLKSSKYIAWPLQGWQATFGGGDHPPKSDLVPRGSPGIHRDGGSGENLYFQSSDNGPQNQRNAPRITFGGPSDSTGSNQNGERSGARSKQRRPQGLPNNTASWFTALTQHGKEDLKFPRGQGVPINTNSSPDDQIGYWRRATRRIRGGDGKMKDLSPRWYFYYLGTGPEAGLPYGANKDGIIWVATEGALNTPKDHIGTRNPANNAAIVLQLPQGTTLPKGFYAEGSRGGSQASSRSSSRSRNSSRNSTPGSSRGTSPARMAGNGGDAALALLLLDRLNQLESKMSGKGQQQQGQTVTKKSAAEASKKPRQKRTATKAYNVTQAFGRRGPEQTQGNFGDQELIRQGTDYKHWPQIAQFAPSASAFFGMSRIGMEVTPSGTWLTYTGAIKLDDKDPNFKDQVILLNKHIDAYKTFPPTEPKKDKKKKADETQALPQRQKKQQTVTLLPAADLDDFSKQLQQSMSSADSTQA

SEQ ID NO: 1062 - protein, 671 aa, Artificial Sequence
  Description of Artificial Sequence: Synthetic polypeptide
MHHHHHHGGSGSPILGYWKIKGLVQPTRLLLEYLEEKYEEHLYERDEGDKWRNKKFELGLEFPNLPYYIDGDVKLTQSMAIIRYIADKHNMLGGCPKERAEISMLEGAVLDIRYGVSRIAYSKDFETLKVDFLSKLPEMLKMFEDRLCHKTYLNGDHVTHPDFMLYDALDVVLYMDPMCLDAFPKLVCFKKRIEAIPQIDKYLKSSKYIAWPLQGWQATFGGGDHPPKSDLVPRGSPGIHRDGGSGENLYFQSSDNGPQNQRNAPRITFGGPSDSTGSNQNGERSGARSKQRRPQGLPNNTASWFTALTQHGKEDLKFPRGQGVPINTNSSPDDQIGYYRRATRRIRGGDGKMKDLSPRWYFYYLGTGPEAGLPYGANKDGIIWVATEGALNTPKDHIGTRNPANNAAIVLQLPQGTTLPKGFYAEGSRGGSQASSRSSSRSRNSSRNSTPGSSRGTSPARMAGNGGDAALALLLLDRLNQLESKMSGKGQQQQGQTVTKKSAAEASKKPRQKRTATKAYNVTQAFGRRGPEQTQGNFGDKELIRQGTDYKHWPQIAQFAPSASAFFGMSRIGMEVTPSGTWLTYTGAIKLDDKDPNFKDQVILLNKHIDAYKTFPPTEPKKDKKKKADETQALPQRQKKQQTVTLLPAADLDDFSKQLQQSMSSADSTQA

SEQ ID NO: 1063 - protein, 671 aa, Artificial Sequence
  Description of Artificial Sequence: Synthetic polypeptide
MHHHHHHGGSGSPILGYWKIKGLVQPTRLLLEYLEEKYEEHLYERDEGDKWRNKKFELGLEFPNLPYYIDGDVKLTQSMAIIRYIADKHNMLGGCPKERAEISMLEGAVLDIRYGVSRIAYSKDFETLKVDFLSKLPEMLKMFEDRLCHKTYLNGDHVTHPDFMLYDALDVVLYMDPMCLDAFPKLVCFKKRIEAIPQIDKYLKSSKYIAWPLQGWQATFGGGDHPPKSDLVPRGSPGIHRDGGSGENLYFQSSDNGPQNQRNAPRITFGGPSDSTGSNQNGERSGARSKQRRPQGLPNNTLSWFTALTQHGKEDLKFPRGQGVPINTNSSPDDQIGYYRRATRRIRGGDGKMKDLSPRWYFYYLGTGPEAGLPYGANKDGIIWVATEGALNTPKDHIGTRNPANNAAIVLQLPQGTTLPKGFYAEGSRGGSQASSRSSSRSRNSSRNSTPGSSRGTSPARMAGNGGDAALALLLLDRLNQLESKMSGKGQQQQGQTVTKKSAAEASKKPRQKRTATKAYNVTQAFGRRGPEQTQGNFGDQELIRQGTDYKHWPQIAQFAPSASAFFGMSRIGMEVTPSGTWLTYTGAIKLDDKDPNFKDQVILLNKHIDAYKTFPPTEPKKDKKKKADETQALPQRQKKQQTVTLLPAADLDDFSKQLQQSMSSADSTQA

SEQ ID NO: 1064 - protein, 671 aa, Artificial Sequence
  Description of Artificial Sequence: Synthetic polypeptide
MHHHHHHGGSGSPILGYWKIKGLVQPTRLLLEYLEEKYEEHLYERDEGDKWRNKKFELGLEFPNLPYYIDGDVKLTQSMAIIRYIADKHNMLGGCPKERAEISMLEGAVLDIRYGVSRIAYSKDFETLKVDFLSKLPEMLKMFEDRLCHKTYLNGDHVTHPDFMLYDALDVVLYMDPMCLDAFPKLVCFKKRIEAIPQIDKYLKSSKYIAWPLQGWQATFGGGDHPPKSDLVPRGSPGIHRDGGSGENLYFQSSDNGPQNQRNAPRITFGGPSDSTGSNQNGERSGARSKQRRPQGLPNNTASWFTALTQHGKEDLKFPQGQGVPINTNSSPDDQIGYYRRATRRIRGGDGKMKDLSPRWYFYYLGTGPEAGLPYGANKDGIIWVATEGALNTPKDHIGTRNPANNAAIVLQLPQGTTLPKGFYAEGSRGGSQASSRSSSRSRNSSRNSTPGSSRGTSPARMAGNGGDAALALLLLDRLNQLESKMSGKGQQQQGQTVTKKSAAEASKKPRQKRTATKAYNVTQAFGRRGPEQTQGNFGDQELIRQGTDYKHWPQIAQFAPSASAFFGMSRIGMEVTPSGTWLTYTGAIKLDDKDPNFKDQVILLNKHIDAYKTFPPTEPKKDKKKKADETQALPQRQKKQQTVTLLPAADLDDFSKQLQQSMSSADSTQA

SEQ ID NO: 1065 - protein, 671 aa, Artificial Sequence
  Description of Artificial Sequence: Synthetic polypeptide
MHHHHHHGGSGSPILGYWKIKGLVQPTRLLLEYLEEKYEEHLYERDEGDKWRNKKFELGLEFPNLPYYIDGDVKLTQSMAIIRYIADKHNMLGGCPKERAEISMLEGAVLDIRYGVSRIAYSKDFETLKVDFLSKLPEMLKMFEDRLCHKTYLNGDHVTHPDFMLYDALDVVLYMDPMCLDAFPKLVCFKKRIEAIPQIDKYLKSSKYIAWPLQGWQATFGGGDHPPKSDLVPRGSPGIHRDGGSGENLYFQSSDNGPQNQRNAPRITFGGPSDSTGSNQNGERSGARSKQRRPQGLPNNTASWFTALTQHGKEDLKFPRGQGVPINTNSSPDDQIGYYRRATRRIRGGDGKMKDLNPRWYFYYLGTGPEAGLPYGANKDGIIWVATEGALNTPKDHIGTRNPANNAAIVLQLPQGTTLPKGFYAEGSRGGSQASSRSSSRSRNSSRNSTPGSSRGTSPARMAGNGGDAALALLLLDRLNQLESKMSGKGQQQQGQTVTKKSAAEASKKPRQKRTATKAYNVTQAFGRRGPEQTQGNFGDQELIRQGTDYKHWPQIAQFAPSASAFFGMSRIGMEVTPSGTWLTYTGAIKLDDKDPNFKDQVILLNKHIDAYKTFPPTEPKKDKKKKADETQALPQRQKKQQTVTLLPAADLDDFSKQLQQSMSSADSTQA

SEQ ID NO: 1066 - protein, 671 aa, Artificial Sequence
  Description of Artificial Sequence: Synthetic polypeptide
MHHHHHHGGSGSPILGYWKIKGLVQPTRLLLEYLEEKYEEHLYERDEGDKWRNKKFELGLEFPNLPYYIDGDVKLTQSMAIIRYIADKHNMLGGCPKERAEISMLEGAVLDIRYGVSRIAYSKDFETLKVDFLSKLPEMLKMFEDRLCHKTYLNGDHVTHPDFMLYDALDVVLYMDPMCLDAFPKLVCFKKRIEAIPQIDKYLKSSKYIAWPLQGWQATFGGGDHPPKSDLVPRGSPGIHRDGGSGENLYFQSSDNGPQNQRNAPRITFGGPSDSTGSNQNGERSGARSKQRRPQGLPNNTASWFTALTQHGKEDLKFPRGQGVPINTNSSPDDQIGYYRRYTRRIRGGDGKMKDLSPRWYFYYLGTGPEAGLPYGANKDGIIWVATEGALNTPKDHIGTRNPANNAAIVLQLPQGTTLPKGFYAEGSRGGSQASSRSSSRSRNSSRNSTPGSSRGTSPARMAGNGGDAALALLLLDRLNQLESKMSGKGQQQQGQTVTKKSAAEASKKPRQKRTATKAYNVTQAFGRRGPEQTQGNFGDQELIRQGTDYKHWPQIAQFAPSASAFFGMSRIGMEVTPSGTWLTYTGAIKLDDKDPNFKDQVILLNKHIDAYKTFPPTEPKKDKKKKADETQALPQRQKKQQTVTLLPAADLDDFSKQLQQSMSSADSTQA

SEQ ID NO: 1067 - protein, 671 aa, Artificial Sequence
  Description of Artificial Sequence: Synthetic polypeptide
MHHHHHHGGSGSPILGYWKIKGLVQPTRLLLEYLEEKYEEHLYERDEGDKWRNKKFELGLEFPNLPYYIDGDVKLTQSMAIIRYIADKHNMLGGCPKERAEISMLEGAVLDIRYGVSRIAYSKDFETLKVDFLSKLPEMLKMFEDRLCHKTYLNGDHVTHPDFMLYDALDVVLYMDPMCLDAFPKLVCFKKRIEAIPQIDKYLKSSKYIAWPLQGWQATFGGGDHPPKSDLVPRGSPGIHRDGGSGENLYFQSSDNGPQNQRNAPRITFGGPSDSTGSNQNGERSGARSKQRRPQGLPNNTASWFTALTQHGKEDLKFPRGQGVPINTNSSPDDQIGYYRRATRRIRGGDGKMKDLSPRWYFYYLGTGPEAGLPYGANKDGIIWVATEGALNTPKDHIGTRNPANNAAIVLQLPQGTTLPKGFYAEGSRGGSQASSRSSSRSRNSSRNSTPGSSRGTSPARMAGNGGDAALALLLLDRLNQLESKMSGKGQQQQGQTVTKKSAAEASKKPRQKRTATKAYNVTQAFGRRGPEQTQGNFGDQELTRQGTDYKHWPQIAQFAPSASAFFGMSRIGMEVTPSGTWLTYTGAIKLDDKDPNFKDQVILLNKHIDAYKTFPPTEPKKDKKKKADETQALPQRQKKQQTVTLLPAADLDDFSKQLQQSMSSADSTQA

SEQ ID NO: 1068 - protein, 671 aa, Artificial Sequence
  Description of Artificial Sequence: Synthetic polypeptide
MHHHHHHGGSGSPILGYWKIKGLVQPTRLLLEYLEEKYEEHLYERDEGDKWRNKKFELGLEFPNLPYYIDGDVKLTQSMAIIRYIADKHNMLGGCPKERAEISMLEGAVLDIRYGVSRIAYSKDFETLKVDFLSKLPEMLKMFEDRLCHKTYLNGDHVTHPDFMLYDALDVVLYMDPMCLDAFPKLVCFKKRIEAIPQIDKYLKSSKYIAWPLQGWQATFGGGDHPPKSDLVPRGSPGIHRDGGSGENLYFQSSDNGPQNQRNAPRITFGGPSDSTGSNQNGERSGARSKQRRPQGLPNNTVSWFTALTQHGKEDLKFPRGQGVPINTNSSPDDQIGYYRRATRRIRGGDGKMKDLSPRWYFYYLGTGPEAGLPYGANKDGIIWVATEGALNTPKDHIGTRNPANNAAIVLQLPQGTTLPKGFYAEGSRGGSQASSRSSSRSRNSSRNSTPGSSRGTSPARMAGNGGDAALALLLLDRLNQLESKMSGKGQQQQGQTVTKKSAAEASKKPRQKRTATKAYNVTQAFGRRGPEQTQGNFGDQELIRQGTDYKHWPQIAQFAPSASAFFGMSRIGMEVTPSGTWLTYTGAIKLDDKDPNFKDQVILLNKHIDAYKTFPPTEPKKDKKKKADETQALPQRQKKQQTVTLLPAADLDDFSKQLQQSMSSADSTQA

SEQ ID NO: 1069 - protein, 671 aa, Artificial Sequence
  Description of Artificial Sequence: Synthetic polypeptide
MHHHHHHGGSGSPILGYWKIKGLVQPTRLLLEYLEEKYEEHLYERDEGDKWRNKKFELGLEFPNLPYYIDGDVKLTQSMAIIRYIADKHNMLGGCPKERAEISMLEGAVLDIRYGVSRIAYSKDFETLKVDFLSKLPEMLKMFEDRLCHKTYLNGDHVTHPDFMLYDALDVVLYMDPMCLDAFPKLVCFKKRIEAIPQIDKYLKSSKYIAWPLQGWQATFGGGDHPPKSDLVPRGSPGIHRDGGSGENLYFQSSDNGPQNQRNAPRITFGGPSDSTGSNQNGERSGARSKQRRPQGLPNNTASWFTALTQHGKEDLKFPRGQGVPINTNSSPDDQIGYYRRATRRIRGGDGKMKDLSPRWYFYYLGTGPEAGLPYGANKDGIIWVATEGALNTPKDHIGTRNPDNNAAIVLQLPQGTTLPKGFYAEGSRGGSQASSRSSSRSRNSSRNSTPGSSRGTSPARMAGNGGDAALALLLLDRLNQLESKMSGKGQQQQGQTVTKKSAAEASKKPRQKRTATKAYNVTQAFGRRGPEQTQGNFGDQELIRQGTDYKHWPQIAQFAPSASAFFGMSRIGMEVTPSGTWLTYTGAIKLDDKDPNFKDQVILLNKHIDAYKTFPPTEPKKDKKKKADETQALPQRQKKQQTVTLLPAADLDDFSKQLQQSMSSADSTQA

SEQ ID NO: 1070 - protein, 671 aa, Artificial Sequence
  Description of Artificial Sequence: Synthetic polypeptide
MHHHHHHGGSGSPILGYWKIKGLVQPTRLLLEYLEEKYEEHLYERDEGDKWRNKKFELGLEFPNLPYYIDGDVKLTQSMAIIRYIADKHNMLGGCPKERAEISMLEGAVLDIRYGVSRIAYSKDFETLKVDFLSKLPEMLKMFEDRLCHKTYLNGDHVTHPDFMLYDALDVVLYMDPMCLDAFPKLVCFKKRIEAIPQIDKYLKSSKYIAWPLQGWQATFGGGDHPPKSDLVPRGSPGIHRDGGSGENLYFQSSDNGPQNQRNAPRITFGGPSDSTGSNQNGERSGARSKQRRPQGLPNNTASWFTALTQHGKEDLKFPRGQGVPINTNSSPDDQIGYYRRATRRIRGGDGKMKDLSPRWYFYYLGTGPEAGLPYGANKDGIIWVATEGALNTPKDHIGTRNPANNAAIVLQLPQGTTLPKGFYAEGSRGGSQASSRSSSRSRNSSRNSTPGEERGTSPARMAGNGGDAALALLLLDRLNQLESKMSGKGQQQQGQTVTKKSAAEASKKPRQKRTATKAYNVTQAFGRRGPEQTQGNFGDQELIRQGTDYKHWPQIAQFAPSASAFFGMSRIGMEVTPSGTWLTYTGAIKLDDKDPNFKDQVILLNKHIDAYKTFPPTEPKKDKKKKADETQALPQRQKKQQTVTLLPAADLDDFSKQLQQSMSSADSTQA

SEQ ID NO: 1071 - protein, 671 aa, Artificial Sequence
  Description of Artificial Sequence: Synthetic polypeptide
MHHHHHHGGSGSPILGYWKIKGLVQPTRLLLEYLEEKYEEHLYERDEGDKWRNKKFELGLEFPNLPYYIDGDVKLTQSMAIIRYIADKHNMLGGCPKERAEISMLEGAVLDIRYGVSRIAYSKDFETLKVDFLSKLPEMLKMFEDRLCHKTYLNGDHVTHPDFMLYDALDVVLYMDPMCLDAFPKLVCFKKRIEAIPQIDKYLKSSKYIAWPLQGWQATFGGGDHPPKSDLVPRGSPGIHRDGGSGENLYFQSSDNGPQNQRNAPRITFGGPSDSTGSNQNGERSGARSKQRRPQGLPNNTASWFTALTQHGKEDLKFPRGQGVPINTNSSPDDQIGYYRRATRRIRGGDGKMKDLSPRWYFYYLGTGPEAGLPYGANKDGIIWVATEGALNTPKDHIGTRNPANNAAIVLQLPQGTTLPKGFYAEGSRGGSQASSRSSSRSRNSSRNSTPGSSRGTSPARMAGNGGDAALALLLLDRLNQLESKMSGKGQQQQGQTVTKKSAAEASKKPRQKRTATKAYNVTQAFGRRGPEKTQGNFGDQELIRQGTDYKHWPQIAQFAPSASAFFGMSRIGMEVTPSGTWLTYTGAIKLDDKDPNFKDQVILLNKHIDAYKTFPPTEPKKDKKKKADETQALPQRQKKQQTVTLLPAADLDDFSKQLQQSMSSADSTQA

SEQ ID NO: 1072 - protein, 671 aa, Artificial Sequence
  Description of Artificial Sequence: Synthetic polypeptide
MHHHHHHGGSGSPILGYWKIKGLVQPTRLLLEYLEEKYEEHLYERDEGDKWRNKKFELGLEFPNLPYYIDGDVKLTQSMAIIRYIADKHNMLGGCPKERAEISMLEGAVLDIRYGVSRIAYSKDFETLKVDFLSKLPEMLKMFEDRLCHKTYLNGDHVTHPDFMLYDALDVVLYMDPMCLDAFPKLVCFKKRIEAIPQIDKYLKSSKYIAWPLQGWQATFGGGDHPPKSDLVPRGSPGIHRDGGSGENLYFQSSDNGPQNQRNAPRITFGGPSDSTGSNQNGERSGARSKQRRPQGLPNNTASWFTALTQHGKEDLKFPRGQGVPINTNSSPDDQIGYYRRATRRIRGGDGKMKDLSPRWYFYYLGTGPEAGLPYGANKDGIIWVATEGALNTPKDHIGTRNPANNAAIVLQLPQGTTLPEGFYAEGSRGGSQASSRSSSRSRNSSRNSTPGSSRGTSPARMAGNGGDAALALLLLDRLNQLESKMSGKGQQQQGQTVTKKSAAEASKKPRQKRTATKAYNVTQAFGRRGPEQTQGNFGDQELIRQGTDYKHWPQIAQFAPSASAFFGMSRIGMEVTPSGTWLTYTGAIKLDDKDPNFKDQVILLNKHIDAYKTFPPTEPKKDKKKKADETQALPQRQKKQQTVTLLPAADLDDFSKQLQQSMSSADSTQA

SEQ ID NO: 1073 - protein, 671 aa, Artificial Sequence
  Description of Artificial Sequence: Synthetic polypeptide
MHHHHHHGGSGSPILGYWKIKGLVQPTRLLLEYLEEKYEEHLYERDEGDKWRNKKFELGLEFPNLPYYIDGDVKLTQSMAIIRYIADKHNMLGGCPKERAEISMLEGAVLDIRYGVSRIAYSKDFETLKVDFLSKLPEMLKMFEDRLCHKTYLNGDHVTHPDFMLYDALDVVLYMDPMCLDAFPKLVCFKKRIEAIPQIDKYLKSSKYIAWPLQGWQATFGGGDHPPKSDLVPRGSPGIHRDGGSGENLYFQSSDNGPQNQRNAPRITFGGPSDSTGSNQNGERSGARSKQRRPQGLPNNTASWFTGLTQFGKEDLKFPPGQGVPINTNSSPDDQIGYYRRATRRIRGGDGKMKDLPPKWYFYYLGTGPHADLPYGQKHDGVFWVARPGALNTPKDHIGTRNPANNAAIPLQLPPGTKLPKGFYAEGSRGGSQASSRSSSRSRNSSRNSTPGSSRGTSPARMAGNGGDAALALLLLDRLNQLESKMSGKGQQQQGQTVTKKSAAEASKKPRQKRTATKAYNVTQAFGRRGPEQTQGNFGDQELIRQGTDYKHWPQIAQFAPSASAFFGMSRIGMEVTPSGTWLTYTGAIKLDDKDPNFKDQVILLNKHIDAYKTFPPTEPKKDKKKKADETQALPQRQKKQQTVTLLPAADLDDFSKQLQQSMSSADSTQA

SEQ ID NO: 1074 - protein, 671 aa, Artificial Sequence
  Description of Artificial Sequence: Synthetic polypeptide
MHHHHHHGGSGSPILGYWKIKGLVQPTRLLLEYLEEKYEEHLYERDEGDKWRNKKFELGLEFPNLPYYIDGDVKLTQSMAIIRYIADKHNMLGGCPKERAEISMLEGAVLDIRYGVSRIAYSKDFETLKVDFLSKLPEMLKMFEDRLCHKTYLNGDHVTHPDFMLYDALDVVLYMDPMCLDAFPKLVCFKKRIEAIPQIDKYLKSSKYIAWPLQGWQATFGGGDHPPKSDLVPRGSPGIHRDGGSGENLYFQSSDNGPQNQRNAPRITFGGPSDSTGSNQNGERSGARSKQRRPQGLPNNTASWFTALTQHGKEDLKFPRGQGVPINTNSSPDDQIGYYRRATRRIRGGDGKMKDLSPRWYFYYLGTGPEAGLPYGANKDGIIWVATEGALNTPKDHIGTRNPANNAAIVLQLPQGTTLPKGFYAEGSRGGSQASSRSSSRSRNSSRNSTPGSSRGTSPARMAGNGGDAALALLLLDRLNQLESKMSGKGQQQQGQTVTKKSAAEASKKPRQKRTATKAYNVTQAFGRRGPEQTQGNFGDQELIRQGTDYKHWPQIAQFAPSASAFFGMSRIGMEVSPSGTWLTYTGAIKLDDKDPNFKDQVILLNKHIDAYKTFPPTEPKKDKKKKADETQALPQRQKKQQTVTLLPAADLDDFSKQLQQSMSSADSTQA

SEQ ID NO: 1075 - protein, 671 aa, Artificial Sequence
  Description of Artificial Sequence: Synthetic polypeptide
MHHHHHHGGSGSPILGYWKIKGLVQPTRLLLEYLEEKYEEHLYERDEGDKWRNKKFELGLEFPNLPYYIDGDVKLTQSMAIIRYIADKHNMLGGCPKERAEISMLEGAVLDIRYGVSRIAYSKDFETLKVDFLSKLPEMLKMFEDRLCHKTYLNGDHVTHPDFMLYDALDVVLYMDPMCLDAFPKLVCFKKRIEAIPQIDKYLKSSKYIAWPLQGWQATFGGGDHPPKSDLVPRGSPGIHRDGGSGENLYFQSSDNGPQNQRNAPRITFGGPSDSTGSNQNGERSGARSKQRRPQGLPNNTASWFTALTQHGKEDLKFPRGQGVPINTNSSPDDQIGYYRRATRRIRGGDGKMKDLSPRWYFYYLGTGPEAGLPYGANKDGIIWVATEGALNTPKDHIGTRNPANNAAIVLQLPQGTTLPKGFYAEGSRGGSQASSRSSSRSRNSSRNSTPGSSRGTSPARMAGNGGDAALALLLLDRLNQLESKMSGKGQQQQGQTVTKKSAAEASKKPRQKRTATKAYNVTQAFGRRGPEQTQGNFGDQELIRQGTDYKHWPQIAQFAPSASAFFGMSQIGMEVTPSGTWLTYTGAIKLDDKDPNFKDQVILLNKHIDAYKTFPPTEPKKDKKKKADETQALPQRQKKQQTVTLLPAADLDDFSKQLQQSMSSADSTQA

SEQ ID NO: 1076 - protein, 671 aa, Artificial Sequence
  Description of Artificial Sequence: Synthetic polypeptide
MHHHHHHGGSGSPILGYWKIKGLVQPTRLLLEYLEEKYEEHLYERDEGDKWRNKKFELGLEFPNLPYYIDGDVKLTQSMAIIRYIADKHNMLGGCPKERAEISMLEGAVLDIRYGVSRIAYSKDFETLKVDFLSKLPEMLKMFEDRLCHKTYLNGDHVTHPDFMLYDALDVVLYMDPMCLDAFPKLVCFKKRIEAIPQIDKYLKSSKYIAWPLQGWQATFGGGDHPPKSDLVPRGSPGIHRDGGSGENLYFQSSDNGPQNQRNAPRITFGGPSDSTGSNQNGERSGARSKQRRPQGLPNNTASWFTALTQHGKEDLKFPRGQGVPINTNSSPDDQIGYYRRATRRIRGGDGKMKDLSPRWYFYYLGTGPEAGLPYGANKAGIIWVATEGALNTPKDHIGTRNPANNAAIVLQLPQGTTLPKGFYAEGSRGGSQASSRSSSRSRNSSRNSTPGSSRGTSPARMAGNGGDAALALLLLDRLNQLESKMSGKGQQQQGQTVTKKSAAEASKKPRQKRTATKAYNVTQAFGRRGPEQTQGNFGDQELIRQGTDYKHWPQIAQFAPSASAFFGMSRIGMEVTPSGTWLTYTGAIKLDDKDPNFKDQVILLNKHIDAYKTFPPTEPKKDKKKKADETQALPQRQKKQQTVTLLPAADLDDFSKQLQQSMSSADSTQA

SEQ ID NO: 1077 - protein, 671 aa, Artificial Sequence
  Description of Artificial Sequence: Synthetic polypeptide
MHHHHHHGGSGSPILGYWKIKGLVQPTRLLLEYLEEKYEEHLYERDEGDKWRNKKFELGLEFPNLPYYIDGDVKLTQSMAIIRYIADKHNMLGGCPKERAEISMLEGAVLDIRYGVSRIAYSKDFETLKVDFLSKLPEMLKMFEDRLCHKTYLNGDHVTHPDFMLYDALDVVLYMDPMCLDAFPKLVCFKKRIEAIPQIDKYLKSSKYIAWPLQGWQATFGGGDHPPKSDLVPRGSPGIHRDGGSGENLYFQSSDNGPQNQRNAPRITFGGPSDSTGSNQNGERSGARSKQRRPQGLPNNTASWFTALTQHGKEDLKFPRGQGVPINTNSSPDDQIGYYRRATRRIRGGDGKMKDLSPRWYFYYLGTGPEAGLPYGANKDGIIWVATEGALNTPKDHIGTRNPANNAAIVLQLPQGTTPPKGFYAEGSRGGSQASSRSSSRSRNSSRNSTPGSSRGTSPARMAGNGGDAALALLLLDRLNQLESKMSGKGQQQQGQTVTKKSAAEASKKPRQKRTATKAYNVTQAFGRRGPEQTQGNFGDQELIRQGTDYKHWPQIAQFAPSASAFFGMSRIGMEVTPSGTWLTYTGAIKLDDKDPNFKDQVILLNKHIDAYKTFPPTEPKKDKKKKADETQALPQRQKKQQTVTLLPAADLDDFSKQLQQSMSSADSTQA

SEQ ID NO: 1078 - protein, 671 aa, Artificial Sequence
  Description of Artificial Sequence: Synthetic polypeptide
MHHHHHHGGSGSPILGYWKIKGLVQPTRLLLEYLEEKYEEHLYERDEGDKWRNKKFELGLEFPNLPYYIDGDVKLTQSMAIIRYIADKHNMLGGCPKERAEISMLEGAVLDIRYGVSRIAYSKDFETLKVDFLSKLPEMLKMFEDRLCHKTYLNGDHVTHPDFMLYDALDVVLYMDPMCLDAFPKLVCFKKRIEAIPQIDKYLKSSKYIAWPLQGWQATFGGGDHPPKSDLVPRGSPGIHRDGGSGENLYFQSSDNGPQNQRNAPRITFGGPSDSTGSNQNGERSGARSKQRRPQGLPNNTASWFTPLTQHGKEDLKFPPGQGVPINTNSSPDDQIGYYRRATRRIRGGDGKMKDLPPRWYFYYLGTGPEADLPYGAVKDGIVWVAAEGALNTPKDHIGTRNPANNAAIPLQLPPGTTLPKGFYAEGSRGGSQASSRSSSRSRNSSRNSTPGSSRGTSPARMAGNGGDAALALLLLDRLNQLESKMSGKGQQQQGQTVTKKSAAEASKKPRQKRTATKAYNVTQAFGRRGPEQTQGNFGDQELIRQGTDYKHWPQIAQFAPSASAFFGMSRIGMEVTPSGTWLTYTGAIKLDDKDPNFKDQVILLNKHIDAYKTFPPTEPKKDKKKKADETQALPQRQKKQQTVTLLPAADLDDFSKQLQQSMSSADSTQA

SEQ ID NO: 1079 - protein, 671 aa, Artificial Sequence
  Description of Artificial Sequence: Synthetic polypeptide
MHHHHHHGGSGSPILGYWKIKGLVQPTRLLLEYLEEKYEEHLYERDEGDKWRNKKFELGLEFPNLPYYIDGDVKLTQSMAIIRYIADKHNMLGGCPKERAEISMLEGAVLDIRYGVSRIAYSKDFETLKVDFLSKLPEMLKMFEDRLCHKTYLNGDHVTHPDFMLYDALDVVLYMDPMCLDAFPKLVCFKKRIEAIPQIDKYLKSSKYIAWPLQGWQATFGGGDHPPKSDLVPRGSPGIHRDGGSGENLYFQSSDNGPQNQRNAPRITFGGPSDSTGSNQNGERSGARSKQRRPQGLPNNTASWFTPLTQHGKEDLKFPPGQGVPINTNSSPDDQIGYYRRATRRIRGGDGKMKDLPPRWYFYYLGTGPEADLPYGQVKPGIVWVAEEGALNTPKDHIGTRNPANNAAIPLQLPPGTTLPKGFYAEGSRGGSQASSRSSSRSRNSSRNSTPGSSRGTSPARMAGNGGDAALALLLLDRLNQLESKMSGKGQQQQGQTVTKKSAAEASKKPRQKRTATKAYNVTQAFGRRGPEQTQGNFGDQELIRQGTDYKHWPQIAQFAPSASAFFGMSRIGMEVTPSGTWLTYTGAIKLDDKDPNFKDQVILLNKHIDAYKTFPPTEPKKDKKKKADETQALPQRQKKQQTVTLLPAADLDDFSKQLQQSMSSADSTQA

SEQ ID NO: 1080 - protein, 671 aa, Artificial Sequence
  Description of Artificial Sequence: Synthetic polypeptide
MHHHHHHGGSGSPILGYWKIKGLVQPTRLLLEYLEEKYEEHLYERDEGDKWRNKKFELGLEFPNLPYYIDGDVKLTQSMAIIRYIADKHNMLGGCPKERAEISMLEGAVLDIRYGVSRIAYSKDFETLKVDFLSKLPEMLKMFEDRLCHKTYLNGDHVTHPDFMLYDALDVVLYMDPMCLDAFPKLVCFKKRIEAIPQIDKYLKSSKYIAWPLQGWQATFGGGDHPPKSDLVPRGSPGIHRDGGSGENLYFQSSDNGPQNQRNAPRITFGGPSDSTGSNQNGERSGARSKQRRPQGLPNNTASWFTPLTQFGKEDLKFPPGQGVPINTNSSPDDQIGYYRRATRRIRGGDGKMKDLPPKWYFYYLGTGPHADLPYGQKKDGVVWVARPGALNTPKDHIGTRNPANNAAIPLQLPPGTKLPKGFYAEGSRGGSQASSRSSSRSRNSSRNSTPGSSRGTSPARMAGNGGDAALALLLLDRLNQLESKMSGKGQQQQGQTVTKKSAAEASKKPRQKRTATKAYNVTQAFGRRGPEQTQGNFGDQELIRQGTDYKHWPQIAQFAPSASAFFGMSRIGMEVTPSGTWLTYTGAIKLDDKDPNFKDQVILLNKHIDAYKTFPPTEPKKDKKKKADETQALPQRQKKQQTVTLLPAADLDDFSKQLQQSMSSADSTQA

SEQ ID NO: 1081 - protein, 671 aa, Artificial Sequence
  Description of Artificial Sequence: Synthetic polypeptide
MHHHHHHGGSGSPILGYWKIKGLVQPTRLLLEYLEEKYEEHLYERDEGDKWRNKKFELGLEFPNLPYYIDGDVKLTQSMAIIRYIADKHNMLGGCPKERAEISMLEGAVLDIRYGVSRIAYSKDFETLKVDFLSKLPEMLKMFEDRLCHKTYLNGDHVTHPDFMLYDALDVVLYMDPMCLDAFPKLVCFKKRIEAIPQIDKYLKSSKYIAWPLQGWQATFGGGDHPPKSDLVPRGSPGIHRDGGSGENLYFQSSDNGPQNQRNAPRITFGGPSDSTGSNQNGERSGARSKQRRPQGLPNNTASWFTALTQHGKEDLKFPRGQGVPINTNSSPDDQIGYYRRATRRIRGGDGKMKDLSPRWYFYYLGTGPEAGLPYGANKDGIIWVATEGALNTPKDHIGTRNPANNAAIVLQLPQGTTLPKGFYAEGSRGGSQASSRSSSRSRNSSRNSTPGSSRGTSPARMAGNGGDAALALLLLDRLNQLESKMSGKGQQQQGQTVTKKSAAEASKKPRQKRTATKAYNVTQAFGRRGPEQTQGNFGDQELIRQGTDYKHWPQIAQFAPSASAFFGMSRIGMEVTPSGTWLTYTGAIKLDDNDPNFKDQVILLNKHIDAYKTFPPTEPKKDKKKKADETQALPQRQKKQQTVTLLPAADLDDFSKQLQQSMSSADSTQA

SEQ ID NO: 1082 - protein, 671 aa, Artificial Sequence
  Description of Artificial Sequence: Synthetic polypeptide
MHHHHHHGGSGSPILGYWKIKGLVQPTRLLLEYLEEKYEEHLYERDEGDKWRNKKFELGLEFPNLPYYIDGDVKLTQSMAIIRYIADKHNMLGGCPKERAEISMLEGAVLDIRYGVSRIAYSKDFETLKVDFLSKLPEMLKMFEDRLCHKTYLNGDHVTHPDFMLYDALDVVLYMDPMCLDAFPKLVCFKKRIEAIPQIDKYLKSSKYIAWPLQGWQATFGGGDHPPKSDLVPRGSPGIHRDGGSGENLYFQSSDNGPQNQRNAPRITFGGPSDSTGSNQNGERSGARSKQRRPQGLPNNTASWFTALTQHGKEDLKFPAGQGVPINTNSSPDDQIGYYRRATRRIRGGDGKMKDLSPRWYFYYLGTGPEAGLPYGANKDGIIWVATEGALNTPKDHIGTRNPANNAAIVLQLPQGTTLPKGFYAEGSRGGSQASSRSSSRSRNSSRNSTPGSSRGTSPARMAGNGGDAALALLLLDRLNQLESKMSGKGQQQQGQTVTKKSAAEASKKPRQKRTATKAYNVTQAFGRRGPEQTQGNFGDQELIRQGTDYKHWPQIAQFAPSASAFFGMSRIGMEVTPSGTWLTYTGAIKLDDKDPNFKDQVILLNKHIDAYKTFPPTEPKKDKKKKADETQALPQRQKKQQTVTLLPAADLDDFSKQLQQSMSSADSTQA

SEQ ID NO: 1083 - protein, 671 aa, Artificial Sequence
  Description of Artificial Sequence: Synthetic polypeptide
MHHHHHHGGSGSPILGYWKIKGLVQPTRLLLEYLEEKYEEHLYERDEGDKWRNKKFELGLEFPNLPYYIDGDVKLTQSMAIIRYIADKHNMLGGCPKERAEISMLEGAVLDIRYGVSRIAYSKDFETLKVDFLSKLPEMLKMFEDRLCHKTYLNGDHVTHPDFMLYDALDVVLYMDPMCLDAFPKLVCFKKRIEAIPQIDKYLKSSKYIAWPLQGWQATFGGGDHPPKSDLVPRGSPGIHRDGGSGENLYFQSSDNGPQNQRNAPRITFGGPSDSTGSNQNGERSGARSKQRRPQGLPNNTASWFTGLTQHGKEDLKFPPGQGVPINTNSSPDDQIGYYRRATRRIRGGDGKMKDLPPRWYFYYLGTGPEADLPYGQVKDGIFWVAAEGALNTPKDHIGTRNPANNAAIPLQLPPGTTLPKGFYAEGSRGGSQASSRSSSRSRNSSRNSTPGSSRGTSPARMAGNGGDAALALLLLDRLNQLESKMSGKGQQQQGQTVTKKSAAEASKKPRQKRTATKAYNVTQAFGRRGPEQTQGNFGDQELIRQGTDYKHWPQIAQFAPSASAFFGMSRIGMEVTPSGTWLTYTGAIKLDDKDPNFKDQVILLNKHIDAYKTFPPTEPKKDKKKKADETQALPQRQKKQQTVTLLPAADLDDFSKQLQQSMSSADSTQA

SEQ ID NO: 1084 - protein, 671 aa, Artificial Sequence
  Description of Artificial Sequence: Synthetic polypeptide
MHHHHHHGGSGSPILGYWKIKGLVQPTRLLLEYLEEKYEEHLYERDEGDKWRNKKFELGLEFPNLPYYIDGDVKLTQSMAIIRYIADKHNMLGGCPKERAEISMLEGAVLDIRYGVSRIAYSKDFETLKVDFLSKLPEMLKMFEDRLCHKTYLNGDHVTHPDFMLYDALDVVLYMDPMCLDAFPKLVCFKKRIEAIPQIDKYLKSSKYIAWPLQGWQATFGGGDHPPKSDLVPRGSPGIHRDGGSGENLYFQSSDNGPQNQRNAPRITFGGPSDSTGSNQNGERSGARSKQRRPQGLPNNTASWFTALTQHGKEDLKFPRGQGVPINTNSSPDDQIGYYRRATRRIRGGDGKMKDLSPRWYFYYLGTGPEAGLPYGANKDGIIWVATEGALNTPKDHIGTRNPANNAAIVLQLPQGTTLPKGFYAEGSRGGSQASSRSSSRSRNSSRNSTPGSSRGTSPARMAGNGGDAALALLLLDRLNQLESKMSGKGQQQQGQTVTKKSAAEASKKPRQKRTATKAYNVTQAFGRRGPEQTQGNFGDQELLRQGTDYKHWPQIAQFAPSASAFFGMSRIGMEVTPSGTWLTYTGAIKLDDKDPNFKDQVILLNKHIDAYKTFPPTEPKKDKKKKADETQALPQRQKKQQTVTLLPAADLDDFSKQLQQSMSSADSTQA

SEQ ID NO: 1085 - protein, 671 aa, Artificial Sequence
  Description of Artificial Sequence: Synthetic polypeptide
MHHHHHHGGSGSPILGYWKIKGLVQPTRLLLEYLEEKYEEHLYERDEGDKWRNKKFELGLEFPNLPYYIDGDVKLTQSMAIIRYIADKHNMLGGCPKERAEISMLEGAVLDIRYGVSRIAYSKDFETLKVDFLSKLPEMLKMFEDRLCHKTYLNGDHVTHPDFMLYDALDVVLYMDPMCLDAFPKLVCFKKRIEAIPQIDKYLKSSKYIAWPLQGWQATFGGGDHPPKSDLVPRGSPGIHRDGGSGENLYFQSSDNGPQNQRNAPRITFGGPSDSTGSNQNGERSGARSKQRRPQGLPNNTASWFTALTQHGKEDLKFPRGQGVPINTNSSPDDQIGYYRRATRRIRGGDGKMKDLSPRWAFYYLGTGPEAGLPYGANKDGIIWVATEGALNTPKDHIGTRNPANNAAIVLQLPQGTTLPKGFYAEGSRGGSQASSRSSSRSRNSSRNSTPGSSRGTSPARMAGNGGDAALALLLLDRLNQLESKMSGKGQQQQGQTVTKKSAAEASKKPRQKRTATKAYNVTQAFGRRGPEQTQGNFGDQELIRQGTDYKHWPQIAQFAPSASAFFGMSRIGMEVTPSGTWLTYTGAIKLDDKDPNFKDQVILLNKHIDAYKTFPPTEPKKDKKKKADETQALPQRQKKQQTVTLLPAADLDDFSKQLQQSMSSADSTQA

SEQ ID NO: 1086 - protein, 671 aa, Artificial Sequence
  Description of Artificial Sequence: Synthetic polypeptide
MHHHHHHGGSGSPILGYWKIKGLVQPTRLLLEYLEEKYEEHLYERDEGDKWRNKKFELGLEFPNLPYYIDGDVKLTQSMAIIRYIADKHNMLGGCPKERAEISMLEGAVLDIRYGVSRIAYSKDFETLKVDFLSKLPEMLKMFEDRLCHKTYLNGDHVTHPDFMLYDALDVVLYMDPMCLDAFPKLVCFKKRIEAIPQIDKYLKSSKYIAWPLQGWQATFGGGDHPPKSDLVPRGSPGIHRDGGSGENLYFQSSDNGPQNQRNAPRITFGGPSDSTGSNQNGERSGARSKQRRPQGLPNNTASWFTALTQHGKEDLKFPRGQGVPINTNSSPDDQIGYYRRATRRIRGGDGKMKDLSPRWYFYYLGTGPEAGLPYGANKDGIIWVATEGALNTPKDHIGTRNPANNSAIVLQLPQGTTLPKGFYAEGSRGGSQASSRSSSRSRNSSRNSTPGSSRGTSPARMAGNGGDAALALLLLDRLNQLESKMSGKGQQQQGQTVTKKSAAEASKKPRQKRTATKAYNVTQAFGRRGPEQTQGNFGDQELIRQGTDYKHWPQIAQFAPSASAFFGMSRIGMEVTPSGTWLTYTGAIKLDDKDPNFKDQVILLNKHIDAYKTFPPTEPKKDKKKKADETQALPQRQKKQQTVTLLPAADLDDFSKQLQQSMSSADSTQA

SEQ ID NO: 1087 - protein, 671 aa, Artificial Sequence
  Description of Artificial Sequence: Synthetic polypeptide
MHHHHHHGGSGSPILGYWKIKGLVQPTRLLLEYLEEKYEEHLYERDEGDKWRNKKFELGLEFPNLPYYIDGDVKLTQSMAIIRYIADKHNMLGGCPKERAEISMLEGAVLDIRYGVSRIAYSKDFETLKVDFLSKLPEMLKMFEDRLCHKTYLNGDHVTHPDFMLYDALDVVLYMDPMCLDAFPKLVCFKKRIEAIPQIDKYLKSSKYIAWPLQGWQATFGGGDHPPKSDLVPRGSPGIHRDGGSGENLYFQSSDNGPQNQRNAPRITFGGPSDSTGSNQNGERSGARSKQRRPQGLPNNTASWFTALTQHGKEDLKFPRGQGVPINTNSSPDDQIGYYRRATRRIRGGDGKMKDLSPRWYFYYLGTGPEAGLPYGANKDGIIWVATEGALNTPKDHIGTRNPANNAAIVLQLPKGTTLPKGFYAEGSRGGSQASSRSSSRSRNSSRNSTPGSSRGTSPARMAGNGGDAALALLLLDRLNQLESKMSGKGQQQQGQTVTKKSAAEASKKPRQKRTATKAYNVTQAFGRRGPEQTQGNFGDQELIRQGTDYKHWPQIAQFAPSASAFFGMSRIGMEVTPSGTWLTYTGAIKLDDKDPNFKDQVILLNKHIDAYKTFPPTEPKKDKKKKADETQALPQRQKKQQTVTLLPAADLDDFSKQLQQSMSSADSTQA

SEQ ID NO: 1088 - protein, 671 aa, Artificial Sequence
  Description of Artificial Sequence: Synthetic polypeptide
MHHHHHHGGSGSPILGYWKIKGLVQPTRLLLEYLEEKYEEHLYERDEGDKWRNKKFELGLEFPNLPYYIDGDVKLTQSMAIIRYIADKHNMLGGCPKERAEISMLEGAVLDIRYGVSRIAYSKDFETLKVDFLSKLPEMLKMFEDRLCHKTYLNGDHVTHPDFMLYDALDVVLYMDPMCLDAFPKLVCFKKRIEAIPQIDKYLKSSKYIAWPLQGWQATFGGGDHPPKSDLVPRGSPGIHRDGGSGENLYFQSSDNGPQNQRNAPRITFGGPSDSTGSNQNGERSGARSKQRRPQGLPNNTASWFTALTQHGKEDLKFPRGQGVPINTNSSPDDQIGYYRRATRRIRGGDGKMKDLSPRWYFYYLGTGPEAGLPYGANKDGITWVATEGALNTPKDHIGTRNPANNAAIVLQLPQGTTLPKGFYAEGSRGGSQASSRSSSRSRNSSRNSTPGSSRGTSPARMAGNGGDAALALLLLDRLNQLESKMSGKGQQQQGQTVTKKSAAEASKKPRQKRTATKAYNVTQAFGRRGPEQTQGNFGDQELIRQGTDYKHWPQIAQFAPSASAFFGMSRIGMEVTPSGTWLTYTGAIKLDDKDPNFKDQVILLNKHIDAYKTFPPTEPKKDKKKKADETQALPQRQKKQQTVTLLPAADLDDFSKQLQQSMSSADSTQA

SEQ ID NO: 1089 - protein, 671 aa, Artificial Sequence
  Description of Artificial Sequence: Synthetic polypeptide
MHHHHHHGGSGSPILGYWKIKGLVQPTRLLLEYLEEKYEEHLYERDEGDKWRNKKFELGLEFPNLPYYIDGDVKLTQSMAIIRYIADKHNMLGGCPKERAEISMLEGAVLDIRYGVSRIAYSKDFETLKVDFLSKLPEMLKMFEDRLCHKTYLNGDHVTHPDFMLYDALDVVLYMDPMCLDAFPKLVCFKKRIEAIPQIDKYLKSSKYIAWPLQGWQATFGGGDHPPKSDLVPRGSPGIHRDGGSGENLYFQSSDNGPQNQRNAPRITFGGPSDSTGSNQNGERSGARSKQRRPQGLPNNTASWFTALTQHGKEDLKFPRGQGVPINTNSSPDDQIGYYRRATRRIRGGDGKMKDLSPRWYFYYLGTGPEAGLPYGANKDGIIWVATEGALNTPKDHIGTRNPANNAAWVLQLPQGTTLPKGFYAEGSRGGSQASSRSSSRSRNSSRNSTPGSSRGTSPARMAGNGGDAALALLLLDRLNQLESKMSGKGQQQQGQTVTKKSAAEASKKPRQKRTATKAYNVTQAFGRRGPEQTQGNFGDQELIRQGTDYKHWPQIAQFAPSASAFFGMSRIGMEVTPSGTWLTYTGAIKLDDKDPNFKDQVILLNKHIDAYKTFPPTEPKKDKKKKADETQALPQRQKKQQTVTLLPAADLDDFSKQLQQSMSSADSTQA

SEQ ID NO: 1090 - protein, 671 aa, Artificial Sequence
  Description of Artificial Sequence: Synthetic polypeptide
MHHHHHHGGSGSPILGYWKIKGLVQPTRLLLEYLEEKYEEHLYERDEGDKWRNKKFELGLEFPNLPYYIDGDVKLTQSMAIIRYIADKHNMLGGCPKERAEISMLEGAVLDIRYGVSRIAYSKDFETLKVDFLSKLPEMLKMFEDRLCHKTYLNGDHVTHPDFMLYDALDVVLYMDPMCLDAFPKLVCFKKRIEAIPQIDKYLKSSKYIAWPLQGWQATFGGGDHPPKSDLVPRGSPGIHRDGGSGENLYFQSSDNGPQNQRNAPRITFGGPSDSTGSNQNGERSGARSKQRRPQGLPNNTASWFTALTQHGKEDLKFPRGQGVPINTNSSPDDQIGYYRRATRRIRGGDGKMKDLSPRWYFYYLGTGPEAGLPYGANKDGIIWVATEGALNTPKDHIGTRNPANNAAIVLQLPQGTTLPKGFYCEGSRGGSQASSRSSSRSRNSSRNSTPGSSRGTSPARMAGNGGDAALALLLLDRLNQLESKMSGKGQQQQGQTVTKKSAAEASKKPRQKRTATKAYNVTQAFGRRGPEQTQGNFGDQELIRQGTDYKHWPQIAQFAPSASAFFGMSRIGMEVTPSGTWLTYTGAIKLDDKDPNFKDQVILLNKHIDAYKTFPPTEPKKDKKKKADETQALPQRQKKQQTVTLLPAADLDDFSKQLQQSMSSADSTQA

SEQ ID NO: 1091 - protein, 671 aa, Artificial Sequence
  Description of Artificial Sequence: Synthetic polypeptide
MHHHHHHGGSGSPILGYWKIKGLVQPTRLLLEYLEEKYEEHLYERDEGDKWRNKKFELGLEFPNLPYYIDGDVKLTQSMAIIRYIADKHNMLGGCPKERAEISMLEGAVLDIRYGVSRIAYSKDFETLKVDFLSKLPEMLKMFEDRLCHKTYLNGDHVTHPDFMLYDALDVVLYMDPMCLDAFPKLVCFKKRIEAIPQIDKYLKSSKYIAWPLQGWQATFGGGDHPPKSDLVPRGSPGIHRDGGSGENLYFQSSDNGPQNQRNAPRITFGGPSDSTGSNQNGERSGARSKQRRPQGLPNNTASWFTALTQHGKEDLKFPRGQGVPINTNSSPDDQIGYYRRATRRIRGGDGKMKDLSPRWYFYYLGTGPEAGLPYGAQKDGIIWVATEGALNTPKDHIGTRNPANNAAIVLQLPQGTTLPKGFYAEGSRGGSQASSRSSSRSRNSSRNSTPGSSRGTSPARMAGNGGDAALALLLLDRLNQLESKMSGKGQQQQGQTVTKKSAAEASKKPRQKRTATKAYNVTQAFGRRGPEQTQGNFGDQELIRQGTDYKHWPQIAQFAPSASAFFGMSRIGMEVTPSGTWLTYTGAIKLDDKDPNFKDQVILLNKHIDAYKTFPPTEPKKDKKKKADETQALPQRQKKQQTVTLLPAADLDDFSKQLQQSMSSADSTQA

SEQ ID NO: 1092 - protein, 671 aa, Artificial Sequence
  Description of Artificial Sequence: Synthetic polypeptide
MHHHHHHGGSGSPILGYWKIKGLVQPTRLLLEYLEEKYEEHLYERDEGDKWRNKKFELGLEFPNLPYYIDGDVKLTQSMAIIRYIADKHNMLGGCPKERAEISMLEGAVLDIRYGVSRIAYSKDFETLKVDFLSKLPEMLKMFEDRLCHKTYLNGDHVTHPDFMLYDALDVVLYMDPMCLDAFPKLVCFKKRIEAIPQIDKYLKSSKYIAWPLQGWQATFGGGDHPPKSDLVPRGSPGIHRDGGSGENLYFQSSDNGPQNQRNAPRITFGGPSDSTGSNQNGERSGARSKQRRPQGLPNNTASWFTALTQHGKEDLKFPRGQGVPINTNSSPDDQIGYYRRATRRIRGGDGKMKDLSPRWYFYYLGTGPEAGLPYGANKDGIIWVATEGALNTPKDHIGTRNPANNAAIVLQLPQGTTLPKGFYAEGSRGGSQASSRSSSRSRNSSRNSTPGSSRGTSPARMAGNGGDAALALLLLDRLNQLESKMSGKGQQQQGQTVTKKSAAEASKKPRQKRTATKAYNVTQAFGRRGPEQTQGNFGDQELIRQGTDYKHWPQIAQFAPSASAFFGMSRIGMEVTPSGTWLTYTGAIKLDDKDPNFLDQVILLNKHIDAYKTFPPTEPKKDKKKKADETQALPQRQKKQQTVTLLPAADLDDFSKQLQQSMSSADSTQA

SEQ ID NO: 1093 - protein, 671 aa, Artificial Sequence
  Description of Artificial Sequence: Synthetic polypeptide
MHHHHHHGGSGSPILGYWKIKGLVQPTRLLLEYLEEKYEEHLYERDEGDKWRNKKFELGLEFPNLPYYIDGDVKLTQSMAIIRYIADKHNMLGGCPKERAEISMLEGAVLDIRYGVSRIAYSKDFETLKVDFLSKLPEMLKMFEDRLCHKTYLNGDHVTHPDFMLYDALDVVLYMDPMCLDAFPKLVCFKKRIEAIPQIDKYLKSSKYIAWPLQGWQATFGGGDHPPKSDLVPRGSPGIHRDGGSGENLYFQSSDNGPQNQRNAPRITFGGPSDSTGSNQNGERSGARSKQRRPQGLPNNTASWFTALTQHGKEDLKFPRGQGVPINTNSSPDDQIGYYRRATRRIRGGDGKMKDLSPRWYFYYLGTGPEAGLPYGANKDGIIWVATEGALNTPKDHIGTRNPANNAAIVLQLPQGTTLPKGFYAEGSRGGSQASSRSSSRSRNSSRNSTPGSSRGTSPARMAGNGGDAALALLLLDRLNQLESKMSGKGQQQQGQTVTKKSAAEASKKPRQKRTATKAYNVTQAFGRRGPEQTQGNFGDQELIRQGTDYKHWPQIAQFAPSASAFFGMSRIGMEVTPSGTWLTYTGAIKLDDKDPNFQDQVILLNKHIDAYKTFPPTEPKKDKKKKADETQALPQRQKKQQTVTLLPAADLDDFSKQLQQSMSSADSTQA

SEQ ID NO: 1094 - protein, 671 aa, Artificial Sequence
  Description of Artificial Sequence: Synthetic polypeptide
MHHHHHHGGSGSPILGYWKIKGLVQPTRLLLEYLEEKYEEHLYERDEGDKWRNKKFELGLEFPNLPYYIDGDVKLTQSMAIIRYIADKHNMLGGCPKERAEISMLEGAVLDIRYGVSRIAYSKDFETLKVDFLSKLPEMLKMFEDRLCHKTYLNGDHVTHPDFMLYDALDVVLYMDPMCLDAFPKLVCFKKRIEAIPQIDKYLKSSKYIAWPLQGWQATFGGGDHPPKSDLVPRGSPGIHRDGGSGENLYFQSSDNGPQNQRNAPRITFGGPSDSTGSNQNGERSGARSKQRRPQGLPNNTASWFTALTQHGKEDLKFPRGQGVPINTNSSPDDQIGYYRRATRRIRGGDGKMKDLSPRWYFYYLGTGPEAGLPYGANKDGIIWVATEGALNTPKDHIGTRNPANNAAIVLQLPQGTTLPKGFYAEGSRGGSQASSRSSSRSRNSSRNSTPGSSRGTSPARMAGNGGDAALALLLLDRLNQLESKMSGKGQQQQGQTVTKKSAAEASKKPRQKRTATKAYNVTQAFGRRGPEQTQGNFGDQELIRQGTDYKHWPQIAQFAPSASAFFGMSRIGMEVTPSGTWLTYTGAIKLDDSDPNFKDQVILLNKHIDAYKTFPPTEPKKDKKKKADETQALPQRQKKQQTVTLLPAADLDDFSKQLQQSMSSADSTQA

SEQ ID NO: 1095 - protein, 671 aa, Artificial Sequence
  Description of Artificial Sequence: Synthetic polypeptide
MHHHHHHGGSGSPILGYWKIKGLVQPTRLLLEYLEEKYEEHLYERDEGDKWRNKKFELGLEFPNLPYYIDGDVKLTQSMAIIRYIADKHNMLGGCPKERAEISMLEGAVLDIRYGVSRIAYSKDFETLKVDFLSKLPEMLKMFEDRLCHKTYLNGDHVTHPDFMLYDALDVVLYMDPMCLDAFPKLVCFKKRIEAIPQIDKYLKSSKYIAWPLQGWQATFGGGDHPPKSDLVPRGSPGIHRDGGSGENLYFQSSDNGPQNQRNAPRITFGGPSDSTGSNQNGERSGARSKQRRPQGLPNNTASWFTALTQHGKEDLKFPRGQGVPINTNSSPDDQIGYYRRATRRIRGGDGKMKDLSPRWYFYYLGTGPEAGLPYGANKDGIIWVATEGALNTPKDHIGTRNPANNAAIVLQLPQGTTLPKGFYAEGSRGGSQASSRSSSRSRNSSRNSTPGSSRGTSPARMAGNGGDAALALLLLDRLNQLESKMSGKGQQQQGQTVTKKSAAEASKKPRQKRTATKAYNVTQAFGRRGPEQTQGNFGDQELIRQGTDYKYWPQIAQFAPSASAFFGMSRIGMEVTPSGTWLTYTGAIKLDDKDPNFKDQVILLNKHIDAYKTFPPTEPKKDKKKKADETQALPQRQKKQQTVTLLPAADLDDFSKQLQQSMSSADSTQA

SEQ ID NO: 1096 - protein, 671 aa, Artificial Sequence
  Description of Artificial Sequence: Synthetic polypeptide
MHHHHHHGGSGSPILGYWKIKGLVQPTRLLLEYLEEKYEEHLYERDEGDKWRNKKFELGLEFPNLPYYIDGDVKLTQSMAIIRYIADKHNMLGGCPKERAEISMLEGAVLDIRYGVSRIAYSKDFETLKVDFLSKLPEMLKMFEDRLCHKTYLNGDHVTHPDFMLYDALDVVLYMDPMCLDAFPKLVCFKKRIEAIPQIDKYLKSSKYIAWPLQGWQATFGGGDHPPKSDLVPRGSPGIHRDGGSGENLYFQSSDNGPQNQRNAPRITFGGPSDSTGSNQNGERSGARSKQRRPQGLPNNTASWFTALTQHGKEDLKFPRGQGVPINTNSSPDDQIGYYRRATRRIRGGDGKMKDLSPRWYFYYLGTGPEAGLPYGADKDGIIWVATEGALNTPKDHIGTRNPANNAAIVLQLPQGTTLPKGFYAEGSRGGSQASSRSSSRSRNSSRNSTPGSSRGTSPARMAGNGGDAALALLLLDRLNQLESKMSGKGQQQQGQTVTKKSAAEASKKPRQKRTATKAYNVTQAFGRRGPEQTQGNFGDQELIRQGTDYKHWPQIAQFAPSASAFFGMSRIGMEVTPSGTWLTYTGAIKLDDKDPNFKDQVILLNKHIDAYKTFPPTEPKKDKKKKADETQALPQRQKKQQTVTLLPAADLDDFSKQLQQSMSSADSTQA

SEQ ID NO: 1097 - protein, 671 aa, Artificial Sequence
  Description of Artificial Sequence: Synthetic polypeptide
MHHHHHHGGSGSPILGYWKIKGLVQPTRLLLEYLEEKYEEHLYERDEGDKWRNKKFELGLEFPNLPYYIDGDVKLTQSMAIIRYIADKHNMLGGCPKERAEISMLEGAVLDIRYGVSRIAYSKDFETLKVDFLSKLPEMLKMFEDRLCHKTYLNGDHVTHPDFMLYDALDVVLYMDPMCLDAFPKLVCFKKRIEAIPQIDKYLKSSKYIAWPLQGWQATFGGGDHPPKSDLVPRGSPGIHRDGGSGENLYFQSSDNGPQNQRNAPRITFGGPSDSTGSNQNGERSGARSKQRRPQGLPNNTASWFTALTQHGKEDLKFPRGQGVPINTNSSPSDQIGYYRRATRRIRGGDGKMKDLSPRWYFYYLGTGPEAGLPYGANKDGIIWVATEGALNTPKDHIGTRNPANNAAIVLQLPQGTTLPKGFYAEGSRGGSQASSRSSSRSRNSSRNSTPGSSRGTSPARMAGNGGDAALALLLLDRLNQLESKMSGKGQQQQGQTVTKKSAAEASKKPRQKRTATKAYNVTQAFGRRGPEQTQGNFGDQELIRQGTDYKHWPQIAQFAPSASAFFGMSRIGMEVTPSGTWLTYTGAIKLDDKDPNFKDQVILLNKHIDAYKTFPPTEPKKDKKKKADETQALPQRQKKQQTVTLLPAADLDDFSKQLQQSMSSADSTQA

SEQ ID NO: 1098 - protein, 671 aa, Artificial Sequence
  Description of Artificial Sequence: Synthetic polypeptide
MHHHHHHGGSGSPILGYWKIKGLVQPTRLLLEYLEEKYEEHLYERDEGDKWRNKKFELGLEFPNLPYYIDGDVKLTQSMAIIRYIADKHNMLGGCPKERAEISMLEGAVLDIRYGVSRIAYSKDFETLKVDFLSKLPEMLKMFEDRLCHKTYLNGDHVTHPDFMLYDALDVVLYMDPMCLDAFPKLVCFKKRIEAIPQIDKYLKSSKYIAWPLQGWQATFGGGDHPPKSDLVPRGSPGIHRDGGSGENLYFQSSDNGPQNQRNAPRITFGGPSDSTGSNQNGERSGARSKQRRPQGLPNNTASWFTALTQHGKEDLKFPRGQGVPINTNSSPDDQIGYYRRATRRIRGGDGKMKDLSPRWYFYYLGTGPEAGLPYGANKDGIIWVATEGALNTPKDHIGTRNPANQAAIVLQLPQGTTLPKGFYAEGSRGGSQASSRSSSRSRNSSRNSTPGSSRGTSPARMAGNGGDAALALLLLDRLNQLESKMSGKGQQQQGQTVTKKSAAEASKKPRQKRTATKAYNVTQAFGRRGPEQTQGNFGDQELIRQGTDYKHWPQIAQFAPSASAFFGMSRIGMEVTPSGTWLTYTGAIKLDDKDPNFKDQVILLNKHIDAYKTFPPTEPKKDKKKKADETQALPQRQKKQQTVTLLPAADLDDFSKQLQQSMSSADSTQA

SEQ ID NO: 1099 - protein, 671 aa, Artificial Sequence
  Description of Artificial Sequence: Synthetic polypeptide
MHHHHHHGGSGSPILGYWKIKGLVQPTRLLLEYLEEKYEEHLYERDEGDKWRNKKFELGLEFPNLPYYIDGDVKLTQSMAIIRYIADKHNMLGGCPKERAEISMLEGAVLDIRYGVSRIAYSKDFETLKVDFLSKLPEMLKMFEDRLCHKTYLNGDHVTHPDFMLYDALDVVLYMDPMCLDAFPKLVCFKKRIEAIPQIDKYLKSSKYIAWPLQGWQATFGGGDHPPKSDLVPRGSPGIHRDGGSGENLYFQSSDNGPQNQRNAPRITFGGPSDSTGSNQNGERSGARSKQRRPQGLPNNTASWFTALTQHGKEDLKFPRGQGVPINTNSSPDDQIGYYRRATRRIRGGDGKMKDLSPRWYFYYLGTGPEAGLPYGANKDGIIWVATEGALTTPKDHIGTRNPANNAAIVLQLPQGTTLPKGFYAEGSRGGSQASSRSSSRSRNSSRNSTPGSSRGTSPARMAGNGGDAALALLLLDRLNQLESKMSGKGQQQQGQTVTKKSAAEASKKPRQKRTATKAYNVTQAFGRRGPEQTQGNFGDQELIRQGTDYKHWPQIAQFAPSASAFFGMSRIGMEVTPSGTWLTYTGAIKLDDKDPNFKDQVILLNKHIDAYKTFPPTEPKKDKKKKADETQALPQRQKKQQTVTLLPAADLDDFSKQLQQSMSSADSTQA

SEQ ID NO: 1100 - protein, 671 aa, Artificial Sequence
  Description of Artificial Sequence: Synthetic polypeptide
MHHHHHHGGSGSPILGYWKIKGLVQPTRLLLEYLEEKYEEHLYERDEGDKWRNKKFELGLEFPNLPYYIDGDVKLTQSMAIIRYIADKHNMLGGCPKERAEISMLEGAVLDIRYGVSRIAYSKDFETLKVDFLSKLPEMLKMFEDRLCHKTYLNGDHVTHPDFMLYDALDVVLYMDPMCLDAFPKLVCFKKRIEAIPQIDKYLKSSKYIAWPLQGWQATFGGGDHPPKSDLVPRGSPGIHRDGGSGENLYFQSSDNGPQNQRNAPRITFGGPSDSTGSNQNGERSGARSKQRRPQGLPNNTASWFTALTQHGKEDLKFPRGQGVPINTNSSPDDQIGYYRRFTRRIRGGDGKMKDLSPRWYFYYLGTGPEAGLPYGANKDGIIWVATEGALNTPKDHIGTRNPANNAAIVLQLPQGTTLPKGFYAEGSRGGSQASSRSSSRSRNSSRNSTPGSSRGTSPARMAGNGGDAALALLLLDRLNQLESKMSGKGQQQQGQTVTKKSAAEASKKPRQKRTATKAYNVTQAFGRRGPEQTQGNFGDQELIRQGTDYKHWPQIAQFAPSASAFFGMSRIGMEVTPSGTWLTYTGAIKLDDKDPNFKDQVILLNKHIDAYKTFPPTEPKKDKKKKADETQALPQRQKKQQTVTLLPAADLDDFSKQLQQSMSSADSTQA

SEQ ID NO: 1101 - protein, 671 aa, Artificial Sequence
  Description of Artificial Sequence: Synthetic polypeptide
MHHHHHHGGSGSPILGYWKIKGLVQPTRLLLEYLEEKYEEHLYERDEGDKWRNKKFELGLEFPNLPYYIDGDVKLTQSMAIIRYIADKHNMLGGCPKERAEISMLEGAVLDIRYGVSRIAYSKDFETLKVDFLSKLPEMLKMFEDRLCHKTYLNGDHVTHPDFMLYDALDVVLYMDPMCLDAFPKLVCFKKRIEAIPQIDKYLKSSKYIAWPLQGWQATFGGGDHPPKSDLVPRGSPGIHRDGGSGENLYFQSSDNGPQNQRNAPRITFGGPSDSTGSNQNGERSGARSKQRRPQGLPNNTASWFTALTQHGKEDLKFPRGQGVPINTNSSPDDQIGYYRRATRRIRGGDGKMKDLSPRWYFYYLGTGPEAGLPYGANKDGIIWVATEGALNTPKDHIGTRNPANNAAIVLQLPQGTTLPKGFYAEGSRGGSQASSRSSSRSRNSSRNSTPGSSRGTSPARMAGNGGDAALALLLLDRLNQLESKMSGKGQQQQGQTVTKKSAAEASKKPRQKRTATKAYNVTQAFGRRGPEQTQGNFGDQELIRQGTDYKHWPQLAQFAPSASAFFGMSRIGMEVTPSGTWLTYTGAIKLDDKDPNFKDQVILLNKHIDAYKTFPPTEPKKDKKKKADETQALPQRQKKQQTVTLLPAADLDDFSKQLQQSMSSADSTQA

SEQ ID NO: 1102 - protein, 671 aa, Artificial Sequence
  Description of Artificial Sequence: Synthetic polypeptide
MHHHHHHGGSGSPILGYWKIKGLVQPTRLLLEYLEEKYEEHLYERDEGDKWRNKKFELGLEFPNLPYYIDGDVKLTQSMAIIRYIADKHNMLGGCPKERAEISMLEGAVLDIRYGVSRIAYSKDFETLKVDFLSKLPEMLKMFEDRLCHKTYLNGDHVTHPDFMLYDALDVVLYMDPMCLDAFPKLVCFKKRIEAIPQIDKYLKSSKYIAWPLQGWQATFGGGDHPPKSDLVPRGSPGIHRDGGSGENLYFQSSDNGPQNQRNAPRITFGGPSDSTGSNQNGERSGARSKQRRPQGLPNNTASWFTALTQHGKEDLKFPRGQGVPINTNSSPDDQIGYYRRATRRIRGGDGKKKDLSPRWYFYYLGTGPEAGLPYGANKDGIIWVATEGALNTPKDHIGTRNPANNAAIVLQLPQGTTLPKGFYAEGSRGGSQASSRSSSRSRNSSRNSTPGSSRGTSPARMAGNGGDAALALLLLDRLNQLESKMSGKGQQQQGQTVTKKSAAEASKKPRQKRTATKAYNVTQAFGRRGPEQTQGNFGDQELIRQGTDYKHWPQIAQFAPSASAFFGMSRIGMEVTPSGTWLTYTGAIKLDDKDPNFKDQVILLNKHIDAYKTFPPTEPKKDKKKKADETQALPQRQKKQQTVTLLPAADLDDFSKQLQQSMSSADSTQA

SEQ ID NO: 1103 - protein, 671 aa, Artificial Sequence
  Description of Artificial Sequence: Synthetic polypeptide
MHHHHHHGGSGSPILGYWKIKGLVQPTRLLLEYLEEKYEEHLYERDEGDKWRNKKFELGLEFPNLPYYIDGDVKLTQSMAIIRYIADKHNMLGGCPKERAEISMLEGAVLDIRYGVSRIAYSKDFETLKVDFLSKLPEMLKMFEDRLCHKTYLNGDHVTHPDFMLYDALDVVLYMDPMCLDAFPKLVCFKKRIEAIPQIDKYLKSSKYIAWPLQGWQATFGGGDHPPKSDLVPRGSPGIHRDGGSGENLYFQSSDNGPQNQRNAPRITFGGPSDSTGSNQNGERSGARSKQRRPQGLPNNTASWFTALTQHGKEDLKFPRGQGVPINTNSSPDDQIGYYRRATRRIRGGDGKMKDLSPRWYFYYLGTGPEAGLPYGANKDGIIWVATEGALNTPKDHIGTRNPANNAAIVLQLPQGTTLPKGFYAEGSRGGSQASSRSSSRSRNSSRNSTPGSSRGTSPARMAGNGGDAALALLLLDRLNQLESKMSGKGQQQQGQTVTKKSAAEASKKPRQKRTATKAYNVTQAFGRRGPEQTQGNFGDQELIREGTDYKHWPQIAQFAPSASAFFGMSRIGMEVTPSGTWLTYTGAIKLDDKDPNFKDQVILLNKHIDAYKTFPPTEPKKDKKKKADETQALPQRQKKQQTVTLLPAADLDDFSKQLQQSMSSADSTQA

SEQ ID NO: 1104 - protein, 671 aa, Artificial Sequence
  Description of Artificial Sequence: Synthetic polypeptide
MHHHHHHGGSGSPILGYWKIKGLVQPTRLLLEYLEEKYEEHLYERDEGDKWRNKKFELGLEFPNLPYYIDGDVKLTQSMAIIRYIADKHNMLGGCPKERAEISMLEGAVLDIRYGVSRIAYSKDFETLKVDFLSKLPEMLKMFEDRLCHKTYLNGDHVTHPDFMLYDALDVVLYMDPMCLDAFPKLVCFKKRIEAIPQIDKYLKSSKYIAWPLQGWQATFGGGDHPPKSDLVPRGSPGIHRDGGSGENLYFQSSDNGPQNQRNAPRITFGGPSDSTGSNQNGERSGARSKQRRPQGLPNNTASWFTALTQHGKEDLKFPRGQGVPINTNSSPDDQIGYYRRATRRIRGGDGKMKDLKPRWYFYYLGTGPEAGLPYGANKDGIIWVATEGALNTPKDHIGTRNPANNAAIVLQLPQGTTLPKGFYAEGSRGGSQASSRSSSRSRNSSRNSTPGSSRGTSPARMAGNGGDAALALLLLDRLNQLESKMSGKGQQQQGQTVTKKSAAEASKKPRQKRTATKAYNVTQAFGRRGPEQTQGNFGDQELIRQGTDYKHWPQIAQFAPSASAFFGMSRIGMEVTPSGTWLTYTGAIKLDDKDPNFKDQVILLNKHIDAYKTFPPTEPKKDKKKKADETQALPQRQKKQQTVTLLPAADLDDFSKQLQQSMSSADSTQA

SEQ ID NO: 1105 - protein, 671 aa, Artificial Sequence
  Description of Artificial Sequence: Synthetic polypeptide
MHHHHHHGGSGSPILGYWKIKGLVQPTRLLLEYLEEKYEEHLYERDEGDKWRNKKFELGLEFPNLPYYIDGDVKLTQSMAIIRYIADKHNMLGGCPKERAEISMLEGAVLDIRYGVSRIAYSKDFETLKVDFLSKLPEMLKMFEDRLCHKTYLNGDHVTHPDFMLYDALDVVLYMDPMCLDAFPKLVCFKKRIEAIPQIDKYLKSSKYIAWPLQGWQATFGGGDHPPKSDLVPRGSPGIHRDGGSGENLYFQSSDNGPQNQRNAPRITFGGPSDSTGSNQNGERSGARSKQRRPQGLPNNTASWFTPLVQFGKEDLKFPPGQGVPINTNSSPDDQIGYYRRATRRIRGGDGKMKDLPPKWYFYYLGTGPHADLPYGQKKDGVFWVARPGALNTPKDHIGTRNPANNAAIPLQLPPGTKLPKGFYAEGSRGGSQASSRSSSRSRNSSRNSTPGSSRGTSPARMAGNGGDAALALLLLDRLNQLESKMSGKGQQQQGQTVTKKSAAEASKKPRQKRTATKAYNVTQAFGRRGPEQTQGNFGDQELIRQGTDYKHWPQIAQFAPSASAFFGMSRIGMEVTPSGTWLTYTGAIKLDDKDPNFKDQVILLNKHIDAYKTFPPTEPKKDKKKKADETQALPQRQKKQQTVTLLPAADLDDFSKQLQQSMSSADSTQA

SEQ ID NO: 1106 - protein, 671 aa, Artificial Sequence
  Description of Artificial Sequence: Synthetic polypeptide
MHHHHHHGGSGSPILGYWKIKGLVQPTRLLLEYLEEKYEEHLYERDEGDKWRNKKFELGLEFPNLPYYIDGDVKLTQSMAIIRYIADKHNMLGGCPKERAEISMLEGAVLDIRYGVSRIAYSKDFETLKVDFLSKLPEMLKMFEDRLCHKTYLNGDHVTHPDFMLYDALDVVLYMDPMCLDAFPKLVCFKKRIEAIPQIDKYLKSSKYIAWPLQGWQATFGGGDHPPKSDLVPRGSPGIHRDGGSGENLYFQSSDNGPQNQRNAPRITFGGPSDSTGSNQNGERSGARSKQRRPQGLPNNTASWFTALTQHGKEDLKFPRGQGVPINTNSSPDDQIGYYRRATRRIRGGDGKMKDLSPRWYFYYLGTGPEAGLPYGANKDGIIWVATEGALNTPKDHIGTRNPANNAAIVLQLPQGTTLPKGFYAEGSRGGSQASSRSSSRSRNSSRNSTPGSSRGTSPARMAGNGGDAALALLLLDRLNQLESKMSGKGQQQQGQTVTKKSAAEASKKPRQKRTATKAFNVTQAFGRRGPEQTQGNFGDQELIRQGTDYKHWPQIAQFAPSASAFFGMSRIGMEVTPSGTWLTYTGAIKLDDKDPNFKDQVILLNKHIDAYKTFPPTEPKKDKKKKADETQALPQRQKKQQTVTLLPAADLDDFSKQLQQSMSSADSTQA

SEQ ID NO: 1107 - protein, 671 aa, Artificial Sequence
  Description of Artificial Sequence: Synthetic polypeptide
MHHHHHHGGSGSPILGYWKIKGLVQPTRLLLEYLEEKYEEHLYERDEGDKWRNKKFELGLEFPNLPYYIDGDVKLTQSMAIIRYIADKHNMLGGCPKERAEISMLEGAVLDIRYGVSRIAYSKDFETLKVDFLSKLPEMLKMFEDRLCHKTYLNGDHVTHPDFMLYDALDVVLYMDPMCLDAFPKLVCFKKRIEAIPQIDKYLKSSKYIAWPLQGWQATFGGGDHPPKSDLVPRGSPGIHRDGGSGENLYFQSSDNGPQNQRNAPRITFGGPSDSTGSNQNGERSGARSKQRRPQGLPNNTASWFTALTQHGKEDLKFPRGQGVPINTNSSPDDQIGYYRRATRRIRGGDGKMKDLSPRWYFYYLGTGPEAGLPYGANKDGIIWVATEGALNTPKDHIGTRNPANNAAIVLQLPQGTTLPKGFYAEGSRGGSQASSRSSSRSRNSSRNSTPGSSRGTSPARMAGNGGDAALALLLLDRLNQLESKMSGKGQQQQGQTVTKKSAAEASKKPRQKRTATKAYNVTQAFGRRGPEQTQGNFGDQELIRQGTDYKHWPQIAQFAPSASAFFFMSRIGMEVTPSGTWLTYTGAIKLDDKDPNFKDQVILLNKHIDAYKTFPPTEPKKDKKKKADETQALPQRQKKQQTVTLLPAADLDDFSKQLQQSMSSADSTQA

SEQ ID NO: 1108 - protein, 671 aa, Artificial Sequence
  Description of Artificial Sequence: Synthetic polypeptide
MHHHHHHGGSGSPILGYWKIKGLVQPTRLLLEYLEEKYEEHLYERDEGDKWRNKKFELGLEFPNLPYYIDGDVKLTQSMAIIRYIADKHNMLGGCPKERAEISMLEGAVLDIRYGVSRIAYSKDFETLKVDFLSKLPEMLKMFEDRLCHKTYLNGDHVTHPDFMLYDALDVVLYMDPMCLDAFPKLVCFKKRIEAIPQIDKYLKSSKYIAWPLQGWQATFGGGDHPPKSDLVPRGSPGIHRDGGSGENLYFQSSDNGPQNQRNAPRITFGGPSDSTGSNQNGERSGARSKQRRPQGLPNNTASWFTALTQHGKEDLKFPRGQGVPINTNSSPDDQIGYYRRATRRIRGGDGKMKDLSPRWYFYYLGTGPEAGLPYGANKDGIIWVATEGALNTPKDHIGTRNPANNAAIVLQLPQGTTLPKGFYAEGSRGGSQASSRSSSRSRNSSRNSTPGSSRGTSPARMAGNGGDAALALLLLDRLNQLESKMSGKGQQQQGQTVTKKSAAEASKKPRQKRTATKAYNVTQAFGRRGPEQTQGNFGDQELIRQGTDYKHWPQIAQFAPSASAFFGMSRIGMENTPSGTWLTYTGAIKLDDKDPNFKDQVILLNKHIDAYKTFPPTEPKKDKKKKADETQALPQRQKKQQTVTLLPAADLDDFSKQLQQSMSSADSTQA

SEQ ID NO: 1109 - protein, 671 aa, Artificial Sequence
  Description of Artificial Sequence: Synthetic polypeptide
MHHHHHHGGSGSPILGYWKIKGLVQPTRLLLEYLEEKYEEHLYERDEGDKWRNKKFELGLEFPNLPYYIDGDVKLTQSMAIIRYIADKHNMLGGCPKERAEISMLEGAVLDIRYGVSRIAYSKDFETLKVDFLSKLPEMLKMFEDRLCHKTYLNGDHVTHPDFMLYDALDVVLYMDPMCLDAFPKLVCFKKRIEAIPQIDKYLKSSKYIAWPLQGWQATFGGGDHPPKSDLVPRGSPGIHRDGGSGENLYFQSSDNGPQNQRNAPRITFGGPSDSTGSNQNGERSGARSKQRRPQGLPNNTASWFTALTQHGKEDLKFPRGQGVPINTNSSPDDQIGYYRRATRRIRGGDGKMKDLSPRWYFYYLGTGPEAGLPYGANKDGIIWVATEGALNTPKDHIGTRNPANNAAIVLQLPQGTTLPKGFYAEGSRGGSQASSRSSSRSRNSSRNSTPGSSRGTSPARMAGNGGDAALALLLLDRLNQLESKMSGKGQQQQGQTVTKKSAAEASKKPRQKRTATKAYNVTQAFGRRGPEQTQGNFGDQELIRQGTDYKHWPQIAQFAPSASAFFGMSRIGMEPTPSGTWLTYTGAIKLDDKDPNFKDQVILLNKHIDAYKTFPPTEPKKDKKKKADETQALPQRQKKQQTVTLLPAADLDDFSKQLQQSMSSADSTQA

SEQ ID NO: 1110 - protein, 671 aa, Artificial Sequence
  Description of Artificial Sequence: Synthetic polypeptide
MHHHHHHGGSGSPILGYWKIKGLVQPTRLLLEYLEEKYEEHLYERDEGDKWRNKKFELGLEFPNLPYYIDGDVKLTQSMAIIRYIADKHNMLGGCPKERAEISMLEGAVLDIRYGVSRIAYSKDFETLKVDFLSKLPEMLKMFEDRLCHKTYLNGDHVTHPDFMLYDALDVVLYMDPMCLDAFPKLVCFKKRIEAIPQIDKYLKSSKYIAWPLQGWQATFGGGDHPPKSDLVPRGSPGIHRDGGSGENLYFQSSDNGPQNQRNAPRITFGGPSDSTGSNQNGERSGARSKQRRPQGLPNNTASWFTALTQHGKEDLKFPRGQGVPINTNSSPDDQIGYYRRATRRIRGGDGKMKDLSPRWYFYYLGTGPEAGLPYGANKDGIIWVATEGALNTPKDHIGTRNPANNAAIVTQLPQGTTLPKGFYAEGSRGGSQASSRSSSRSRNSSRNSTPGSSRGTSPARMAGNGGDAALALLLLDRLNQLESKMSGKGQQQQGQTVTKKSAAEASKKPRQKRTATKAYNVTQAFGRRGPEQTQGNFGDQELIRQGTDYKHWPQIAQFAPSASAFFGMSRIGMEVTPSGTWLTYTGAIKLDDKDPNFKDQVILLNKHIDAYKTFPPTEPKKDKKKKADETQALPQRQKKQQTVTLLPAADLDDFSKQLQQSMSSADSTQA

SEQ ID NO: 1111 - protein, 671 aa, Artificial Sequence
  Description of Artificial Sequence: Synthetic polypeptide
MHHHHHHGGSGSPILGYWKIKGLVQPTRLLLEYLEEKYEEHLYERDEGDKWRNKKFELGLEFPNLPYYIDGDVKLTQSMAIIRYIADKHNMLGGCPKERAEISMLEGAVLDIRYGVSRIAYSKDFETLKVDFLSKLPEMLKMFEDRLCHKTYLNGDHVTHPDFMLYDALDVVLYMDPMCLDAFPKLVCFKKRIEAIPQIDKYLKSSKYIAWPLQGWQATFGGGDHPPKSDLVPRGSPGIHRDGGSGENLYFQSSDNGPQNQRNAPRITFGGPSDSTGSNQNGERSGARSKQRRPQGLPNNTASWFTALTQHGKEDLKFPRGQGVPINTNSSPDDQIGYYRRATRRIRGGDGKMKDLSPRWYFYYLGTGPEAGLPYGANKDGIIWVATEGALNTPKDHIGTRNPANNAAIVLQLPQGTTLPKGFYAEGSRGGSQASSRSSSRSRNSSRNSTPGSSRGTSPARMAGNGGDAALALLLLDRLNQLESKMSGKGQQQQGQTVTKKSAAEASKKPRQKRTATKAYNVTQAFGRRGPEQTQGNFGDQELIRQGTDYKGWPQIAQFAPSASAFFGMSRIGMEVTPSGTWLTYTGAIKLDDKDPNFKDQVILLNKHIDAYKTFPPTEPKKDKKKKADETQALPQRQKKQQTVTLLPAADLDDFSKQLQQSMSSADSTQA

SEQ ID NO: 1112 - protein, 671 aa, Artificial Sequence
  Description of Artificial Sequence: Synthetic polypeptide
MHHHHHHGGSGSPILGYWKIKGLVQPTRLLLEYLEEKYEEHLYERDEGDKWRNKKFELGLEFPNLPYYIDGDVKLTQSMAIIRYIADKHNMLGGCPKERAEISMLEGAVLDIRYGVSRIAYSKDFETLKVDFLSKLPEMLKMFEDRLCHKTYLNGDHVTHPDFMLYDALDVVLYMDPMCLDAFPKLVCFKKRIEAIPQIDKYLKSSKYIAWPLQGWQATFGGGDHPPKSDLVPRGSPGIHRDGGSGENLYFQSSDNGPQNQRNAPRITFGGPSDSTGSNQNGERSGARSKQRRPQGLPNNTASWFTGLTQNGKEDLKFPPGQGVPINTNSSPDDQIGYYRRATRRIRGGDGKMKDLPPRWYFYYLGTGPHADLPYGQKHDGVVWVAKPGALNTPKDHIGTRNPANNAAIPLQLPPGTKLPKGFYAEGSRGGSQASSRSSSRSRNSSRNSTPGSSRGTSPARMAGNGGDAALALLLLDRLNQLESKMSGKGQQQQGQTVTKKSAAEASKKPRQKRTATKAYNVTQAFGRRGPEQTQGNFGDQELIRQGTDYKHWPQIAQFAPSASAFFGMSRIGMEVTPSGTWLTYTGAIKLDDKDPNFKDQVILLNKHIDAYKTFPPTEPKKDKKKKADETQALPQRQKKQQTVTLLPAADLDDFSKQLQQSMSSADSTQA

SEQ ID NO: 1113 - protein, 671 aa, Artificial Sequence
  Description of Artificial Sequence: Synthetic polypeptide
MHHHHHHGGSGSPILGYWKIKGLVQPTRLLLEYLEEKYEEHLYERDEGDKWRNKKFELGLEFPNLPYYIDGDVKLTQSMAIIRYIADKHNMLGGCPKERAEISMLEGAVLDIRYGVSRIAYSKDFETLKVDFLSKLPEMLKMFEDRLCHKTYLNGDHVTHPDFMLYDALDVVLYMDPMCLDAFPKLVCFKKRIEAIPQIDKYLKSSKYIAWPLQGWQATFGGGDHPPKSDLVPRGSPGIHRDGGSGENLYFQSSDNGPQNQRNAPRITFGGPSDSTGSNQNGERSGARSKQRRPQGLPNNTASWFTALTQHGKEDLKFPRGQGVPINTNSSPDDQIGYYRRATRRIRGGDGKMKDLSPRWYFYYLGTGPEAGLPYGANKDGIFWVATEGALNTPKDHIGTRNPANNAAIVLQLPQGTTLPKGFYAEGSRGGSQASSRSSSRSRNSSRNSTPGSSRGTSPARMAGNGGDAALALLLLDRLNQLESKMSGKGQQQQGQTVTKKSAAEASKKPRQKRTATKAYNVTQAFGRRGPEQTQGNFGDQELIRQGTDYKHWPQIAQFAPSASAFFGMSRIGMEVTPSGTWLTYTGAIKLDDKDPNFKDQVILLNKHIDAYKTFPPTEPKKDKKKKADETQALPQRQKKQQTVTLLPAADLDDFSKQLQQSMSSADSTQA

SEQ ID NO: 1114 - protein, 671 aa, Artificial Sequence
  Description of Artificial Sequence: Synthetic polypeptide
MHHHHHHGGSGSPILGYWKIKGLVQPTRLLLEYLEEKYEEHLYERDEGDKWRNKKFELGLEFPNLPYYIDGDVKLTQSMAIIRYIADKHNMLGGCPKERAEISMLEGAVLDIRYGVSRIAYSKDFETLKVDFLSKLPEMLKMFEDRLCHKTYLNGDHVTHPDFMLYDALDVVLYMDPMCLDAFPKLVCFKKRIEAIPQIDKYLKSSKYIAWPLQGWQATFGGGDHPPKSDLVPRGSPGIHRDGGSGENLYFQSSDNGPQNQRNAPRITFGGPSDSTGSNQNGERSGARSKQRRPQGLPNNTASWFTALTQHGKEDLKFPRGQGVPINTNSSPDDQIGYYRRATRRIRGGDGKMKDLSPRWYFYYLGTGPEAGLPYGANKDGIIWVATEGALNTPKDHIGTRNPANNAAIVLQLPQGTTLPKGFYAEGSRGGSQASSRSSSRSRNSSRNSTPGSSRGTSPARMAGNGGDAALALLLLDRLNQLESKMSGKGQQQQGQTVTKKSAAEASKKPRQKRTATKGYNVTQAFGRRGPEQTQGNFGDQDLNKLGTDYKHWPQIAQFAPSASAFFGMSRIGTEETPSGTWLTYTGAIKLDKKDPNFKDQVILLNKHIDAYKTFPPTEPKKDKKKKADETQALPQRQKKQQTVTLLPAADLDDFSKQLQQSMSSADSTQA

SEQ ID NO: 1115 - protein, 671 aa, Artificial Sequence
  Description of Artificial Sequence: Synthetic polypeptide
MHHHHHHGGSGSPILGYWKIKGLVQPTRLLLEYLEEKYEEHLYERDEGDKWRNKKFELGLEFPNLPYYIDGDVKLTQSMAIIRYIADKHNMLGGCPKERAEISMLEGAVLDIRYGVSRIAYSKDFETLKVDFLSKLPEMLKMFEDRLCHKTYLNGDHVTHPDFMLYDALDVVLYMDPMCLDAFPKLVCFKKRIEAIPQIDKYLKSSKYIAWPLQGWQATFGGGDHPPKSDLVPRGSPGIHRDGGSGENLYFQSSDNGPQNQRNAPRITFGGPSDSTGSNQNGERSGARSKQRRPQGLPNNTASWFTALTQHGKEDLKFPRGQGVPINTNSSPDDQIGYYRRATRRIRGGDGKMKDLSPRWYFYYLGTGPEAGLPYGANKDGIIWVATEGALNTPKDHIGNRNPANNAAIVLQLPQGTTLPKGFYAEGSRGGSQASSRSSSRSRNSSRNSTPGSSRGTSPARMAGNGGDAALALLLLDRLNQLESKMSGKGQQQQGQTVTKKSAAEASKKPRQKRTATKAYNVTQAFGRRGPEQTQGNFGDQELIRQGTDYKHWPQIAQFAPSASAFFGMSRIGMEVTPSGTWLTYTGAIKLDDKDPNFKDQVILLNKHIDAYKTFPPTEPKKDKKKKADETQALPQRQKKQQTVTLLPAADLDDFSKQLQQSMSSADSTQA

SEQ ID NO: 1116 - protein, 671 aa, Artificial Sequence
  Description of Artificial Sequence: Synthetic polypeptide
MHHHHHHGGSGSPILGYWKIKGLVQPTRLLLEYLEEKYEEHLYERDEGDKWRNKKFELGLEFPNLPYYIDGDVKLTQSMAIIRYIADKHNMLGGCPKERAEISMLEGAVLDIRYGVSRIAYSKDFETLKVDFLSKLPEMLKMFEDRLCHKTYLNGDHVTHPDFMLYDALDVVLYMDPMCLDAFPKLVCFKKRIEAIPQIDKYLKSSKYIAWPLQGWQATFGGGDHPPKSDLVPRGSPGIHRDGGSGENLYFQSSDNGPQNQRNAPRITFGGPSDSTGSNQNGERSGARSKQRRPQGLPNNTASWFTALTQHGKEDLKFPRGQGVPINTNSSPDDQIGYYRRATRRIRGGDGKMKDLSPRWYFYYLGTGPEAGLPYGANKDGIIWVATEGALNTPKDHIGTRNPANNAAIVLQLPQGTTLPKGFYAEGSRGGSQASSRSSSRSRNSSRNSTPGSSRGTSPARMAGNGGDAALALLLLDRLNQLESKMSGKGQQQQGQTVTKKSAAEASKKPRQKRTATKAYNVTQAFGRRGPEDTQGNFGDQELIRQGTDYKHWPQIAQFAPSASAFFGMSRIGMEVTPSGTWLTYTGAIKLDDKDPNFKDQVILLNKHIDAYKTFPPTEPKKDKKKKADETQALPQRQKKQQTVTLLPAADLDDFSKQLQQSMSSADSTQA

SEQ ID NO: 1117 - protein, 671 aa, Artificial Sequence
  Description of Artificial Sequence: Synthetic polypeptide
MHHHHHHGGSGSPILGYWKIKGLVQPTRLLLEYLEEKYEEHLYERDEGDKWRNKKFELGLEFPNLPYYIDGDVKLTQSMAIIRYIADKHNMLGGCPKERAEISMLEGAVLDIRYGVSRIAYSKDFETLKVDFLSKLPEMLKMFEDRLCHKTYLNGDHVTHPDFMLYDALDVVLYMDPMCLDAFPKLVCFKKRIEAIPQIDKYLKSSKYIAWPLQGWQATFGGGDHPPKSDLVPRGSPGIHRDGGSGENLYFQSSDNGPQNQRNAPRITFGGPSDSTGSNQNGERSGARSKQRRPQGLPNNTASWFTALTQHGKEDLKFPRGQGVPINTNSSPDDQIGYYRRATRRIRGGDGKMKDLSPRWYFYYLGTGPEAGLPYGANKDGIIWVATEGALNTPKDHIGTRNPANNAAIVLQLPQGTTLPKGFYAEGSRGGSQASSRSSSRSRNSSRNSTPGSSRGTSPARMAGNGGDAALALLLLDRLNQLESKMSGKGQQQQGQTVTKKSAAEASKKPRQKRTATKAYNVTQAFGRRGPEQTQGNFGDQELIRQGTDYKHWPQIAQFAPSASAFFGMSRIGMEVTPSGTWLTYTGAIKLDDKDPNFKDQVKLLNKHIDAYKTFPPTEPKKDKKKKADETQALPQRQKKQQTVTLLPAADLDDFSKQLQQSMSSADSTQA

SEQ ID NO: 1118 - protein, 671 aa, Artificial Sequence
  Description of Artificial Sequence: Synthetic polypeptide
MHHHHHHGGSGSPILGYWKIKGLVQPTRLLLEYLEEKYEEHLYERDEGDKWRNKKFELGLEFPNLPYYIDGDVKLTQSMAIIRYIADKHNMLGGCPKERAEISMLEGAVLDIRYGVSRIAYSKDFETLKVDFLSKLPEMLKMFEDRLCHKTYLNGDHVTHPDFMLYDALDVVLYMDPMCLDAFPKLVCFKKRIEAIPQIDKYLKSSKYIAWPLQGWQATFGGGDHPPKSDLVPRGSPGIHRDGGSGENLYFQSSDNGPQNQRNAPRITFGGPSDSTGSNQNGERSGARSKQRRPQGLPNNTASWFTALTQHGKEDLKFPRGQGVPINTNSSPDDQIGYYRRATRRIRGGDGKMKDLSPVWYFYYLGTGPEAGLPYGANKDGIIWVATEGALNTPKDHIGTRNPANNAAIVLQLPQGTTLPKGFYAEGSRGGSQASSRSSSRSRNSSRNSTPGSSRGTSPARMAGNGGDAALALLLLDRLNQLESKMSGKGQQQQGQTVTKKSAAEASKKPRQKRTATKAYNVTQAFGRRGPEQTQGNFGDQELIRQGTDYKHWPQIAQFAPSASAFFGMSRIGMEVTPSGTWLTYTGAIKLDDKDPNFKDQVILLNKHIDAYKTFPPTEPKKDKKKKADETQALPQRQKKQQTVTLLPAADLDDFSKQLQQSMSSADSTQA

SEQ ID NO: 1119 - protein, 671 aa, Artificial Sequence
  Description of Artificial Sequence: Synthetic polypeptide
MHHHHHHGGSGSPILGYWKIKGLVQPTRLLLEYLEEKYEEHLYERDEGDKWRNKKFELGLEFPNLPYYIDGDVKLTQSMAIIRYIADKHNMLGGCPKERAEISMLEGAVLDIRYGVSRIAYSKDFETLKVDFLSKLPEMLKMFEDRLCHKTYLNGDHVTHPDFMLYDALDVVLYMDPMCLDAFPKLVCFKKRIEAIPQIDKYLKSSKYIAWPLQGWQATFGGGDHPPKSDLVPRGSPGIHRDGGSGENLYFQSSDNGPQNQRNAPRITFGGPSDSTGSNQNGERSGARSKQRRPQGLPNNTASWFTALTQHGKEDLKFPRGQGVPINTNSSPDDQIGYYRRATRRIRGGDGKMKDLSPRWYFYYLGTGPEAGLPYGANKDGIIWVATEGALNTPKDHIGTRNPANNAAIVLQLPQGTTLPKGFYAEGSRGGSQASSRSSSRSRNSSRNSTPGSSRGTSPARMAGNGGDAALALLLLDRLNQLESKMSGKGQQQQGQTVTKKSAAEMSKKPRWKRTPTKGYNVTQAFGPRGPKDTQGNFGDAELIKQGTDYKHWPQIAQFVPSAAAFFFMSRIGMKETPDGVWLTYTGTIKLDKDDPNFDDQVKLLNKHIDAYKTFPPTEPKKDKKKKADETQALPQRQKKQQTVTLLPAADLDDFSKQLQQSMSSADSTQA

SEQ ID NO: 1120 - protein, 671 aa, Artificial Sequence
  Description of Artificial Sequence: Synthetic polypeptide
MHHHHHHGGSGSPILGYWKIKGLVQPTRLLLEYLEEKYEEHLYERDEGDKWRNKKFELGLEFPNLPYYIDGDVKLTQSMAIIRYIADKHNMLGGCPKERAEISMLEGAVLDIRYGVSRIAYSKDFETLKVDFLSKLPEMLKMFEDRLCHKTYLNGDHVTHPDFMLYDALDVVLYMDPMCLDAFPKLVCFKKRIEAIPQIDKYLKSSKYIAWPLQGWQATFGGGDHPPKSDLVPRGSPGIHRDGGSGENLYFQSSDNGPQNQRNAPRITFGGPSDSTGSNQNGERSGARSKQRRPQGLPNNTASWFTALTQHGKEDLKFPRGQGVPINTNSSPDDQIGYYRRMTRRIRGGDGKMKDLSPRWYFYYLGTGPEAGLPYGANKDGIIWVATEGALNTPKDHIGTRNPANNAAIVLQLPQGTTLPKGFYAEGSRGGSQASSRSSSRSRNSSRNSTPGSSRGTSPARMAGNGGDAALALLLLDRLNQLESKMSGKGQQQQGQTVTKKSAAEASKKPRQKRTATKAYNVTQAFGRRGPEQTQGNFGDQELIRQGTDYKHWPQIAQFAPSASAFFGMSRIGMEVTPSGTWLTYTGAIKLDDKDPNFKDQVILLNKHIDAYKTFPPTEPKKDKKKKADETQALPQRQKKQQTVTLLPAADLDDFSKQLQQSMSSADSTQA

SEQ ID NO: 1121 - protein, 671 aa, Artificial Sequence
  Description of Artificial Sequence: Synthetic polypeptide
MHHHHHHGGSGSPILGYWKIKGLVQPTRLLLEYLEEKYEEHLYERDEGDKWRNKKFELGLEFPNLPYYIDGDVKLTQSMAIIRYIADKHNMLGGCPKERAEISMLEGAVLDIRYGVSRIAYSKDFETLKVDFLSKLPEMLKMFEDRLCHKTYLNGDHVTHPDFMLYDALDVVLYMDPMCLDAFPKLVCFKKRIEAIPQIDKYLKSSKYIAWPLQGWQATFGGGDHPPKSDLVPRGSPGIHRDGGSGENLYFQSSDNGPQNQRNAPRITFGGPSDSTGSNQNGERSGARSKQRRPQGLPNNTASWFTALTQHGKEDLKFPRGQGVPINTNSSPDDQIGYYRRATRRIRGGDGKMKDLSPRWYFYYLGTGPEAALPYGANKDGIIWVATEGALNTPKDHIGTRNPANNAAIVLQLPQGTTLPKGFYAEGSRGGSQASSRSSSRSRNSSRNSTPGSSRGTSPARMAGNGGDAALALLLLDRLNQLESKMSGKGQQQQGQTVTKKSAAEASKKPRQKRTATKAYNVTQAFGRRGPEQTQGNFGDQELIRQGTDYKHWPQIAQFAPSASAFFGMSRIGMEVTPSGTWLTYTGAIKLDDKDPNFKDQVILLNKHIDAYKTFPPTEPKKDKKKKADETQALPQRQKKQQTVTLLPAADLDDFSKQLQQSMSSADSTQA

SEQ ID NO: 1122 - protein, 671 aa, Artificial Sequence
  Description of Artificial Sequence: Synthetic polypeptide
MHHHHHHGGSGSPILGYWKIKGLVQPTRLLLEYLEEKYEEHLYERDEGDKWRNKKFELGLEFPNLPYYIDGDVKLTQSMAIIRYIADKHNMLGGCPKERAEISMLEGAVLDIRYGVSRIAYSKDFETLKVDFLSKLPEMLKMFEDRLCHKTYLNGDHVTHPDFMLYDALDVVLYMDPMCLDAFPKLVCFKKRIEAIPQIDKYLKSSKYIAWPLQGWQATFGGGDHPPKSDLVPRGSPGIHRDGGSGENLYFQSSDNGPQNQRNAPRITFGGPSDSTGSNQNGERSGARSKQRRPQGLPNNTASWFTALTQHGKEDLKFPRGQGVPINTNSSPDDQIGYYRRATRRIRGGDGKMKDLSPRWYFYYLGTGPEAGLPYGANKDGIIWVAIEGALNTPKDHIGTRNPANNAAIVLQLPQGTTLPKGFYAEGSRGGSQASSRSSSRSRNSSRNSTPGSSRGTSPARMAGNGGDAALALLLLDRLNQLESKMSGKGQQQQGQTVTKKSAAEASKKPRQKRTATKAYNVTQAFGRRGPEQTQGNFGDQELIRQGTDYKHWPQIAQFAPSASAFFGMSRIGMEVTPSGTWLTYTGAIKLDDKDPNFKDQVILLNKHIDAYKTFPPTEPKKDKKKKADETQALPQRQKKQQTVTLLPAADLDDFSKQLQQSMSSADSTQA

SEQ ID NO: 1123 - protein, 671 aa, Artificial Sequence
  Description of Artificial Sequence: Synthetic polypeptide
MHHHHHHGGSGSPILGYWKIKGLVQPTRLLLEYLEEKYEEHLYERDEGDKWRNKKFELGLEFPNLPYYIDGDVKLTQSMAIIRYIADKHNMLGGCPKERAEISMLEGAVLDIRYGVSRIAYSKDFETLKVDFLSKLPEMLKMFEDRLCHKTYLNGDHVTHPDFMLYDALDVVLYMDPMCLDAFPKLVCFKKRIEAIPQIDKYLKSSKYIAWPLQGWQATFGGGDHPPKSDLVPRGSPGIHRDGGSGENLYFQSSDNGPQNQRNAPRITFGGPSDSTGSNQNGERSGARSKQRRPQGLPNNTASWFTALTQHGKEDLKFPKGQGVPINTNSKPDDQIGYYRRQVRRYRGGDGQMKDLDPRWYFYYLGTGPEAGLPYGANKDGIIWVATEGALNTPKDHIGTRNPANNAAIVLQLPQGTTLPKGFYAEGSRGGSQASSRSSSRSRNSSRNSTPGSSRGTSPARMAGNGGDAALALLLLDRLNQLESKMSGKGQQQQGQTVTKKSAAEASKKPRQKRTATKAYNVTQAFGRRGPEQTQGNFGDQELIRQGTDYKHWPQIAQFAPSASAFFGMSRIGMEVTPSGTWLTYTGAIKLDDKDPNFKDQVILLNKHIDAYKTFPPTEPKKDKKKKADETQALPQRQKKQQTVTLLPAADLDDFSKQLQQSMSSADSTQA

SEQ ID NO: 1124 - protein, 671 aa, Artificial Sequence
  Description of Artificial Sequence: Synthetic polypeptide
MHHHHHHGGSGSPILGYWKIKGLVQPTRLLLEYLEEKYEEHLYERDEGDKWRNKKFELGLEFPNLPYYIDGDVKLTQSMAIIRYIADKHNMLGGCPKERAEISMLEGAVLDIRYGVSRIAYSKDFETLKVDFLSKLPEMLKMFEDRLCHKTYLNGDHVTHPDFMLYDALDVVLYMDPMCLDAFPKLVCFKKRIEAIPQIDKYLKSSKYIAWPLQGWQATFGGGDHPPKSDLVPRGSPGIHRDGGSGENLYFQSSDNGPQNQRNAPRITFGGPSDSTGSNQNGERSGARSKQRRPQGLPNNTASWFTALTQHGKEDLKFPRGQGVPINTNSSPDDQIGYYRRATRRIRGGDGKMKDLSPRWFFYYLGTGPEAGLPYGANKDGIIWVATEGALNTPKDHIGTRNPANNAAIVLQLPQGTTLPKGFYAEGSRGGSQASSRSSSRSRNSSRNSTPGSSRGTSPARMAGNGGDAALALLLLDRLNQLESKMSGKGQQQQGQTVTKKSAAEASKKPRQKRTATKAYNVTQAFGRRGPEQTQGNFGDQELIRQGTDYKHWPQIAQFAPSASAFFGMSRIGMEVTPSGTWLTYTGAIKLDDKDPNFKDQVILLNKHIDAYKTFPPTEPKKDKKKKADETQALPQRQKKQQTVTLLPAADLDDFSKQLQQSMSSADSTQA

SEQ ID NO: 1125 - protein, 671 aa, Artificial Sequence
  Description of Artificial Sequence: Synthetic polypeptide
MHHHHHHGGSGSPILGYWKIKGLVQPTRLLLEYLEEKYEEHLYERDEGDKWRNKKFELGLEFPNLPYYIDGDVKLTQSMAIIRYIADKHNMLGGCPKERAEISMLEGAVLDIRYGVSRIAYSKDFETLKVDFLSKLPEMLKMFEDRLCHKTYLNGDHVTHPDFMLYDALDVVLYMDPMCLDAFPKLVCFKKRIEAIPQIDKYLKSSKYIAWPLQGWQATFGGGDHPPKSDLVPRGSPGIHRDGGSGENLYFQSSDNGPQNQRNAPRITFGGPSDSTGSNQNGERSGARSKQRRPQGLPNNTASWFTALTQHGKEDLKFPRGQGVPINTNSSPDDQIGYYRRATRRIRGGDGKMKDLSPRWYFYYLGTGPEAGLPYGANKDGIIWVATEGALNTPKDHIGTRNPANNAAIVLQLPQGTTLPKGFYAEGSRGGSQASSRSSSRSRNSSRNSTPGSSRGTSPARMAGNGGDAALALLLLDRLNQLESKMSGKGQQQQGQTVTKKSAAEASKKPRQKRTATKAYNVTQAFGRRGPEQTQGNFGDQELIRQGTDYKHWPQIAQFAPSASAFFGMSRIGMEVTPSGTWLTYTGAIKLDKKDPNFKDQVILLNKHIDAYKTFPPTEPKKDKKKKADETQALPQRQKKQQTVTLLPAADLDDFSKQLQQSMSSADSTQA

SEQ ID NO: 1126 - protein, 671 aa, Artificial Sequence
  Description of Artificial Sequence: Synthetic polypeptide
MHHHHHHGGSGSPILGYWKIKGLVQPTRLLLEYLEEKYEEHLYERDEGDKWRNKKFELGLEFPNLPYYIDGDVKLTQSMAIIRYIADKHNMLGGCPKERAEISMLEGAVLDIRYGVSRIAYSKDFETLKVDFLSKLPEMLKMFEDRLCHKTYLNGDHVTHPDFMLYDALDVVLYMDPMCLDAFPKLVCFKKRIEAIPQIDKYLKSSKYIAWPLQGWQATFGGGDHPPKSDLVPRGSPGIHRDGGSGENLYFQSSDNGPQNQRNAPRITFGGPSDSTGSNQNGERSGARSKQRRPQGLPNNTASWFTALTQHGKEDLKFPRGQGVPINTNSSPDDQIGYYRRATRRIRGGDGQMKDLSPRWYFYYLGTGPEAGLPYGANKDGIIWVATEGALNTPKDHIGTRNPANNAAIVLQLPQGTTLPKGFYAEGSRGGSQASSRSSSRSRNSSRNSTPGSSRGTSPARMAGNGGDAALALLLLDRLNQLESKMSGKGQQQQGQTVTKKSAAEASKKPRQKRTATKAYNVTQAFGRRGPEQTQGNFGDQELIRQGTDYKHWPQIAQFAPSASAFFGMSRIGMEVTPSGTWLTYTGAIKLDDKDPNFKDQVILLNKHIDAYKTFPPTEPKKDKKKKADETQALPQRQKKQQTVTLLPAADLDDFSKQLQQSMSSADSTQA

SEQ ID NO: 1127 - protein, 671 aa, Artificial Sequence
  Description of Artificial Sequence: Synthetic polypeptide
MHHHHHHGGSGSPILGYWKIKGLVQPTRLLLEYLEEKYEEHLYERDEGDKWRNKKFELGLEFPNLPYYIDGDVKLTQSMAIIRYIADKHNMLGGCPKERAEISMLEGAVLDIRYGVSRIAYSKDFETLKVDFLSKLPEMLKMFEDRLCHKTYLNGDHVTHPDFMLYDALDVVLYMDPMCLDAFPKLVCFKKRIEAIPQIDKYLKSSKYIAWPLQGWQATFGGGDHPPKSDLVPRGSPGIHRDGGSGENLYFQSSDNGPQNQRNAPRITFGGPSDSTGSNQNGERSGARSKQRRPQGLPNNTASWFTALTQHGKEDLKFPRGQGVPINTNSSPDDQIGYYRRATRRIRGGDGKMKDLSPRWYFYYLGTGPEAGLPYGANKDGIIWVATEGALNTPKDHIGTRNPANNAAIVLQLPDGTTLPKGFYAEGSRGGSQASSRSSSRSRNSSRNSTPGSSRGTSPARMAGNGGDAALALLLLDRLNQLESKMSGKGQQQQGQTVTKKSAAEASKKPRQKRTATKAYNVTQAFGRRGPEQTQGNFGDQELIRQGTDYKHWPQIAQFAPSASAFFGMSRIGMEVTPSGTWLTYTGAIKLDDKDPNFKDQVILLNKHIDAYKTFPPTEPKKDKKKKADETQALPQRQKKQQTVTLLPAADLDDFSKQLQQSMSSADSTQA

SEQ ID NO: 1128 - protein, 671 aa, Artificial Sequence
  Description of Artificial Sequence: Synthetic polypeptide
MHHHHHHGGSGSPILGYWKIKGLVQPTRLLLEYLEEKYEEHLYERDEGDKWRNKKFELGLEFPNLPYYIDGDVKLTQSMAIIRYIADKHNMLGGCPKERAEISMLEGAVLDIRYGVSRIAYSKDFETLKVDFLSKLPEMLKMFEDRLCHKTYLNGDHVTHPDFMLYDALDVVLYMDPMCLDAFPKLVCFKKRIEAIPQIDKYLKSSKYIAWPLQGWQATFGGGDHPPKSDLVPRGSPGIHRDGGSGENLYFQSSDNGPQNQRNAPRITFGGPSDSTGSNQNGERSGARSKQRRPQGLPNNTASWFTALTQHGKEDLKFPRGQGVPINTNSSPDDQIGYYRRATRRIRGGDGKMKDLSPRWYFYYLGTGPEAGLPYGANKDGIIWVATEGALNTPKDHIGTRNPANNAAIVLQLPQGTTLPKGFYAEGSRGGSQASSRSSSRSRNSSRNSTPGSSRGTSPARMAGNGGDAALALLLLDRLNQLESKMSGKGQQQQGQTVTKKSAAEASKKPRQKRTATKAYNVTQAFGRRGPEQTQGNFGDQELIRQGTDYKHWPQIAQFAPSASAFFGMSRIGMEVTPSGVWLTYTGAIKLDDKDPNFKDQVILLNKHIDAYKTFPPTEPKKDKKKKADETQALPQRQKKQQTVTLLPAADLDDFSKQLQQSMSSADSTQA

SEQ ID NO: 1129 - protein, 671 aa, Artificial Sequence
  Description of Artificial Sequence: Synthetic polypeptide
MHHHHHHGGSGSPILGYWKIKGLVQPTRLLLEYLEEKYEEHLYERDEGDKWRNKKFELGLEFPNLPYYIDGDVKLTQSMAIIRYIADKHNMLGGCPKERAEISMLEGAVLDIRYGVSRIAYSKDFETLKVDFLSKLPEMLKMFEDRLCHKTYLNGDHVTHPDFMLYDALDVVLYMDPMCLDAFPKLVCFKKRIEAIPQIDKYLKSSKYIAWPLQGWQATFGGGDHPPKSDLVPRGSPGIHRDGGSGENLYFQSSDNGPQNQRNAPRITFGGPSDSTGSNQNGERSGARSKQRRPQGLPNNTASWFTALTQHGKEDLKFPRGQGVPINTNSSPDDQIGYYRRATRRIRGGDGKMKDLSPRWYFYYLGTGPEAGLPYGANKDGIIWVATEGALNTPKDHIGTRNPANNAAIVLQLPQGTTLPKGFYAEGSRGGSQASSRSSSRSRNSSRNSTPGSSRGTSPARMAGNGGDAALALLLLDRLNQLESKMSGKGQQQQGQTVTKKSAAEASKKPRQKRTATKGYNVTQAFGRRGPEQTQGNFGDQELIRQGTDYKHWPQIAQFAPSASAFFGMSRIGMEVTPSGTWLTYTGAIKLDDKDPNFKDQVILLNKHIDAYKTFPPTEPKKDKKKKADETQALPQRQKKQQTVTLLPAADLDDFSKQLQQSMSSADSTQA

SEQ ID NO: 1130 - protein, 671 aa, Artificial Sequence
  Description of Artificial Sequence: Synthetic polypeptide
MHHHHHHGGSGSPILGYWKIKGLVQPTRLLLEYLEEKYEEHLYERDEGDKWRNKKFELGLEFPNLPYYIDGDVKLTQSMAIIRYIADKHNMLGGCPKERAEISMLEGAVLDIRYGVSRIAYSKDFETLKVDFLSKLPEMLKMFEDRLCHKTYLNGDHVTHPDFMLYDALDVVLYMDPMCLDAFPKLVCFKKRIEAIPQIDKYLKSSKYIAWPLQGWQATFGGGDHPPKSDLVPRGSPGIHRDGGSGENLYFQSSDNGPQNQRNAPRITFGGPSDSTGSNQNGERSGARSKQRRPQGLPNNTASWFTALTQHGKEDLKFPRGQGVPINTNSSPDDQIGYYRRATRRIRGGDGKMKDLSPRWYFYYLGTGPEAGLPYGANKDGIIWVATDGALNTPKDHIGTRNPANNAAIVLQLPQGTTLPKGFYAEGSRGGSQASSRSSSRSRNSSRNSTPGSSRGTSPARMAGNGGDAALALLLLDRLNQLESKMSGKGQQQQGQTVTKKSAAEASKKPRQKRTATKAYNVTQAFGRRGPEQTQGNFGDQELIRQGTDYKHWPQIAQFAPSASAFFGMSRIGMEVTPSGTWLTYTGAIKLDDKDPNFKDQVILLNKHIDAYKTFPPTEPKKDKKKKADETQALPQRQKKQQTVTLLPAADLDDFSKQLQQSMSSADSTQA

SEQ ID NO: 1131 - protein, 671 aa, Artificial Sequence
  Description of Artificial Sequence: Synthetic polypeptide
MHHHHHHGGSGSPILGYWKIKGLVQPTRLLLEYLEEKYEEHLYERDEGDKWRNKKFELGLEFPNLPYYIDGDVKLTQSMAIIRYIADKHNMLGGCPKERAEISMLEGAVLDIRYGVSRIAYSKDFETLKVDFLSKLPEMLKMFEDRLCHKTYLNGDHVTHPDFMLYDALDVVLYMDPMCLDAFPKLVCFKKRIEAIPQIDKYLKSSKYIAWPLQGWQATFGGGDHPPKSDLVPRGSPGIHRDGGSGENLYFQSSDNGPQNQRNAPRITFGGPSDSTGSNQNGERSGARSKQRRPQGLPNNTASWFTALTQHGKEDLKFPRGQGVPINTNSSPDDQIGYYRRATRRIRGGDGKMKDLSPRWYFYYLGTGPEAGLPYGANKDGIIWVATEGALNTPKDHIGTRNPANNAAIVLQLPQGTTLPKGFYAEGSRGGSQASSRSSSRSRNSSRNSTPGSSRGTSPARMAGNGGDAALALLLLDRLNQLESKMSGKGQQQQGQTVTKKSAAEMSKKPRWKRTATKEYNVTQAFGKRGPKDTQGNFGDAELIKQGTDYKHWPQIAQFVPSAAAFFFMSRIGMKETPDGVWLTYTGTIKLDKDDPNFDDQVKLLNKHIDAYKTFPPTEPKKDKKKKADETQALPQRQKKQQTVTLLPAADLDDFSKQLQQSMSSADSTQA

SEQ ID NO: 1132 - protein, 671 aa, Artificial Sequence
  Description of Artificial Sequence: Synthetic polypeptide
MHHHHHHGGSGSPILGYWKIKGLVQPTRLLLEYLEEKYEEHLYERDEGDKWRNKKFELGLEFPNLPYYIDGDVKLTQSMAIIRYIADKHNMLGGCPKERAEISMLEGAVLDIRYGVSRIAYSKDFETLKVDFLSKLPEMLKMFEDRLCHKTYLNGDHVTHPDFMLYDALDVVLYMDPMCLDAFPKLVCFKKRIEAIPQIDKYLKSSKYIAWPLQGWQATFGGGDHPPKSDLVPRGSPGIHRDGGSGENLYFQSSDNGPQNQRNAPRITFGGPSDSTGSNQNGERSGARSKQRRPQGLPNNTASWFTALTQHGKEDLKFPRGQGVPINTNSSPDDQIGYYRRATRRIRGGDGKMKDLSPRWYFYYLGTGPEAGLPYGANKDGIIWVATEGALNTPKDHIGTRNPANNAAIVLQLPQGTTLPKGFYAEGSRGGSQASSRSSSRSRNSSRNSTPGSSRGTSPARMAGNGGDAALALLLLDRLNQLESKMSGKGQQQQGQTVTKKSAAEASKKPRQKRTATKEYNVTQAFGRRGPEQTQGNFGDQDLNKLGTDYKHWPQIAQFAPSASAFFGMSRIGTEETPSGTWLTYTGAIKLDKKDPNFKDQVILLNKHIDAYKTFPPTEPKKDKKKKADETQALPQRQKKQQTVTLLPAADLDDFSKQLQQSMSSADSTQA

SEQ ID NO: 1133 - protein, 671 aa, Artificial Sequence
  Description of Artificial Sequence: Synthetic polypeptide
MHHHHHHGGSGSPILGYWKIKGLVQPTRLLLEYLEEKYEEHLYERDEGDKWRNKKFELGLEFPNLPYYIDGDVKLTQSMAIIRYIADKHNMLGGCPKERAEISMLEGAVLDIRYGVSRIAYSKDFETLKVDFLSKLPEMLKMFEDRLCHKTYLNGDHVTHPDFMLYDALDVVLYMDPMCLDAFPKLVCFKKRIEAIPQIDKYLKSSKYIAWPLQGWQATFGGGDHPPKSDLVPRGSPGIHRDGGSGENLYFQSSDNGPQNQRNAPRITFGGPSDSTGSNQNGERSGARSKQRRPQGLPNNTASWFTALTQHGKEDLKFPRGQGVPINTNSSPDDQIGYYRRATRRIRGGDGKMKDLSPRWYFYYLGTGPEAGLPYGANKDGIIWVATEGALNTPKDHIGTRNPANNAAIVLQLPQGTTLPKGFYAEGSRGGSQASSRSSSRSRNSSRNSTPGSSRGTSPARMAGNGGDAALALLLLDRLNQLESKMSGKGQQQQGQTVTKKSAAEMSKKPRWKRTATKEYNVTQAFGKRGPKDTQGNFGDAELIKQGTDYKHWPQIAQFVPSAAAFFFMSRISMKETPDGVWLTYTGTIKLDKDDPNFDDQVKLLNKHIDAYKTFPPTEPKKDKKKKADETQALPQRQKKQQTVTLLPAADLDDFSKQLQQSMSSADSTQA

SEQ ID NO: 1134 - protein, 671 aa, Artificial Sequence
  Description of Artificial Sequence: Synthetic polypeptide
MHHHHHHGGSGSPILGYWKIKGLVQPTRLLLEYLEEKYEEHLYERDEGDKWRNKKFELGLEFPNLPYYIDGDVKLTQSMAIIRYIADKHNMLGGCPKERAEISMLEGAVLDIRYGVSRIAYSKDFETLKVDFLSKLPEMLKMFEDRLCHKTYLNGDHVTHPDFMLYDALDVVLYMDPMCLDAFPKLVCFKKRIEAIPQIDKYLKSSKYIAWPLQGWQATFGGGDHPPKSDLVPRGSPGIHRDGGSGENLYFQSSDNGPQNQRNAPRITFGGPSDSTGSNQNGERSGARSKQRRPQGLPNNTASWFTALTQHGKEDLKFPRGQGVPINTNSSPDDQIGCYRRATRRIRGGDGKMKDLSPRWYFYYLGTGPEAGLPYGANKDGIIWVATEGALNTPKDHIGTRNPANNAAIVLQLPQGTTLPKGFYAEGSRGGSQASSRSSSRSRNSSRNSTPGSSRGTSPARMAGNGGDAALALLLLDRLNQLESKMSGKGQQQQGQTVTKKSAAEASKKPRQKRTATKAYNVTQAFGRRGPEQTQGNFGDQELIRQGTDYKHWPQIAQFAPSASAFFGMSRIGMEVTPSGTWLTYTGAIKLDDKDPNFKDQVILLNKHIDAYKTFPPTEPKKDKKKKADETQALPQRQKKQQTVTLLPAADLDDFSKQLQQSMSSADSTQA

SEQ ID NO: 1135 - protein, 671 aa, Artificial Sequence
  Description of Artificial Sequence: Synthetic polypeptide
MHHHHHHGGSGSPILGYWKIKGLVQPTRLLLEYLEEKYEEHLYERDEGDKWRNKKFELGLEFPNLPYYIDGDVKLTQSMAIIRYIADKHNMLGGCPKERAEISMLEGAVLDIRYGVSRIAYSKDFETLKVDFLSKLPEMLKMFEDRLCHKTYLNGDHVTHPDFMLYDALDVVLYMDPMCLDAFPKLVCFKKRIEAIPQIDKYLKSSKYIAWPLQGWQATFGGGDHPPKSDLVPRGSPGIHRDGGSGENLYFQSSDNGPQNQRNAPRITFGGPSDSTGSNQNGERSGARSKQRRPQGLPNNTASWFTALTQHGKEDLKFPRGQGVPINTNSSPDDQIGYYRRATRRIRGGDGKMKDLSPRWYFYYLGTGPEAGLPYGANKDGIIWVATEGALNTPKDHIGTRNPANNAAIVLQLPQGTTLPKGFYAEGSRGGSQASSRSSSRSRNSSRNSTPGSSRGTSPARMAGNGGDAALALLLLDRLNQLESKMSGKGQQQQGQTVTKKSAAEASKKPRQKRTATKGYNVTQAFGRRGPEQTQGNFGDQDLIKLGTDYKHWPQIAQFAPSASAFFGMSRIGTRETPSGTWLTYTGAIKLDKKDPNFKDQVILLNKHIDAYKTFPPTEPKKDKKKKADETQALPQRQKKQQTVTLLPAADLDDFSKQLQQSMSSADSTQA

SEQ ID NO: 1136 - protein, 671 aa, Artificial Sequence
  Description of Artificial Sequence: Synthetic polypeptide
MHHHHHHGGSGSPILGYWKIKGLVQPTRLLLEYLEEKYEEHLYERDEGDKWRNKKFELGLEFPNLPYYIDGDVKLTQSMAIIRYIADKHNMLGGCPKERAEISMLEGAVLDIRYGVSRIAYSKDFETLKVDFLSKLPEMLKMFEDRLCHKTYLNGDHVTHPDFMLYDALDVVLYMDPMCLDAFPKLVCFKKRIEAIPQIDKYLKSSKYIAWPLQGWQATFGGGDHPPKSDLVPRGSPGIHRDGGSGENLYFQSSDNGPQNQRNAPRITFGGPSDSTGSNQNGERSGARSKQRRPQGLPNNTASWFTPLTQNGKEDLKFPPGQGVPINTNSSPDDQIGYYRRATRRIRGGDGKMKDLPPKWYFYYLGTGPHADLPYGQKHDGVFWVARPGALNTPKDHIGTRNPANNAAIPLQLPPGTKLPKGFYAEGSRGGSQASSRSSSRSRNSSRNSTPGSSRGTSPARMAGNGGDAALALLLLDRLNQLESKMSGKGQQQQGQTVTKKSAAEASKKPRQKRTATKAYNVTQAFGRRGPEQTQGNFGDQELIRQGTDYKHWPQIAQFAPSASAFFGMSRIGMEVTPSGTWLTYTGAIKLDDKDPNFKDQVILLNKHIDAYKTFPPTEPKKDKKKKADETQALPQRQKKQQTVTLLPAADLDDFSKQLQQSMSSADSTQA

SEQ ID NO: 1137 - protein, 671 aa, Artificial Sequence
  Description of Artificial Sequence: Synthetic polypeptide
MHHHHHHGGSGSPILGYWKIKGLVQPTRLLLEYLEEKYEEHLYERDEGDKWRNKKFELGLEFPNLPYYIDGDVKLTQSMAIIRYIADKHNMLGGCPKERAEISMLEGAVLDIRYGVSRIAYSKDFETLKVDFLSKLPEMLKMFEDRLCHKTYLNGDHVTHPDFMLYDALDVVLYMDPMCLDAFPKLVCFKKRIEAIPQIDKYLKSSKYIAWPLQGWQATFGGGDHPPKSDLVPRGSPGIHRDGGSGENLYFQSSDNGPQNQRNAPRITFGGPSDSTGSNQNGERSGARSKQRRPQGLPNNTASWFTALTQHGKEDLKFPRGQGVPINTNSSPDDQIGYYRRATRRIRGGDGKMKDLSPRWYFYYLGTGPEAGLPYGANKDGIIWVAAEGALNTPKDHIGTRNPANNAAIVLQLPQGTTLPKGFYAEGSRGGSQASSRSSSRSRNSSRNSTPGSSRGTSPARMAGNGGDAALALLLLDRLNQLESKMSGKGQQQQGQTVTKKSAAEASKKPRQKRTATKAYNVTQAFGRRGPEQTQGNFGDQELIRQGTDYKHWPQIAQFAPSASAFFGMSRIGMEVTPSGTWLTYTGAIKLDDKDPNFKDQVILLNKHIDAYKTFPPTEPKKDKKKKADETQALPQRQKKQQTVTLLPAADLDDFSKQLQQSMSSADSTQA

SEQ ID NO: 1138 - protein, 671 aa, Artificial Sequence
  Description of Artificial Sequence: Synthetic polypeptide
MHHHHHHGGSGSPILGYWKIKGLVQPTRLLLEYLEEKYEEHLYERDEGDKWRNKKFELGLEFPNLPYYIDGDVKLTQSMAIIRYIADKHNMLGGCPKERAEISMLEGAVLDIRYGVSRIAYSKDFETLKVDFLSKLPEMLKMFEDRLCHKTYLNGDHVTHPDFMLYDALDVVLYMDPMCLDAFPKLVCFKKRIEAIPQIDKYLKSSKYIAWPLQGWQATFGGGDHPPKSDLVPRGSPGIHRDGGSGENLYFQSSDNGPQNQRNAPRITFGGPSDSTGSNQNGERSGARSKQRRPQGLPNNTASWFTALTQHGKEDLKFPRGQGVPINTNSSPDDQIGYYRRAIRRIRGGDGKMKDLSPRWYFYYLGTGPEAGLPYGANKDGIIWVATEGALNTPKDHIGTRNPANNAAIVLQLPQGTTLPKGFYAEGSRGGSQASSRSSSRSRNSSRNSTPGSSRGTSPARMAGNGGDAALALLLLDRLNQLESKMSGKGQQQQGQTVTKKSAAEASKKPRQKRTATKAYNVTQAFGRRGPEQTQGNFGDQELIRQGTDYKHWPQIAQFAPSASAFFGMSRIGMEVTPSGTWLTYTGAIKLDDKDPNFKDQVILLNKHIDAYKTFPPTEPKKDKKKKADETQALPQRQKKQQTVTLLPAADLDDFSKQLQQSMSSADSTQA

SEQ ID NO: 1139 - protein, 671 aa, Artificial Sequence
  Description of Artificial Sequence: Synthetic polypeptide
MHHHHHHGGSGSPILGYWKIKGLVQPTRLLLEYLEEKYEEHLYERDEGDKWRNKKFELGLEFPNLPYYIDGDVKLTQSMAIIRYIADKHNMLGGCPKERAEISMLEGAVLDIRYGVSRIAYSKDFETLKVDFLSKLPEMLKMFEDRLCHKTYLNGDHVTHPDFMLYDALDVVLYMDPMCLDAFPKLVCFKKRIEAIPQIDKYLKSSKYIAWPLQGWQATFGGGDHPPKSDLVPRGSPGIHRDGGSGENLYFQSSDNGPQNQRNAPRITFGGPSDSTGSNQNGERSGARSKQRRPQGLPNNTASWFTALTQHGKEDLKFPRGQGVPINTNSSPDDQIGYYRRATRRIRGGDGKMKDLSPRWYFYYLGTGPEAGLPYGANKDGIIWVAVEGALNTPKDHIGTRNPANNAAIVLQLPQGTTLPKGFYAEGSRGGSQASSRSSSRSRNSSRNSTPGSSRGTSPARMAGNGGDAALALLLLDRLNQLESKMSGKGQQQQGQTVTKKSAAEASKKPRQKRTATKAYNVTQAFGRRGPEQTQGNFGDQELIRQGTDYKHWPQIAQFAPSASAFFGMSRIGMEVTPSGTWLTYTGAIKLDDKDPNFKDQVILLNKHIDAYKTFPPTEPKKDKKKKADETQALPQRQKKQQTVTLLPAADLDDFSKQLQQSMSSADSTQA

SEQ ID NO: 1140 - protein, 671 aa, Artificial Sequence
  Description of Artificial Sequence: Synthetic polypeptide
MHHHHHHGGSGSPILGYWKIKGLVQPTRLLLEYLEEKYEEHLYERDEGDKWRNKKFELGLEFPNLPYYIDGDVKLTQSMAIIRYIADKHNMLGGCPKERAEISMLEGAVLDIRYGVSRIAYSKDFETLKVDFLSKLPEMLKMFEDRLCHKTYLNGDHVTHPDFMLYDALDVVLYMDPMCLDAFPKLVCFKKRIEAIPQIDKYLKSSKYIAWPLQGWQATFGGGDHPPKSDLVPRGSPGIHRDGGSGENLYFQSSDNGPQNQRNAPRITFGGPSDSTGSNQNGERSGARSKQRRPQGLPNNTASWFTALTQHGKEDLKFPRGQGVPINTNSSPDDQIGYYRRATRRIRGGDGKMKDLSPRWYFYYLGTGPEAGLPYGANKDGIIWVATEGALNTPKDHIGTRNPANNAAIVLQLPQGTTLPKGFYAEGSRGGSQASSRSSSRSRNSSRNSTPGSSRGTSPARMAGNGGDAALALLLLDRLNQLESKMSGKGQQQQGQTVTKKSAAEMSKKPRQKRTATKGFNVTQAFGPRGPEQTQGNFGDAELIKKGTDYKHWPQIAQFAPSASAFFGMSRISSKETPSGTWLTYTGAIKLDKDDPNFKDQVILLNKHIDAYKTFPPTEPKKDKKKKADETQALPQRQKKQQTVTLLPAADLDDFSKQLQQSMSSADSTQA

SEQ ID NO: 1141 - protein, 671 aa, Artificial Sequence
  Description of Artificial Sequence: Synthetic polypeptide
MHHHHHHGGSGSPILGYWKIKGLVQPTRLLLEYLEEKYEEHLYERDEGDKWRNKKFELGLEFPNLPYYIDGDVKLTQSMAIIRYIADKHNMLGGCPKERAEISMLEGAVLDIRYGVSRIAYSKDFETLKVDFLSKLPEMLKMFEDRLCHKTYLNGDHVTHPDFMLYDALDVVLYMDPMCLDAFPKLVCFKKRIEAIPQIDKYLKSSKYIAWPLQGWQATFGGGDHPPKSDLVPRGSPGIHRDGGSGENLYFQSSDNGPQNQRNAPRITFGGPSDSTGSNQNGERSGARSKQRRPQGLPNNTASWFTALTQHGKEDLKFPRGQGVPINTNSSPDDQIGYYRRATRRIRGGDGKMKDLSPRWYFYYLGTGPEAGLPYGANKDGIIWVATEGALNTPKDHIGTRNPANNAAIVLQLPQGTTLPKGFYAEGSRGGSQASSRSSSRSRNSSRNSTPGSSRGTSPARMAGNGGDAALALLLLDRLNQLESKMSGKGQQQQGQTVTKKSAAEMSKKPRQKRTATKGCNVTQCFGPRGPEQTQGNFGDAELNKKGTDYKHWPQIAQFAPSASAFFGMSRISSKEQPSGTWLTYTGAIKLDKDDPNFKDQVILLNKHIDAYKTFPPTEPKKDKKKKADETQALPQRQKKQQTVTLLPAADLDDFSKQLQQSMSSADSTQA

SEQ ID NO: 1142 - protein, 671 aa, Artificial Sequence
  Description of Artificial Sequence: Synthetic polypeptide
MHHHHHHGGSGSPILGYWKIKGLVQPTRLLLEYLEEKYEEHLYERDEGDKWRNKKFELGLEFPNLPYYIDGDVKLTQSMAIIRYIADKHNMLGGCPKERAEISMLEGAVLDIRYGVSRIAYSKDFETLKVDFLSKLPEMLKMFEDRLCHKTYLNGDHVTHPDFMLYDALDVVLYMDPMCLDAFPKLVCFKKRIEAIPQIDKYLKSSKYIAWPLQGWQATFGGGDHPPKSDLVPRGSPGIHRDGGSGENLYFQSSDNGPQNQRNAPRITFGGPSDSTGSNQNGERSGARSKQRRPQGLPNNTASWFTALTQHGKEDLKFPRGQGVPINTNSSPDDQIGYYRRATRRIRGGDGKMKDLSPRWYFYYLGTGPEAGLPYGANKDGIIWVATEGALNTPKDHIGTRNPANNAAIVLQLPQGTTLPKGFYAEGSRGGSQASSRSSSRSRNSSRNSTPGSSRGTSPARMAGNGGDAALALLLLDRLNQLESKMSGKGQQQQGQTVTKKSAAEASKKPRQKRTATKAYNVTQAFGRRGPEQTQGNFGDQELIRQGTDYKHWPQIAQFAPSASAFFGMSRIGLEVTPSGTWLTYTGAIKLDDKDPNFKDQVILLNKHIDAYKTFPPTEPKKDKKKKADETQALPQRQKKQQTVTLLPAADLDDFSKQLQQSMSSADSTQA

SEQ ID NO: 1143 - protein, 671 aa, Artificial Sequence
  Description of Artificial Sequence: Synthetic polypeptide
MHHHHHHGGSGSPILGYWKIKGLVQPTRLLLEYLEEKYEEHLYERDEGDKWRNKKFELGLEFPNLPYYIDGDVKLTQSMAIIRYIADKHNMLGGCPKERAEISMLEGAVLDIRYGVSRIAYSKDFETLKVDFLSKLPEMLKMFEDRLCHKTYLNGDHVTHPDFMLYDALDVVLYMDPMCLDAFPKLVCFKKRIEAIPQIDKYLKSSKYIAWPLQGWQATFGGGDHPPKSDLVPRGSPGIHRDGGSGENLYFQSSDNGPQNQRNAPRITFGGPSDSTGSNQNGERSGARSKQRRPQGLPNNTASWFTALTQHGKEDLKFPRGQGVPINTNSSPDDQIGYYRRATRRIRGGDGKMKDLSPRWYFYYLGTGPEAGLPYGANKDGIIWVATEGALNTPKDHIGTRNPANNAAIVLQLPQGTTLPKGFYAEGSRGGSQASSRSSSRSRNSSRNSTPGSSRGTSPARMAGNGGDAALALLLLDRLNQLESKMSGKGQQQQGQTVTKKSAAEMSKKPRQKRTATKGYNVTQCFGPRGPEQTQGNFGDADLIKKGTDYKHWPQIAQFAPSASAFFGMSRISSKETPSGTWLTYTGAIKLDKDDPNFKDQVILLNKHIDAYKTFPPTEPKKDKKKKADETQALPQRQKKQQTVTLLPAADLDDFSKQLQQSMSSADSTQA

SEQ ID NO: 1144 - protein, 671 aa, Artificial Sequence
  Description of Artificial Sequence: Synthetic polypeptide
MHHHHHHGGSGSPILGYWKIKGLVQPTRLLLEYLEEKYEEHLYERDEGDKWRNKKFELGLEFPNLPYYIDGDVKLTQSMAIIRYIADKHNMLGGCPKERAEISMLEGAVLDIRYGVSRIAYSKDFETLKVDFLSKLPEMLKMFEDRLCHKTYLNGDHVTHPDFMLYDALDVVLYMDPMCLDAFPKLVCFKKRIEAIPQIDKYLKSSKYIAWPLQGWQATFGGGDHPPKSDLVPRGSPGIHRDGGSGENLYFQSSDNGPQNQRNAPRITFGGPSDSTGSNQNGERSGARSKQRRPQGLPNNTASWFTALTQHGKEDLKFPRGQGVPINTNSSPDDQIGYYRRATRRIRGGDGKMKDLSPRWYFYYLGTGPEAGLPYGANKDGIIWVATEGALNTPKDHIGTRNPANNAANVLQLPQGTTLPKGFYAEGSRGGSQASSRSSSRSRNSSRNSTPGSSRGTSPARMAGNGGDAALALLLLDRLNQLESKMSGKGQQQQGQTVTKKSAAEASKKPRQKRTATKAYNVTQAFGRRGPEQTQGNFGDQELIRQGTDYKHWPQIAQFAPSASAFFGMSRIGMEVTPSGTWLTYTGAIKLDDKDPNFKDQVILLNKHIDAYKTFPPTEPKKDKKKKADETQALPQRQKKQQTVTLLPAADLDDFSKQLQQSMSSADSTQA

SEQ ID NO: 1145 - protein, 671 aa, Artificial Sequence
  Description of Artificial Sequence: Synthetic polypeptide
MHHHHHHGGSGSPILGYWKIKGLVQPTRLLLEYLEEKYEEHLYERDEGDKWRNKKFELGLEFPNLPYYIDGDVKLTQSMAIIRYIADKHNMLGGCPKERAEISMLEGAVLDIRYGVSRIAYSKDFETLKVDFLSKLPEMLKMFEDRLCHKTYLNGDHVTHPDFMLYDALDVVLYMDPMCLDAFPKLVCFKKRIEAIPQIDKYLKSSKYIAWPLQGWQATFGGGDHPPKSDLVPRGSPGIHRDGGSGENLYFQSSDNGPQNQRNAPRITFGGPSDSTGSNQNGERSGARSKQRRPQGLPNNTASWFTALTQHGKEDLKFPRGQGVPINTNSSPDDQIGYYRRATRRIRGGDGKMKDLSPRWYFYYLGTGPEAGLPYGANHDGIIWVATEGALNTPKDHIGTRNPANNAAIVLQLPQGTTLPKGFYAEGSRGGSQASSRSSSRSRNSSRNSTPGSSRGTSPARMAGNGGDAALALLLLDRLNQLESKMSGKGQQQQGQTVTKKSAAEASKKPRQKRTATKAYNVTQAFGRRGPEQTQGNFGDQELIRQGTDYKHWPQIAQFAPSASAFFGMSRIGMEVTPSGTWLTYTGAIKLDDKDPNFKDQVILLNKHIDAYKTFPPTEPKKDKKKKADETQALPQRQKKQQTVTLLPAADLDDFSKQLQQSMSSADSTQA

SEQ ID NO: 1146 - protein, 671 aa, Artificial Sequence
  Description of Artificial Sequence: Synthetic polypeptide
MHHHHHHGGSGSPILGYWKIKGLVQPTRLLLEYLEEKYEEHLYERDEGDKWRNKKFELGLEFPNLPYYIDGDVKLTQSMAIIRYIADKHNMLGGCPKERAEISMLEGAVLDIRYGVSRIAYSKDFETLKVDFLSKLPEMLKMFEDRLCHKTYLNGDHVTHPDFMLYDALDVVLYMDPMCLDAFPKLVCFKKRIEAIPQIDKYLKSSKYIAWPLQGWQATFGGGDHPPKSDLVPRGSPGIHRDGGSGENLYFQSSDNGPQNQRNAPRITFGGPSDSTGSNQNGERSGARSKQRRPQGLPNNTASWYTALTQHGKEDLKFPRGQGVPINTNSSPDDQIGYYRRATRRIRGGDGKMKDLSPRWYFYYLGTGPEAGLPYGANKDGIIWVATEGALNTPKDHIGTRNPANNAAIVLQLPQGTTLPKGFYAEGSRGGSQASSRSSSRSRNSSRNSTPGSSRGTSPARMAGNGGDAALALLLLDRLNQLESKMSGKGQQQQGQTVTKKSAAEASKKPRQKRTATKAYNVTQAFGRRGPEQTQGNFGDQELIRQGTDYKHWPQIAQFAPSASAFFGMSRIGMEVTPSGTWLTYTGAIKLDDKDPNFKDQVILLNKHIDAYKTFPPTEPKKDKKKKADETQALPQRQKKQQTVTLLPAADLDDFSKQLQQSMSSADSTQA

SEQ ID NO: 1147 - protein, 671 aa, Artificial Sequence
  Description of Artificial Sequence: Synthetic polypeptide
MHHHHHHGGSGSPILGYWKIKGLVQPTRLLLEYLEEKYEEHLYERDEGDKWRNKKFELGLEFPNLPYYIDGDVKLTQSMAIIRYIADKHNMLGGCPKERAEISMLEGAVLDIRYGVSRIAYSKDFETLKVDFLSKLPEMLKMFEDRLCHKTYLNGDHVTHPDFMLYDALDVVLYMDPMCLDAFPKLVCFKKRIEAIPQIDKYLKSSKYIAWPLQGWQATFGGGDHPPKSDLVPRGSPGIHRDGGSGENLYFQSSDNGPQNQRNAPRITFGGPSDSTGSNQNGERSGARSKQRRPQGLPNNTASWFTALTQHGKEDLKFPRGQGVPINTNSSPDDQIGYYRRATRRIRGGDGKMKDLSPRWYFYYLGTGPEAGLPYGANKDGIIWVATEGALNTPKDHIGTRNPANNAAIVVQLPQGTTLPKGFYAEGSRGGSQASSRSSSRSRNSSRNSTPGSSRGTSPARMAGNGGDAALALLLLDRLNQLESKMSGKGQQQQGQTVTKKSAAEASKKPRQKRTATKAYNVTQAFGRRGPEQTQGNFGDQELIRQGTDYKHWPQIAQFAPSASAFFGMSRIGMEVTPSGTWLTYTGAIKLDDKDPNFKDQVILLNKHIDAYKTFPPTEPKKDKKKKADETQALPQRQKKQQTVTLLPAADLDDFSKQLQQSMSSADSTQA

SEQ ID NO: 1148 - protein, 671 aa, Artificial Sequence
  Description of Artificial Sequence: Synthetic polypeptide
MHHHHHHGGSGSPILGYWKIKGLVQPTRLLLEYLEEKYEEHLYERDEGDKWRNKKFELGLEFPNLPYYIDGDVKLTQSMAIIRYIADKHNMLGGCPKERAEISMLEGAVLDIRYGVSRIAYSKDFETLKVDFLSKLPEMLKMFEDRLCHKTYLNGDHVTHPDFMLYDALDVVLYMDPMCLDAFPKLVCFKKRIEAIPQIDKYLKSSKYIAWPLQGWQATFGGGDHPPKSDLVPRGSPGIHRDGGSGENLYFQSSDNGPQNQRNAPRITFGGPSDSTGSNQNGERSGARSKQRRPQGLPNNTASWFTALTQHGKEDLKFPRGQGVPINTNSSPDDQIGYYRRATRRKRGGDGKMKDLSPRWYFYYLGTGPEAGLPYGANKDGIIWVATEGALNTPKDHIGTRNPANNAAIVLQLPQGTTLPKGFYAEGSRGGSQASSRSSSRSRNSSRNSTPGSSRGTSPARMAGNGGDAALALLLLDRLNQLESKMSGKGQQQQGQTVTKKSAAEASKKPRQKRTATKAYNVTQAFGRRGPEQTQGNFGDQELIRQGTDYKHWPQIAQFAPSASAFFGMSRIGMEVTPSGTWLTYTGAIKLDDKDPNFKDQVILLNKHIDAYKTFPPTEPKKDKKKKADETQALPQRQKKQQTVTLLPAADLDDFSKQLQQSMSSADSTQA

SEQ ID NO: 1149 - protein, 671 aa, Artificial Sequence
  Description of Artificial Sequence: Synthetic polypeptide
MHHHHHHGGSGSPILGYWKIKGLVQPTRLLLEYLEEKYEEHLYERDEGDKWRNKKFELGLEFPNLPYYIDGDVKLTQSMAIIRYIADKHNMLGGCPKERAEISMLEGAVLDIRYGVSRIAYSKDFETLKVDFLSKLPEMLKMFEDRLCHKTYLNGDHVTHPDFMLYDALDVVLYMDPMCLDAFPKLVCFKKRIEAIPQIDKYLKSSKYIAWPLQGWQATFGGGDHPPKSDLVPRGSPGIHRDGGSGENLYFQSSDNGPQNQRNAPRITFGGPSDSTGSNQNGERSGARSKQRRPQGLPNNTASWFTALTQHGKEDLKFPRGQGVPINTNSSPDDQIGYYRRATRRIRGGDGKMKDLSPRWYFYYLGTGPEAGLPYGANKDGIIWVATEGALNTPKDHIGTRNPANNAAIVLQLPQGTTLPKGFYAEGSRGGSQASSRSSSRSRNSSRNSTPGSSRGTSPARMAGNGGDAALALLLLDRLNQLESKMSGKGQQQQGQTVTKKSAAEMSKKPRWKRTPTKEYNVTQAFGPRGPKDTQGNFGDAELIKQGTDYKHWPQIAQFVPSAAAFFFMSRISMKETPDGVWLTYTGTIKLDKDDPNFDDQVKLLNKHIDAYKTFPPTEPKKDKKKKADETQALPQRQKKQQTVTLLPAADLDDFSKQLQQSMSSADSTQA

SEQ ID NO: 1150 - protein, 671 aa, Artificial Sequence
  Description of Artificial Sequence: Synthetic polypeptide
MHHHHHHGGSGSPILGYWKIKGLVQPTRLLLEYLEEKYEEHLYERDEGDKWRNKKFELGLEFPNLPYYIDGDVKLTQSMAIIRYIADKHNMLGGCPKERAEISMLEGAVLDIRYGVSRIAYSKDFETLKVDFLSKLPEMLKMFEDRLCHKTYLNGDHVTHPDFMLYDALDVVLYMDPMCLDAFPKLVCFKKRIEAIPQIDKYLKSSKYIAWPLQGWQATFGGGDHPPKSDLVPRGSPGIHRDGGSGENLYFQSSDNGPQNQRNAPRITFGGPSDSTGSNQNGERSGARSKQRRPQGLPNNTASWFTALTQHGKEDLKFPRGQGVPINTNSSPDDQIGYYRRATRRIRGGDGKMKDLSPRWYFYYLGTGPEAGLPYGANKDGIIWVATEGALNTPKDHIGTRNPANNAAIVLQLPQGTTLPKGFYAEGSRGGSQASSRSSSRSRNSSRNSTPGSSRGTSPARMAGNGGDAALALLLLDRLNQLESKMSGKGQQQQGQTVTKKSAAEMSKKPRWKRTPTKEYNVTQAFGPRGPKDTQGNFGDAELIKQGTDYKHWPQIAQFVPSAAAFFFMSRIGMKETPDGVWLTYTGTIKLDKDDPNFDDQVKLLNKHIDAYKTFPPTEPKKDKKKKADETQALPQRQKKQQTVTLLPAADLDDFSKQLQQSMSSADSTQA

SEQ ID NO: 1151 - protein, 671 aa, Artificial Sequence
  Description of Artificial Sequence: Synthetic polypeptide
MHHHHHHGGSGSPILGYWKIKGLVQPTRLLLEYLEEKYEEHLYERDEGDKWRNKKFELGLEFPNLPYYIDGDVKLTQSMAIIRYIADKHNMLGGCPKERAEISMLEGAVLDIRYGVSRIAYSKDFETLKVDFLSKLPEMLKMFEDRLCHKTYLNGDHVTHPDFMLYDALDVVLYMDPMCLDAFPKLVCFKKRIEAIPQIDKYLKSSKYIAWPLQGWQATFGGGDHPPKSDLVPRGSPGIHRDGGSGENLYFQSSDNGPQNQRNAPRITFGGPSDSTGSNQNGERSGARSKQRRPQGLPNNTASWFTALTQHGKEDLKFPRGQGVPINPNSSPDDQIGYYRRATRRIRGGDGKMKDLSPRWYFYYLGTGPEAGLPYGANKDGIIWVATEGALNTPKDHIGTRNPANNAAIVLQLPQGTTLPKGFYAEGSRGGSQASSRSSSRSRNSSRNSTPGSSRGTSPARMAGNGGDAALALLLLDRLNQLESKMSGKGQQQQGQTVTKKSAAEASKKPRQKRTATKAYNVTQAFGRRGPEQTQGNFGDQELIRQGTDYKHWPQIAQFAPSASAFFGMSRIGMEVTPSGTWLTYTGAIKLDDKDPNFKDQVILLNKHIDAYKTFPPTEPKKDKKKKADETQALPQRQKKQQTVTLLPAADLDDFSKQLQQSMSSADSTQA

SEQ ID NO: 1152 - protein, 671 aa, Artificial Sequence
  Description of Artificial Sequence: Synthetic polypeptide
MHHHHHHGGSGSPILGYWKIKGLVQPTRLLLEYLEEKYEEHLYERDEGDKWRNKKFELGLEFPNLPYYIDGDVKLTQSMAIIRYIADKHNMLGGCPKERAEISMLEGAVLDIRYGVSRIAYSKDFETLKVDFLSKLPEMLKMFEDRLCHKTYLNGDHVTHPDFMLYDALDVVLYMDPMCLDAFPKLVCFKKRIEAIPQIDKYLKSSKYIAWPLQGWQATFGGGDHPPKSDLVPRGSPGIHRDGGSGENLYFQSSDNGPQNQRNAPRITFGGPSDSTGSNQNGERSGARSKQRRPQGLPNNTASWFTALTQHGKEDLKFPRGQGVPINTNSSPDDQIGYYRRATRRIRGGDGKMKDLSPRWYFYYLGTGPEAGLPYGANKDGIIWVATEGALNTPKDHIGTRNPANNAADVLQLPQGTTLPKGFYAEGSRGGSQASSRSSSRSRNSSRNSTPGSSRGTSPARMAGNGGDAALALLLLDRLNQLESKMSGKGQQQQGQTVTKKSAAEASKKPRQKRTATKAYNVTQAFGRRGPEQTQGNFGDQELIRQGTDYKHWPQIAQFAPSASAFFGMSRIGMEVTPSGTWLTYTGAIKLDDKDPNFKDQVILLNKHIDAYKTFPPTEPKKDKKKKADETQALPQRQKKQQTVTLLPAADLDDFSKQLQQSMSSADSTQA

SEQ ID NO: 1153 - protein, 671 aa, Artificial Sequence
  Description of Artificial Sequence: Synthetic polypeptide
MHHHHHHGGSGSPILGYWKIKGLVQPTRLLLEYLEEKYEEHLYERDEGDKWRNKKFELGLEFPNLPYYIDGDVKLTQSMAIIRYIADKHNMLGGCPKERAEISMLEGAVLDIRYGVSRIAYSKDFETLKVDFLSKLPEMLKMFEDRLCHKTYLNGDHVTHPDFMLYDALDVVLYMDPMCLDAFPKLVCFKKRIEAIPQIDKYLKSSKYIAWPLQGWQATFGGGDHPPKSDLVPRGSPGIHRDGGSGENLYFQSSDNGPQNQRNAPRITFGGPSDSTGSNQNGERSGARSKQRRPQGLPNNTASWFTALTQNGKEDLKFPPGQGVPINTNSSPDDQIGYYRRATRRIRGGDGKMKDLPPRWYFYYLGTGPHADLPYGQKQDGVFWVARPGALNTPKDHIGTRNPANNAAIPLQLPPGTKLPKGFYAEGSRGGSQASSRSSSRSRNSSRNSTPGSSRGTSPARMAGNGGDAALALLLLDRLNQLESKMSGKGQQQQGQTVTKKSAAEASKKPRQKRTATKAYNVTQAFGRRGPEQTQGNFGDQELIRQGTDYKHWPQIAQFAPSASAFFGMSRIGMEVTPSGTWLTYTGAIKLDDKDPNFKDQVILLNKHIDAYKTFPPTEPKKDKKKKADETQALPQRQKKQQTVTLLPAADLDDFSKQLQQSMSSADSTQA

SEQ ID NO: 1154 - protein, 671 aa, Artificial Sequence
  Description of Artificial Sequence: Synthetic polypeptide
MHHHHHHGGSGSPILGYWKIKGLVQPTRLLLEYLEEKYEEHLYERDEGDKWRNKKFELGLEFPNLPYYIDGDVKLTQSMAIIRYIADKHNMLGGCPKERAEISMLEGAVLDIRYGVSRIAYSKDFETLKVDFLSKLPEMLKMFEDRLCHKTYLNGDHVTHPDFMLYDALDVVLYMDPMCLDAFPKLVCFKKRIEAIPQIDKYLKSSKYIAWPLQGWQATFGGGDHPPKSDLVPRGSPGIHRDGGSGENLYFQSSDNGPQNQRNAPRITFGGPSDSTGSNQNGERSGARSKQRRPQGLPNNTASWFTGLTQQGKEDLKFPPGQGVPINTNSSPDDQIGYYRRATRRIRGGDGKMKDLPPKWYFYYLGTGPHADLPYGQKQDGVFWVARPGALNTPKDHIGTRNPANNAAIPLQLPPGTKLPKGFYAEGSRGGSQASSRSSSRSRNSSRNSTPGSSRGTSPARMAGNGGDAALALLLLDRLNQLESKMSGKGQQQQGQTVTKKSAAEASKKPRQKRTATKAYNVTQAFGRRGPEQTQGNFGDQELIRQGTDYKHWPQIAQFAPSASAFFGMSRIGMEVTPSGTWLTYTGAIKLDDKDPNFKDQVILLNKHIDAYKTFPPTEPKKDKKKKADETQALPQRQKKQQTVTLLPAADLDDFSKQLQQSMSSADSTQA

SEQ ID NO: 1155 - protein, 671 aa, Artificial Sequence
  Description of Artificial Sequence: Synthetic polypeptide
MHHHHHHGGSGSPILGYWKIKGLVQPTRLLLEYLEEKYEEHLYERDEGDKWRNKKFELGLEFPNLPYYIDGDVKLTQSMAIIRYIADKHNMLGGCPKERAEISMLEGAVLDIRYGVSRIAYSKDFETLKVDFLSKLPEMLKMFEDRLCHKTYLNGDHVTHPDFMLYDALDVVLYMDPMCLDAFPKLVCFKKRIEAIPQIDKYLKSSKYIAWPLQGWQATFGGGDHPPKSDLVPRGSPGIHRDGGSGENLYFQSSDNGPQNQRNAPRITFGGPSDSTGSNQNGERSGARSKQRRPQGLPNNTASWFTALTQHGKEDLKFPRGQGVPINTNSSPDDQIGYYRRATRRIRGGDGKMKDLSPRWYFYYLGTGPEAGLPYGANKDGIIWVATEGALNTPKDHIGTRNPANNAAIVLQLPQGTTLPKGFYAEGSRGGSQASSRSSSRSRNSSRNSTPGSSRGTSPARMAGNGGDAALALLLLDRLNQLESKMSGKGQQQQGQTVTKKSAAEMSKKPRQKRTATKGCNVTQCFGPRGPEQTQGNFGDAELIKKGVDYKHWPQIAQFAPSASAFFGMSRISSKETPSGTWLTYTGAIKLDKDDPNFKDQVILLNKHIDAYKTFPPTEPKKDKKKKADETQALPQRQKKQQTVTLLPAADLDDFSKQLQQSMSSADSTQA

SEQ ID NO: 1156 - protein, 671 aa, Artificial Sequence
  Description of Artificial Sequence: Synthetic polypeptide
MHHHHHHGGSGSPILGYWKIKGLVQPTRLLLEYLEEKYEEHLYERDEGDKWRNKKFELGLEFPNLPYYIDGDVKLTQSMAIIRYIADKHNMLGGCPKERAEISMLEGAVLDIRYGVSRIAYSKDFETLKVDFLSKLPEMLKMFEDRLCHKTYLNGDHVTHPDFMLYDALDVVLYMDPMCLDAFPKLVCFKKRIEAIPQIDKYLKSSKYIAWPLQGWQATFGGGDHPPKSDLVPRGSPGIHRDGGSGENLYFQSSDNGPQNQRNAPRITFGGPSDSTGSNQNGERSGARSKQRRPQGLPNNTASWFTALTQHGKEDLKFPRGQGVPINTNSSPDDQIGYYRRATRRIRGGDGKMKDLSPRWYFYYLGTGPEAGLPYGANKDGIIWVATEGALNTPKDHIGTRNPANNAAIVLQLPQGTTLPKGFYAEGSRGGSQASSRSSSRSRNSSRNSTPGSSRGTSPARMAGNGGDAALALLLLDRLNQLESKMSGKGQQQQGQTVTKKSAAEASKKPRQKRTATKAYNVTQAFGRRGPEQTQGNFGDQELIRQGTDYKHWPQIAQFAPSASAFFGMSRIGMTVTPSGTWLTYTGAIKLDDKDPNFKDQVILLNKHIDAYKTFPPTEPKKDKKKKADETQALPQRQKKQQTVTLLPAADLDDFSKQLQQSMSSADSTQA

SEQ ID NO: 1157 - protein, 671 aa, Artificial Sequence
  Description of Artificial Sequence: Synthetic polypeptide
MHHHHHHGGSGSPILGYWKIKGLVQPTRLLLEYLEEKYEEHLYERDEGDKWRNKKFELGLEFPNLPYYIDGDVKLTQSMAIIRYIADKHNMLGGCPKERAEISMLEGAVLDIRYGVSRIAYSKDFETLKVDFLSKLPEMLKMFEDRLCHKTYLNGDHVTHPDFMLYDALDVVLYMDPMCLDAFPKLVCFKKRIEAIPQIDKYLKSSKYIAWPLQGWQATFGGGDHPPKSDLVPRGSPGIHRDGGSGENLYFQSSDNGPQNQRNAPRITFGGPSDSTGSNQNGERSGARSKQRRPQGLPNNTASWFTALTQHGKEDLKFPRGQGVPINTNSSPDDQIGYYRRATRRIRGGDGKMKDLSPRWYFYYLGTGPEAGLPYGANKDGIIWVATEGALNTPKDHIGTRNPANNAAIVLQLPQGTTLPKGFYAEGSRGGSQASSRSSSRSRNSSRNSTPGSSRGTSPARMAGNGGDAALALLLLDRLNQLESKMSGKGQQQQGQTVTKKSAAEASKKPRQKRTATKAYNVTQAFGRRGPEQTQGNFGDQELIEQGTDYKHWPQIAQFAPSASAFFGMSRIGMEVTPSGTWLTYTGAIKLDDKDPNFKDQVILLNKHIDAYKTFPPTEPKKDKKKKADETQALPQRQKKQQTVTLLPAADLDDFSKQLQQSMSSADSTQA

SEQ ID NO: 1158 - protein, 671 aa, Artificial Sequence
  Description of Artificial Sequence: Synthetic polypeptide
MHHHHHHGGSGSPILGYWKIKGLVQPTRLLLEYLEEKYEEHLYERDEGDKWRNKKFELGLEFPNLPYYIDGDVKLTQSMAIIRYIADKHNMLGGCPKERAEISMLEGAVLDIRYGVSRIAYSKDFETLKVDFLSKLPEMLKMFEDRLCHKTYLNGDHVTHPDFMLYDALDVVLYMDPMCLDAFPKLVCFKKRIEAIPQIDKYLKSSKYIAWPLQGWQATFGGGDHPPKSDLVPRGSPGIHRDGGSGENLYFQSSDNGPQNQRNAPRITFGGPSDSTGSNQNGERSGARSKQRRPQGLPNNTASWFTALTQHGKEDLKFPRGQGVPINTNSSPDDQIGYYRRATRRIRGGDGKMKDLSPRWYFYYLGTGPEAGLPYGANKDGIIWVATEGALNTPKDHIGTRNPANNAAIVLQLPQGTTLPKGFYAEGSRGGSQASSRSSSRSRNSSRNSTPGSSRGTSPARMAGNGGDAALALLLLDRLNQLESKMSGKGQQQQGQTVTKKTAAEASKKPRQKRTATKAYNVTQAFGRRGPEQTQGNFGDQELIRQGTDYKHWPQIAQFAPSASAFFGMSRIGMEVTPSGTWLTYTGAIKLDDKDPNFKDQVILLNKHIDAYKTFPPTEPKKDKKKKADETQALPQRQKKQQTVTLLPAADLDDFSKQLQQSMSSADSTQA

SEQ ID NO: 1159 - protein, 671 aa, Artificial Sequence
  Description of Artificial Sequence: Synthetic polypeptide
MHHHHHHGGSGSPILGYWKIKGLVQPTRLLLEYLEEKYEEHLYERDEGDKWRNKKFELGLEFPNLPYYIDGDVKLTQSMAIIRYIADKHNMLGGCPKERAEISMLEGAVLDIRYGVSRIAYSKDFETLKVDFLSKLPEMLKMFEDRLCHKTYLNGDHVTHPDFMLYDALDVVLYMDPMCLDAFPKLVCFKKRIEAIPQIDKYLKSSKYIAWPLQGWQATFGGGDHPPKSDLVPRGSPGIHRDGGSGENLYFQSSDNGPQNQRNAPRITFGGPSDSTGSNQNGERSGARSKQRRPQGLPNNTASWFTALTQHGKEDLKFPRGQGVPINTNSTPDDQIGYYRRATRRIRGGDGKMKDLSPRWYFYYLGTGPEAGLPYGANKDGIIWVATEGALNTPKDHIGTRNPANNAAIVLQLPQGTTLPKGFYAEGSRGGSQASSRSSSRSRNSSRNSTPGSSRGTSPARMAGNGGDAALALLLLDRLNQLESKMSGKGQQQQGQTVTKKSAAEASKKPRQKRTATKAYNVTQAFGRRGPEQTQGNFGDQELIRQGTDYKHWPQIAQFAPSASAFFGMSRIGMEVTPSGTWLTYTGAIKLDDKDPNFKDQVILLNKHIDAYKTFPPTEPKKDKKKKADETQALPQRQKKQQTVTLLPAADLDDFSKQLQQSMSSADSTQA

SEQ ID NO: 1160 - protein, 671 aa, Artificial Sequence
  Description of Artificial Sequence: Synthetic polypeptide
MHHHHHHGGSGSPILGYWKIKGLVQPTRLLLEYLEEKYEEHLYERDEGDKWRNKKFELGLEFPNLPYYIDGDVKLTQSMAIIRYIADKHNMLGGCPKERAEISMLEGAVLDIRYGVSRIAYSKDFETLKVDFLSKLPEMLKMFEDRLCHKTYLNGDHVTHPDFMLYDALDVVLYMDPMCLDAFPKLVCFKKRIEAIPQIDKYLKSSKYIAWPLQGWQATFGGGDHPPKSDLVPRGSPGIHRDGGSGENLYFQSSDNGPQNQRNAPRITFGGPSDSTGSNQNGERSGARSKQRRPQGLPNNTASWFTALTQHGKEDLKFPRGQGVPINTNSSPDDQIGYYRRATRRIRGGDGKMKDLSPRWYFYYLGTGPEAGLPYGANKDGIIWVATEGALNTPKDHIGTRNPANNAAIVLQLPQGTTLPKGFYAEGSRGGSQASSRSSSRSRNSSRNSTPGSSRGTSPARMAGNGGDAALALLLLDRLNQLESKMSGKGQQQQGQTVTKKSAAEASKKPRQKRTATKAYNVTQAFGRRGPEQTQGNFGDQELIRQGTDYKHWPQIAQFAPSASAFFGMSRIGMEVTPSGTWLTYTGAIKLDDKDPNFNDQVILLNKHIDAYKTFPPTEPKKDKKKKADETQALPQRQKKQQTVTLLPAADLDDFSKQLQQSMSSADSTQA

SEQ ID NO: 1161 - protein, 671 aa, Artificial Sequence
  Description of Artificial Sequence: Synthetic polypeptide
MHHHHHHGGSGSPILGYWKIKGLVQPTRLLLEYLEEKYEEHLYERDEGDKWRNKKFELGLEFPNLPYYIDGDVKLTQSMAIIRYIADKHNMLGGCPKERAEISMLEGAVLDIRYGVSRIAYSKDFETLKVDFLSKLPEMLKMFEDRLCHKTYLNGDHVTHPDFMLYDALDVVLYMDPMCLDAFPKLVCFKKRIEAIPQIDKYLKSSKYIAWPLQGWQATFGGGDHPPKSDLVPRGSPGIHRDGGSGENLYFQSSDNGPQNQRNAPRITFGGPSDSTGSNQNGERSGARSKQRRPQGLPNNTASWFTALTQHGKEDLKFPRGQGVPINTNSSPDDQIGYYRRATRRIRGGDGKMKDLSPRWYFYYLGTGPEAGLPYGANKDGIIWVATEGALNTPKDHIGTRNPANKAAIVLQLPQGTTLPKGFYAEGSRGGSQASSRSSSRSRNSSRNSTPGSSRGTSPARMAGNGGDAALALLLLDRLNQLESKMSGKGQQQQGQTVTKKSAAEASKKPRQKRTATKAYNVTQAFGRRGPEQTQGNFGDQELIRQGTDYKHWPQIAQFAPSASAFFGMSRIGMEVTPSGTWLTYTGAIKLDDKDPNFKDQVILLNKHIDAYKTFPPTEPKKDKKKKADETQALPQRQKKQQTVTLLPAADLDDFSKQLQQSMSSADSTQA

SEQ ID NO: 1162 - protein, 671 aa, Artificial Sequence
  Description of Artificial Sequence: Synthetic polypeptide
MHHHHHHGGSGSPILGYWKIKGLVQPTRLLLEYLEEKYEEHLYERDEGDKWRNKKFELGLEFPNLPYYIDGDVKLTQSMAIIRYIADKHNMLGGCPKERAEISMLEGAVLDIRYGVSRIAYSKDFETLKVDFLSKLPEMLKMFEDRLCHKTYLNGDHVTHPDFMLYDALDVVLYMDPMCLDAFPKLVCFKKRIEAIPQIDKYLKSSKYIAWPLQGWQATFGGGDHPPKSDLVPRGSPGIHRDGGSGENLYFQSSDNGPQNQRNAPRITFGGPSDSTGSNQNGERSGARSKQRRPQGLPNNTASWFTALTQHGKEDLKFPRGQGVPINTNSSPDDQIGYYRRATRRIRGGDGKMKDLSPRWYFYYLGTGPEAGLPYGANKDGIIWVATEGALNTPKDHIGTRNPANNAAIVLQLPNGTTLPKGFYAEGSRGGSQASSRSSSRSRNSSRNSTPGSSRGTSPARMAGNGGDAALALLLLDRLNQLESKMSGKGQQQQGQTVTKKSAAEASKKPRQKRTATKAYNVTQAFGRRGPEQTQGNFGDQELIRQGTDYKHWPQIAQFAPSASAFFGMSRIGMEVTPSGTWLTYTGAIKLDDKDPNFKDQVILLNKHIDAYKTFPPTEPKKDKKKKADETQALPQRQKKQQTVTLLPAADLDDFSKQLQQSMSSADSTQA

SEQ ID NO: 1163 - protein, 671 aa, Artificial Sequence
  Description of Artificial Sequence: Synthetic polypeptide
MHHHHHHGGSGSPILGYWKIKGLVQPTRLLLEYLEEKYEEHLYERDEGDKWRNKKFELGLEFPNLPYYIDGDVKLTQSMAIIRYIADKHNMLGGCPKERAEISMLEGAVLDIRYGVSRIAYSKDFETLKVDFLSKLPEMLKMFEDRLCHKTYLNGDHVTHPDFMLYDALDVVLYMDPMCLDAFPKLVCFKKRIEAIPQIDKYLKSSKYIAWPLQGWQATFGGGDHPPKSDLVPRGSPGIHRDGGSGENLYFQSSDNGPQNQRNAPRITFGGPSDSTGSNQNGERSGARSKQRRPQGLPNNTASWFTALTQHGKEDLKFPRGQGVPINTNSSPDDQIGYYRRATRRIRGGDGKMKDLSPRWYFYYLGTGPEAGLPYGANKDGIIWVATEGALNTPKDHIGTRNPANNAAIVLQLPQGTTLPKGFYAEGSRGGSQASSRSSSRSRNSSRNSTPGSSRGTSPARMAGNGGDAALALLLLDRLNQLESKMSGKGQQQQGQTVTKKSAAEASKKPRQKRTATKAYNVTQAFGRRGPEQTQGNFGDQELIRQGTDYKHWPQIAQFAPSASAFFGMSRIGMEVTPSGTWLTYTGAIKLDDKDPNFKKQVILLNKHIDAYKTFPPTEPKKDKKKKADETQALPQRQKKQQTVTLLPAADLDDFSKQLQQSMSSADSTQA

SEQ ID NO: 1164 - protein, 671 aa, Artificial Sequence
  Description of Artificial Sequence: Synthetic polypeptide
MHHHHHHGGSGSPILGYWKIKGLVQPTRLLLEYLEEKYEEHLYERDEGDKWRNKKFELGLEFPNLPYYIDGDVKLTQSMAIIRYIADKHNMLGGCPKERAEISMLEGAVLDIRYGVSRIAYSKDFETLKVDFLSKLPEMLKMFEDRLCHKTYLNGDHVTHPDFMLYDALDVVLYMDPMCLDAFPKLVCFKKRIEAIPQIDKYLKSSKYIAWPLQGWQATFGGGDHPPKSDLVPRGSPGIHRDGGSGENLYFQSSDNGPQNQRNAPRITFGGPSDSTGSNQNGERSGARSKQRRPQGLPNNTASWFTALTQHGKEDLKFPRGQGVPINTNSSPDDQIGYYRRATRRIRGGDGKMKDLSPRWYFYYLGTGPEAGLPYGANKDGIIWVATEGALNTPKDHIGTRNPANNAAIVLQLPQGTTLPKGFYAEGSRGGSQASSRSSSRSRNSSRNSTPGSSRGTSPARMAGNGGDAALALLLLDRLNQLESKMSGKGQQQQGQTVTKKSAAEASKKPRQKRTATKAYNVTQAFGRRGPEQTQGNFGDQELIRQGTDYKHWPQIAQFAPSAQAFFGMSRIGMEVTPSGTWLTYTGAIKLDDKDPNFKDQVILLNKHIDAYKTFPPTEPKKDKKKKADETQALPQRQKKQQTVTLLPAADLDDFSKQLQQSMSSADSTQA

SEQ ID NO: 1165 - protein, 671 aa, Artificial Sequence
  Description of Artificial Sequence: Synthetic polypeptide
MHHHHHHGGSGSPILGYWKIKGLVQPTRLLLEYLEEKYEEHLYERDEGDKWRNKKFELGLEFPNLPYYIDGDVKLTQSMAIIRYIADKHNMLGGCPKERAEISMLEGAVLDIRYGVSRIAYSKDFETLKVDFLSKLPEMLKMFEDRLCHKTYLNGDHVTHPDFMLYDALDVVLYMDPMCLDAFPKLVCFKKRIEAIPQIDKYLKSSKYIAWPLQGWQATFGGGDHPPKSDLVPRGSPGIHRDGGSGENLYFQSSDNGPQNQRNAPRITFGGPSDSTGSNQNGERSGARSKQRRPQGLPNNTASWFTALTQHGKEDLKFPRGQGVPINTNSSPDDQIGYYRRATRRIRGGDGKMKDLSPRWYFYYLGTGPEAGLPYGANKDGIIWVATEGALNTPKDHIGTRNPANNAAIVLQLPQGTTLPKGFYAEGSRGGSQASSRSSSRSRNSSRNSTPGSSRGTSPARMAGNGGDAALALLLLDRLNQLESKMSGKGQQQQGQTVTKKSAAEAAKKPRQKRTATKAYNVTQAFGRRGPEQTQGNFGDQELIRQGTDYKHWPQIAQFAPSASAFFGMSRIGMEVTPSGTWLTYTGAIKLDDKDPNFKDQVILLNKHIDAYKTFPPTEPKKDKKKKADETQALPQRQKKQQTVTLLPAADLDDFSKQLQQSMSSADSTQA

SEQ ID NO: 1166 - protein, 671 aa, Artificial Sequence
  Description of Artificial Sequence: Synthetic polypeptide
MHHHHHHGGSGSPILGYWKIKGLVQPTRLLLEYLEEKYEEHLYERDEGDKWRNKKFELGLEFPNLPYYIDGDVKLTQSMAIIRYIADKHNMLGGCPKERAEISMLEGAVLDIRYGVSRIAYSKDFETLKVDFLSKLPEMLKMFEDRLCHKTYLNGDHVTHPDFMLYDALDVVLYMDPMCLDAFPKLVCFKKRIEAIPQIDKYLKSSKYIAWPLQGWQATFGGGDHPPKSDLVPRGSPGIHRDGGSGENLYFQSSDNGPQNQRNAPRITFGGPSDSTGSNQNGERSGARSKQRRPQGLPNNTASWFTALTQHGKEDLKFPRGQGVPINQNSSPDDQIGYYRRATRRIRGGDGKMKDLSPRWYFYYLGTGPEAGLPYGANKDGIIWVATEGALNTPKDHIGTRNPANNAAIVLQLPQGTTLPKGFYAEGSRGGSQASSRSSSRSRNSSRNSTPGSSRGTSPARMAGNGGDAALALLLLDRLNQLESKMSGKGQQQQGQTVTKKSAAEASKKPRQKRTATKAYNVTQAFGRRGPEQTQGNFGDQELIRQGTDYKHWPQIAQFAPSASAFFGMSRIGMEVTPSGTWLTYTGAIKLDDKDPNFKDQVILLNKHIDAYKTFPPTEPKKDKKKKADETQALPQRQKKQQTVTLLPAADLDDFSKQLQQSMSSADSTQA

SEQ ID NO: 1167 - protein, 671 aa, Artificial Sequence
  Description of Artificial Sequence: Synthetic polypeptide
MHHHHHHGGSGSPILGYWKIKGLVQPTRLLLEYLEEKYEEHLYERDEGDKWRNKKFELGLEFPNLPYYIDGDVKLTQSMAIIRYIADKHNMLGGCPKERAEISMLEGAVLDIRYGVSRIAYSKDFETLKVDFLSKLPEMLKMFEDRLCHKTYLNGDHVTHPDFMLYDALDVVLYMDPMCLDAFPKLVCFKKRIEAIPQIDKYLKSSKYIAWPLQGWQATFGGGDHPPKSDLVPRGSPGIHRDGGSGENLYFQSSDNGPQNQRNAPRITFGGPSDSTGSNQNGERSGARSKQRRPQGLPNNTASWFTALTQHGKQDLKFPRGQGVPINTNSSPDDQIGYYRRATRRIRGGDGKMKDLSPRWYFYYLGTGPEAGLPYGANKDGIIWVATEGALNTPKDHIGTRNPANNAAIVLQLPQGTTLPKGFYAEGSRGGSQASSRSSSRSRNSSRNSTPGSSRGTSPARMAGNGGDAALALLLLDRLNQLESKMSGKGQQQQGQTVTKKSAAEASKKPRQKRTATKAYNVTQAFGRRGPEQTQGNFGDQELIRQGTDYKHWPQIAQFAPSASAFFGMSRIGMEVTPSGTWLTYTGAIKLDDKDPNFKDQVILLNKHIDAYKTFPPTEPKKDKKKKADETQALPQRQKKQQTVTLLPAADLDDFSKQLQQSMSSADSTQA

SEQ ID NO: 1168 - protein, 671 aa, Artificial Sequence
  Description of Artificial Sequence: Synthetic polypeptide
MHHHHHHGGSGSPILGYWKIKGLVQPTRLLLEYLEEKYEEHLYERDEGDKWRNKKFELGLEFPNLPYYIDGDVKLTQSMAIIRYIADKHNMLGGCPKERAEISMLEGAVLDIRYGVSRIAYSKDFETLKVDFLSKLPEMLKMFEDRLCHKTYLNGDHVTHPDFMLYDALDVVLYMDPMCLDAFPKLVCFKKRIEAIPQIDKYLKSSKYIAWPLQGWQATFGGGDHPPKSDLVPRGSPGIHRDGGSGENLYFQSSDNGPQNQRNAPRITFGGPSDSTGSNQNGERSGARSKQRRPQGLPNNTASWFTALTQHGKEDLKFPRGQGVPINTNSSPDDQIGYYRRATRRIRGGDGKMKDLSPRWYFYYLGTGPEAGLPYGANKDGIIWVATEGALNTPKDHIGTRNPANNAAIVLQLPQGTTLPKGFYAEGSRGGSQASSRSSSRSRNSSRNSTPGSSRGTSPARMAGNGGDAALALLLLDRLNQLESKMSGKGQQQQGQTVTKKNAAEASKKPRQKRTATKAYNVTQAFGRRGPEQTQGNFGDQELIRQGTDYKHWPQIAQFAPSASAFFGMSRIGMEVTPSGTWLTYTGAIKLDDKDPNFKDQVILLNKHIDAYKTFPPTEPKKDKKKKADETQALPQRQKKQQTVTLLPAADLDDFSKQLQQSMSSADSTQA

SEQ ID NO: 1169 - protein, 671 aa, Artificial Sequence
  Description of Artificial Sequence: Synthetic polypeptide
MHHHHHHGGSGSPILGYWKIKGLVQPTRLLLEYLEEKYEEHLYERDEGDKWRNKKFELGLEFPNLPYYIDGDVKLTQSMAIIRYIADKHNMLGGCPKERAEISMLEGAVLDIRYGVSRIAYSKDFETLKVDFLSKLPEMLKMFEDRLCHKTYLNGDHVTHPDFMLYDALDVVLYMDPMCLDAFPKLVCFKKRIEAIPQIDKYLKSSKYIAWPLQGWQATFGGGDHPPKSDLVPRGSPGIHRDGGSGENLYFQSSDNGPQNQRNAPRITFGGPSDSTGSNQNGERSGARSKQRRPQGLPNNTASWFTALTQHGKEDLKFPRGQGVPINTNSNPDDQIGYYRRATRRIRGGDGKMKDLSPRWYFYYLGTGPEAGLPYGANKDGIIWVATEGALNTPKDHIGTRNPANNAAIVLQLPQGTTLPKGFYAEGSRGGSQASSRSSSRSRNSSRNSTPGSSRGTSPARMAGNGGDAALALLLLDRLNQLESKMSGKGQQQQGQTVTKKSAAEASKKPRQKRTATKAYNVTQAFGRRGPEQTQGNFGDQELIRQGTDYKHWPQIAQFAPSASAFFGMSRIGMEVTPSGTWLTYTGAIKLDDKDPNFKDQVILLNKHIDAYKTFPPTEPKKDKKKKADETQALPQRQKKQQTVTLLPAADLDDFSKQLQQSMSSADSTQA

SEQ ID NO: 1170 - protein, 671 aa, Artificial Sequence
  Description of Artificial Sequence: Synthetic polypeptide
MHHHHHHGGSGSPILGYWKIKGLVQPTRLLLEYLEEKYEEHLYERDEGDKWRNKKFELGLEFPNLPYYIDGDVKLTQSMAIIRYIADKHNMLGGCPKERAEISMLEGAVLDIRYGVSRIAYSKDFETLKVDFLSKLPEMLKMFEDRLCHKTYLNGDHVTHPDFMLYDALDVVLYMDPMCLDAFPKLVCFKKRIEAIPQIDKYLKSSKYIAWPLQGWQATFGGGDHPPKSDLVPRGSPGIHRDGGSGENLYFQSSDNGPQNQRNAPRITFGGPSDSTGSNQNGERSGARSKQRRPQGLPNNTASWFTALTQHGKEDLKFPRGQGVPINTNSSPDDQIGYYRRATRRIRGGDGKMKDLSPRWYFYYLGTGPEAGLPYGANKDGIIWVATEGALNTPKDHIGTRNPANNAAIVLQLPQGTTLPKGFYAEGSRGGSQASSRSSSRSRNSSRNSTPGSSRGTSPARMAGNGGDAALALLLLDRLNQLESKMSGKGQQQQGQTVTKKSAAEASKKPRQKRTATKAYNVTQAFGRRGPEQTQGNFGDQELIRQGTDYKHWPQIAQFAPSASAFFGMSRIGMEVTPSGTWLTYTGAITLDDKDPNFKDQVILLNKHIDAYKTFPPTEPKKDKKKKADETQALPQRQKKQQTVTLLPAADLDDFSKQLQQSMSSADSTQA

SEQ ID NO: 1171 - protein, 671 aa, Artificial Sequence
  Description of Artificial Sequence: Synthetic polypeptide
MHHHHHHGGSGSPILGYWKIKGLVQPTRLLLEYLEEKYEEHLYERDEGDKWRNKKFELGLEFPNLPYYIDGDVKLTQSMAIIRYIADKHNMLGGCPKERAEISMLEGAVLDIRYGVSRIAYSKDFETLKVDFLSKLPEMLKMFEDRLCHKTYLNGDHVTHPDFMLYDALDVVLYMDPMCLDAFPKLVCFKKRIEAIPQIDKYLKSSKYIAWPLQGWQATFGGGDHPPKSDLVPRGSPGIHRDGGSGENLYFQSSDNGPQNQRNAPRITFGGPSDSTGSNQNGERSGARSKQRRPQGLPNNTASWFTALTQHGKEDLKFPRGQGVPINTNSSPDDQIGYYRRATRRIRGGDGKMKDLSPRWYFYYLGTGPEAGLPYGANKDGIIWVATEGALNTPKDHIGTRNPANNAAIVLQLPQGTTLPKGFYAEGSRGGSQASSRSSSRSRNSSRNSTPGSSRGTSPARMAGNGGDAALALLLLDRLNQLESKMSGKGQQQQGQTVTKKSAAEASKKPRQKRTATKAYNVTQAFGRRGPEQTQGNFGDQELIRQGTDYKHWPQIAQFAPSASAFFGMSRIGMEVTPSGTWLTYTGAIKLDDTDPNFKDQVILLNKHIDAYKTFPPTEPKKDKKKKADETQALPQRQKKQQTVTLLPAADLDDFSKQLQQSMSSADSTQA

SEQ ID NO: 1172 - protein, 671 aa, Artificial Sequence
  Description of Artificial Sequence: Synthetic polypeptide
MHHHHHHGGSGSPILGYWKIKGLVQPTRLLLEYLEEKYEEHLYERDEGDKWRNKKFELGLEFPNLPYYIDGDVKLTQSMAIIRYIADKHNMLGGCPKERAEISMLEGAVLDIRYGVSRIAYSKDFETLKVDFLSKLPEMLKMFEDRLCHKTYLNGDHVTHPDFMLYDALDVVLYMDPMCLDAFPKLVCFKKRIEAIPQIDKYLKSSKYIAWPLQGWQATFGGGDHPPKSDLVPRGSPGIHRDGGSGENLYFQSSDNGPQNQRNAPRITFGGPSDSTGSNQNGERSGARSKQRRPQGLPNNTASWFTALTQHGKEDLKFPRGQGVPINTNSSPDDQIGYYRRATRRIRGGDGKMKDLSPRWYFYYLGTGPEAGLPYGANKDGIIWVATEGALNTPKDHIGTRNPANNAAIVLQLPQGTTLPKGFYAEGSRGGSQASSRSSSRSRNSSRNSTPGSSRGTSPARMAGNGGDAALALLLLDRLNQLESKMSGKGQQQQGQTVTKKSAAEASKKPRQKRTATKAYNVTQAFGERGPEQTQGNFGDQELIRQGTDYKHWPQIAQFAPSASAFFGMSRIGMEVTPSGTWLTYTGAIKLDDKDPNFKDQVILLNKHIDAYKTFPPTEPKKDKKKKADETQALPQRQKKQQTVTLLPAADLDDFSKQLQQSMSSADSTQA

SEQ ID NO: 1173 - protein, 671 aa, Artificial Sequence
  Description of Artificial Sequence: Synthetic polypeptide
MHHHHHHGGSGSPILGYWKIKGLVQPTRLLLEYLEEKYEEHLYERDEGDKWRNKKFELGLEFPNLPYYIDGDVKLTQSMAIIRYIADKHNMLGGCPKERAEISMLEGAVLDIRYGVSRIAYSKDFETLKVDFLSKLPEMLKMFEDRLCHKTYLNGDHVTHPDFMLYDALDVVLYMDPMCLDAFPKLVCFKKRIEAIPQIDKYLKSSKYIAWPLQGWQATFGGGDHPPKSDLVPRGSPGIHRDGGSGENLYFQSSDNGPQNQRNAPRITFGGPSDSTGSNQNGERSGARSKQRRPQGLPNNTASWFTALTQHGKEDLKFPRGQGVPINTNSSPDDQIGYYRRATRRIRGGDGKMKDLSPRWYFYYLGTGPEAGLPYGANKDGIIWVATEGALNTPKDHIGTRNPANNAAIVLQLPQGTGLPKGFYAEGSRGGSQASSRSSSRSRNSSRNSTPGSSRGTSPARMAGNGGDAALALLLLDRLNQLESKMSGKGQQQQGQTVTKKSAAEASKKPRQKRTATKAYNVTQAFGRRGPEQTQGNFGDQELIRQGTDYKHWPQIAQFAPSASAFFGMSRIGMEVTPSGTWLTYTGAIKLDDKDPNFKDQVILLNKHIDAYKTFPPTEPKKDKKKKADETQALPQRQKKQQTVTLLPAADLDDFSKQLQQSMSSADSTQA

SEQ ID NO: 1174 - protein, 671 aa, Artificial Sequence
  Description of Artificial Sequence: Synthetic polypeptide
MHHHHHHGGSGSPILGYWKIKGLVQPTRLLLEYLEEKYEEHLYERDEGDKWRNKKFELGLEFPNLPYYIDGDVKLTQSMAIIRYIADKHNMLGGCPKERAEISMLEGAVLDIRYGVSRIAYSKDFETLKVDFLSKLPEMLKMFEDRLCHKTYLNGDHVTHPDFMLYDALDVVLYMDPMCLDAFPKLVCFKKRIEAIPQIDKYLKSSKYIAWPLQGWQATFGGGDHPPKSDLVPRGSPGIHRDGGSGENLYFQSSDNGPQNQRNAPRITFGGPSDSTGSNQNGERSGARSKQRRPQGLPNNTASWFTALTQHGKEDLKFPRGQGVPINTNSSPDDQIGYYRRATRRIRGGDGKMKDLSPRWYFYYLGTGPEAGLPYGANKDGIIWVATEGALNTPKDHIGTRNPANNAAIVLQLPQGTWLPKGFYAEGSRGGSQASSRSSSRSRNSSRNSTPGSSRGTSPARMAGNGGDAALALLLLDRLNQLESKMSGKGQQQQGQTVTKKSAAEASKKPRQKRTATKAYNVTQAFGRRGPEQTQGNFGDQELIRQGTDYKHWPQIAQFAPSASAFFGMSRIGMEVTPSGTWLTYTGAIKLDDKDPNFKDQVILLNKHIDAYKTFPPTEPKKDKKKKADETQALPQRQKKQQTVTLLPAADLDDFSKQLQQSMSSADSTQA

SEQ ID NO: 1175 - protein, 671 aa, Artificial Sequence
  Description of Artificial Sequence: Synthetic polypeptide
MHHHHHHGGSGSPILGYWKIKGLVQPTRLLLEYLEEKYEEHLYERDEGDKWRNKKFELGLEFPNLPYYIDGDVKLTQSMAIIRYIADKHNMLGGCPKERAEISMLEGAVLDIRYGVSRIAYSKDFETLKVDFLSKLPEMLKMFEDRLCHKTYLNGDHVTHPDFMLYDALDVVLYMDPMCLDAFPKLVCFKKRIEAIPQIDKYLKSSKYIAWPLQGWQATFGGGDHPPKSDLVPRGSPGIHRDGGSGENLYFQSSDNGPQNQRNAPRITFGGPSDSTGSNQNGERSGARSKQRRPQGLPNNTASWFTALTQHGKEDLKFPRGQGVPINTNSSPDDQIGYYRRATRRIRGGDGKMKDLSPRWYFYYLGTGPEAGLPYGANKDGIIWVAHEGALNTPKDHIGTRNPANNAAIVLQLPQGTTLPKGFYAEGSRGGSQASSRSSSRSRNSSRNSTPGSSRGTSPARMAGNGGDAALALLLLDRLNQLESKMSGKGQQQQGQTVTKKSAAEASKKPRQKRTATKAYNVTQAFGRRGPEQTQGNFGDQELIRQGTDYKHWPQIAQFAPSASAFFGMSRIGMEVTPSGTWLTYTGAIKLDDKDPNFKDQVILLNKHIDAYKTFPPTEPKKDKKKKADETQALPQRQKKQQTVTLLPAADLDDFSKQLQQSMSSADSTQA

SEQ ID NO: 1176 - protein, 671 aa, Artificial Sequence
  Description of Artificial Sequence: Synthetic polypeptide
MHHHHHHGGSGSPILGYWKIKGLVQPTRLLLEYLEEKYEEHLYERDEGDKWRNKKFELGLEFPNLPYYIDGDVKLTQSMAIIRYIADKHNMLGGCPKERAEISMLEGAVLDIRYGVSRIAYSKDFETLKVDFLSKLPEMLKMFEDRLCHKTYLNGDHVTHPDFMLYDALDVVLYMDPMCLDAFPKLVCFKKRIEAIPQIDKYLKSSKYIAWPLQGWQATFGGGDHPPKSDLVPRGSPGIHRDGGSGENLYFQSSDNGPQNQRNAPRITFGGPSDSTGSNQNGERSGARSKQRRPQGLPNNTASWFTALTQHGKEDLKFPRGQGVPINTNSSPDDQIGYYRRATRRIRGGDGKMKDLSPRWYFYYLGTGPEAGLPYGANKDGIIWVATEGADNTPKDHIGTRNPANNAAIVLQLPQGTTLPKGFYAEGSRGGSQASSRSSSRSRNSSRNSTPGSSRGTSPARMAGNGGDAALALLLLDRLNQLESKMSGKGQQQQGQTVTKKSAAEASKKPRQKRTATKAYNVTQAFGRRGPEQTQGNFGDQELIRQGTDYKHWPQIAQFAPSASAFFGMSRIGMEVTPSGTWLTYTGAIKLDDKDPNFKDQVILLNKHIDAYKTFPPTEPKKDKKKKADETQALPQRQKKQQTVTLLPAADLDDFSKQLQQSMSSADSTQA

SEQ ID NO: 1177 - protein, 671 aa, Artificial Sequence
  Description of Artificial Sequence: Synthetic polypeptide
MHHHHHHGGSGSPILGYWKIKGLVQPTRLLLEYLEEKYEEHLYERDEGDKWRNKKFELGLEFPNLPYYIDGDVKLTQSMAIIRYIADKHNMLGGCPKERAEISMLEGAVLDIRYGVSRIAYSKDFETLKVDFLSKLPEMLKMFEDRLCHKTYLNGDHVTHPDFMLYDALDVVLYMDPMCLDAFPKLVCFKKRIEAIPQIDKYLKSSKYIAWPLQGWQATFGGGDHPPKSDLVPRGSPGIHRDGGSGENLYFQSSDNGPQNQRNAPRITFGGPSDSTGSNQNGERSGARSKQRRPQGLPNNTASWFTALTQHGKEDLKFPRGQGVPINTNSSPDDQIGKYRRATRRIRGGDGKMKDLSPRWYFYYLGTGPEAGLPYGANKDGIIWVATEGALNTPKDHIGTRNPANNAAIVLQLPQGTTLPKGFYAEGSRGGSQASSRSSSRSRNSSRNSTPGSSRGTSPARMAGNGGDAALALLLLDRLNQLESKMSGKGQQQQGQTVTKKSAAEASKKPRQKRTATKAYNVTQAFGRRGPEQTQGNFGDQELIRQGTDYKHWPQIAQFAPSASAFFGMSRIGMEVTPSGTWLTYTGAIKLDDKDPNFKDQVILLNKHIDAYKTFPPTEPKKDKKKKADETQALPQRQKKQQTVTLLPAADLDDFSKQLQQSMSSADSTQA

SEQ ID NO: 1178 - protein, 671 aa, Artificial Sequence
  Description of Artificial Sequence: Synthetic polypeptide
MHHHHHHGGSGSPILGYWKIKGLVQPTRLLLEYLEEKYEEHLYERDEGDKWRNKKFELGLEFPNLPYYIDGDVKLTQSMAIIRYIADKHNMLGGCPKERAEISMLEGAVLDIRYGVSRIAYSKDFETLKVDFLSKLPEMLKMFEDRLCHKTYLNGDHVTHPDFMLYDALDVVLYMDPMCLDAFPKLVCFKKRIEAIPQIDKYLKSSKYIAWPLQGWQATFGGGDHPPKSDLVPRGSPGIHRDGGSGENLYFQSSDNGPQNQRNAPRITFGGPSDSTGSNQNGERSGARSKQRRPQGLPNNTASWFTALTQHGKEDLKFPRGQGVPINTNSSPDDQIGYYRRATRRIRGGDGKMKDLSPRWYFYYLGTGPEAGLPYGANKDGIIWVATEGALNTPKDHIGTRNPANNAAIVLQLPQGTTLPKGFYSEGSRGGSQASSRSSSRSRNSSRNSTPGSSRGTSPARMAGNGGDAALALLLLDRLNQLESKMSGKGQQQQGQTVTKKSAAEASKKPRQKRTATKAYNVTQAFGRRGPEQTQGNFGDQELIRQGTDYKHWPQIAQFAPSASAFFGMSRIGMEVTPSGTWLTYTGAIKLDDKDPNFKDQVILLNKHIDAYKTFPPTEPKKDKKKKADETQALPQRQKKQQTVTLLPAADLDDFSKQLQQSMSSADSTQA

SEQ ID NO: 1179 - protein, 671 aa, Artificial Sequence
  Description of Artificial Sequence: Synthetic polypeptide
MHHHHHHGGSGSPILGYWKIKGLVQPTRLLLEYLEEKYEEHLYERDEGDKWRNKKFELGLEFPNLPYYIDGDVKLTQSMAIIRYIADKHNMLGGCPKERAEISMLEGAVLDIRYGVSRIAYSKDFETLKVDFLSKLPEMLKMFEDRLCHKTYLNGDHVTHPDFMLYDALDVVLYMDPMCLDAFPKLVCFKKRIEAIPQIDKYLKSSKYIAWPLQGWQATFGGGDHPPKSDLVPRGSPGIHRDGGSGENLYFQSSDNGPQNQRNAPRITFGGPSDSTGSNQNGERSGARSKQRRPQGLPNNTASWFTALTQHGKEDLKFPRGQGVPINANSSPDDQIGYYRRATRRIRGGDGKMKDLSPRWYFYYLGTGPEAGLPYGANKDGIIWVATEGALNTPKDHIGTRNPANNAAIVLQLPQGTTLPKGFYAEGSRGGSQASSRSSSRSRNSSRNSTPGSSRGTSPARMAGNGGDAALALLLLDRLNQLESKMSGKGQQQQGQTVTKKSAAEASKKPRQKRTATKAYNVTQAFGRRGPEQTQGNFGDQELIRQGTDYKHWPQIAQFAPSASAFFGMSRIGMEVTPSGTWLTYTGAIKLDDKDPNFKDQVILLNKHIDAYKTFPPTEPKKDKKKKADETQALPQRQKKQQTVTLLPAADLDDFSKQLQQSMSSADSTQA

SEQ ID NO: 1180 - protein, 671 aa, Artificial Sequence
  Description of Artificial Sequence: Synthetic polypeptide
MHHHHHHGGSGSPILGYWKIKGLVQPTRLLLEYLEEKYEEHLYERDEGDKWRNKKFELGLEFPNLPYYIDGDVKLTQSMAIIRYIADKHNMLGGCPKERAEISMLEGAVLDIRYGVSRIAYSKDFETLKVDFLSKLPEMLKMFEDRLCHKTYLNGDHVTHPDFMLYDALDVVLYMDPMCLDAFPKLVCFKKRIEAIPQIDKYLKSSKYIAWPLQGWQATFGGGDHPPKSDLVPRGSPGIHRDGGSGENLYFQSSDNGPQNQRNAPRITFGGPSDSTGSNQNGERSGARSKQRRPQGLPNNTASWFTALTQHGKEDLKFPRGQGVPINTNSSPDDQIGYYRRATRRIRGGDGKMKDLSPRWYFYYLGTGPEAGLPYGANKDGIIWVATEGALNTPKDHIGTRNPANNAAIVLQLPQGTTLPKGFYAEGSRGGSQASSRSSSRSRNSSRNSTPGSSRGTSPARMAGNGGDAALALLLLDRLNQLESKMSGKGQQQQGQTVTKKSADEASKKPRQKRTATKAYNVTQAFGRRGPEQTQGNFGDQELIRQGTDYKHWPQIAQFAPSASAFFGMSRIGMEVTPSGTWLTYTGAIKLDDKDPNFKDQVILLNKHIDAYKTFPPTEPKKDKKKKADETQALPQRQKKQQTVTLLPAADLDDFSKQLQQSMSSADSTQA

SEQ ID NO: 1181 - protein, 671 aa, Artificial Sequence
  Description of Artificial Sequence: Synthetic polypeptide
MHHHHHHGGSGSPILGYWKIKGLVQPTRLLLEYLEEKYEEHLYERDEGDKWRNKKFELGLEFPNLPYYIDGDVKLTQSMAIIRYIADKHNMLGGCPKERAEISMLEGAVLDIRYGVSRIAYSKDFETLKVDFLSKLPEMLKMFEDRLCHKTYLNGDHVTHPDFMLYDALDVVLYMDPMCLDAFPKLVCFKKRIEAIPQIDKYLKSSKYIAWPLQGWQATFGGGDHPPKSDLVPRGSPGIHRDGGSGENLYFQSSDNGPQNQRNAPRITFGGPSDSTGSNQNGERSGARSKQRRPQGLPNNTASWFTALTQHGKEDLKFPRGQGVPINTNSSPDDQIGYYRRATRRIRGGDGKMKDLSPRWYFYYLGTGPEAGLPYGANKDGIIWVATEGALNTPKDHIGTRNPENNAAIVLQLPQGTTLPKGFYAEGSRGGSQASSRSSSRSRNSSRNSTPGSSRGTSPARMAGNGGDAALALLLLDRLNQLESKMSGKGQQQQGQTVTKKSAAEASKKPRQKRTATKAYNVTQAFGRRGPEQTQGNFGDQELIRQGTDYKHWPQIAQFAPSASAFFGMSRIGMEVTPSGTWLTYTGAIKLDDKDPNFKDQVILLNKHIDAYKTFPPTEPKKDKKKKADETQALPQRQKKQQTVTLLPAADLDDFSKQLQQSMSSADSTQA

SEQ ID NO: 1182 - protein, 671 aa, Artificial Sequence
  Description of Artificial Sequence: Synthetic polypeptide
MHHHHHHGGSGSPILGYWKIKGLVQPTRLLLEYLEEKYEEHLYERDEGDKWRNKKFELGLEFPNLPYYIDGDVKLTQSMAIIRYIADKHNMLGGCPKERAEISMLEGAVLDIRYGVSRIAYSKDFETLKVDFLSKLPEMLKMFEDRLCHKTYLNGDHVTHPDFMLYDALDVVLYMDPMCLDAFPKLVCFKKRIEAIPQIDKYLKSSKYIAWPLQGWQATFGGGDHPPKSDLVPRGSPGIHRDGGSGENLYFQSSDNGPQNQRNAPRITFGGPSDSTGSNQNGERSGARSKQRRPQGLPNNTASWFTALTQHGKEDLKFPRGQGVPINTNSQPDDQIGYYRRATRRIRGGDGKMKDLSPRWYFYYLGTGPEAGLPYGANKDGIIWVATEGALNTPKDHIGTRNPANNAAIVLQLPQGTTLPKGFYAEGSRGGSQASSRSSSRSRNSSRNSTPGSSRGTSPARMAGNGGDAALALLLLDRLNQLESKMSGKGQQQQGQTVTKKSAAEASKKPRQKRTATKAYNVTQAFGRRGPEQTQGNFGDQELIRQGTDYKHWPQIAQFAPSASAFFGMSRIGMEVTPSGTWLTYTGAIKLDDKDPNFKDQVILLNKHIDAYKTFPPTEPKKDKKKKADETQALPQRQKKQQTVTLLPAADLDDFSKQLQQSMSSADSTQA

SEQ ID NO: 1183 - protein, 671 aa, Artificial Sequence
  Description of Artificial Sequence: Synthetic polypeptide
MHHHHHHGGSGSPILGYWKIKGLVQPTRLLLEYLEEKYEEHLYERDEGDKWRNKKFELGLEFPNLPYYIDGDVKLTQSMAIIRYIADKHNMLGGCPKERAEISMLEGAVLDIRYGVSRIAYSKDFETLKVDFLSKLPEMLKMFEDRLCHKTYLNGDHVTHPDFMLYDALDVVLYMDPMCLDAFPKLVCFKKRIEAIPQIDKYLKSSKYIAWPLQGWQATFGGGDHPPKSDLVPRGSPGIHRDGGSGENLYFQSSDNGPQNQRNAPRITFGGPSDSTGSNQNGERSGARSKQRRPQGLPNNTASWFTALTQHGKEDLKFPRGQGVPINTNSSPDDQIGYYRRCTRRIRGGDGKMKDLSPRWYFYYLGTGPEAGLPYGANKDGIIWVATEGALNTPKDHIGTRNPANNAAIVLQLPQGTTLPKGFYAEGSRGGSQASSRSSSRSRNSSRNSTPGSSRGTSPARMAGNGGDAALALLLLDRLNQLESKMSGKGQQQQGQTVTKKSAAEASKKPRQKRTATKAYNVTQAFGRRGPEQTQGNFGDQELIRQGTDYKHWPQIAQFAPSASAFFGMSRIGMEVTPSGTWLTYTGAIKLDDKDPNFKDQVILLNKHIDAYKTFPPTEPKKDKKKKADETQALPQRQKKQQTVTLLPAADLDDFSKQLQQSMSSADSTQA

SEQ ID NO: 1184 - protein, 671 aa, Artificial Sequence
  Description of Artificial Sequence: Synthetic polypeptide
MHHHHHHGGSGSPILGYWKIKGLVQPTRLLLEYLEEKYEEHLYERDEGDKWRNKKFELGLEFPNLPYYIDGDVKLTQSMAIIRYIADKHNMLGGCPKERAEISMLEGAVLDIRYGVSRIAYSKDFETLKVDFLSKLPEMLKMFEDRLCHKTYLNGDHVTHPDFMLYDALDVVLYMDPMCLDAFPKLVCFKKRIEAIPQIDKYLKSSKYIAWPLQGWQATFGGGDHPPKSDLVPRGSPGIHRDGGSGENLYFQSSDNGPQNQRNAPRITFGGPSDSTGSNQNGERSGARSKQRRPQGLPNNTASWFTALTQHGKEDLKFPRGQGVPINTNSSPDDQIGYYRRATRRIRGGDGKMKDLSPRWYFYYLGTGPEAGLPYGANKDGIIWVATEGALNTPKDHIGTRNPANNAAIVLQLPQGTTLPKGFYAEGSRGGSQASSRSSSRSRNSSRNSTPGSSRGTSPARMAGNGGDAALALLLLDRLNQLESKMSGKGQQQQGQTVTKKSAAEASKKPRQKRTATKAYNVTQAFGRRGPEQTQGNFGDQELIRQGTDYKHWPQIAQFIPSASAFFGMSRIGMEVTPSGTWLTYTGAIKLDDKDPNFKDQVILLNKHIDAYKTFPPTEPKKDKKKKADETQALPQRQKKQQTVTLLPAADLDDFSKQLQQSMSSADSTQA

SEQ ID NO: 1185 - protein, 671 aa, Artificial Sequence
  Description of Artificial Sequence: Synthetic polypeptide
MHHHHHHGGSGSPILGYWKIKGLVQPTRLLLEYLEEKYEEHLYERDEGDKWRNKKFELGLEFPNLPYYIDGDVKLTQSMAIIRYIADKHNMLGGCPKERAEISMLEGAVLDIRYGVSRIAYSKDFETLKVDFLSKLPEMLKMFEDRLCHKTYLNGDHVTHPDFMLYDALDVVLYMDPMCLDAFPKLVCFKKRIEAIPQIDKYLKSSKYIAWPLQGWQATFGGGDHPPKSDLVPRGSPGIHRDGGSGENLYFQSSDNGPQNQRNAPRITFGGPSDSTGSNQNGERSGARSKQRRPQGLPNNTASWFTALTQHGKEDLKFPRGQGVPINTNSSPDDQIGYYRRATRRIRGGDGKMKDLSPRWYFYYLGTGPEAGLPYGANKDGIIWVATEGALNTPKDHIGTRNPANNAAIVLQLPQGTTLPKGFYAEGSRGGSQASSRSSSRSRNSSRNSTPGSSRGTSPARMAGNGGDAALALLLLDRLNQLESKMSGKGQQQQGQTVTKKSAAEASKKPRQKRTATKAYNVTQAFGRRGPEQTQGNFGDQELIRQGTDYKHWPQIAQFAPSASAFFGMSHIGMEVTPSGTWLTYTGAIKLDDKDPNFKDQVILLNKHIDAYKTFPPTEPKKDKKKKADETQALPQRQKKQQTVTLLPAADLDDFSKQLQQSMSSADSTQA

SEQ ID NO: 1186 - protein, 671 aa, Artificial Sequence
  Description of Artificial Sequence: Synthetic polypeptide
MHHHHHHGGSGSPILGYWKIKGLVQPTRLLLEYLEEKYEEHLYERDEGDKWRNKKFELGLEFPNLPYYIDGDVKLTQSMAIIRYIADKHNMLGGCPKERAEISMLEGAVLDIRYGVSRIAYSKDFETLKVDFLSKLPEMLKMFEDRLCHKTYLNGDHVTHPDFMLYDALDVVLYMDPMCLDAFPKLVCFKKRIEAIPQIDKYLKSSKYIAWPLQGWQATFGGGDHPPKSDLVPRGSPGIHRDGGSGENLYFQSSDNGPQNQRNAPRITFGGPSDSTGSNQNGERSGARSKQRRPQGLPNNTASWFTALTQHGKEDLKFPRGQGVPINTNSSPDDQIGYYRRATRRIRGGDGKMKDLSPRWYFYYLGTGPEAGLPYGANKDGIIWVATEGALNTPKDHIGTRNPANNAAIVLQLPQGTTLPKGFYAEGSRGGSQASSRSSSRSRNSSRNSTPGSSRGTSPARMAGNGGDAALALLLLDRLNQLESKMSGKGQQQQGQTVTKKSAAEASKKPRQKRTATKAYNVTQAFGRRGPEQTQGNFGDQELIRQGTDYKHWPQIAQFAPSASAFFGMSKIGMEVTPSGTWLTYTGAIKLDDKDPNFKDQVILLNKHIDAYKTFPPTEPKKDKKKKADETQALPQRQKKQQTVTLLPAADLDDFSKQLQQSMSSADSTQA

SEQ ID NO: 1187 - protein, 671 aa, Artificial Sequence
  Description of Artificial Sequence: Synthetic polypeptide
MHHHHHHGGSGSPILGYWKIKGLVQPTRLLLEYLEEKYEEHLYERDEGDKWRNKKFELGLEFPNLPYYIDGDVKLTQSMAIIRYIADKHNMLGGCPKERAEISMLEGAVLDIRYGVSRIAYSKDFETLKVDFLSKLPEMLKMFEDRLCHKTYLNGDHVTHPDFMLYDALDVVLYMDPMCLDAFPKLVCFKKRIEAIPQIDKYLKSSKYIAWPLQGWQATFGGGDHPPKSDLVPRGSPGIHRDGGSGENLYFQSSDNGPQNQRNAPRITFGGPSDSTGSNQNGERSGARSKQRRPQGLPNNTASWFTALTQHGKEDLKFPRGQGVPINDNSSPDDQIGYYRRATRRIRGGDGKMKDLSPRWYFYYLGTGPEAGLPYGANKDGIIWVATEGALNTPKDHIGTRNPANNAAIVLQLPQGTTLPKGFYAEGSRGGSQASSRSSSRSRNSSRNSTPGSSRGTSPARMAGNGGDAALALLLLDRLNQLESKMSGKGQQQQGQTVTKKSAAEASKKPRQKRTATKAYNVTQAFGRRGPEQTQGNFGDQELIRQGTDYKHWPQIAQFAPSASAFFGMSRIGMEVTPSGTWLTYTGAIKLDDKDPNFKDQVILLNKHIDAYKTFPPTEPKKDKKKKADETQALPQRQKKQQTVTLLPAADLDDFSKQLQQSMSSADSTQA

SEQ ID NO: 1188 - protein, 671 aa, Artificial Sequence
  Description of Artificial Sequence: Synthetic polypeptide
MHHHHHHGGSGSPILGYWKIKGLVQPTRLLLEYLEEKYEEHLYERDEGDKWRNKKFELGLEFPNLPYYIDGDVKLTQSMAIIRYIADKHNMLGGCPKERAEISMLEGAVLDIRYGVSRIAYSKDFETLKVDFLSKLPEMLKMFEDRLCHKTYLNGDHVTHPDFMLYDALDVVLYMDPMCLDAFPKLVCFKKRIEAIPQIDKYLKSSKYIAWPLQGWQATFGGGDHPPKSDLVPRGSPGIHRDGGSGENLYFQSSDNGPQNQRNAPRITFGGPSDSTGSNQNGERSGARSKQRRPQGLPNNTASWFTALTQHGKEDLKFPRGQGVPINTNSSPDDQIGYYRRATRRIRGGDGKMKDLSPRWYFYYLGTGPEAGLPYGANKDGIIWVATEGALNTPKDHIGTRNPANNAAIVLQLPQGTTLPKGFYAEGSRGGSQASSRSSSRSRNSSRNSTPGSSRGTSPARMAGNGGDAALALLLLDRLNQLESKMSGKGQQQQGQTVTKKSAAEASKKPRQKRTATKAYNVTQAFGRRGPEQTQGNFGDQELIRQGTDYKHWPQIAQFAPSASAFFGMSRIGMEVTPSGTWLTYTGAIKLDQKDPNFKDQVILLNKHIDAYKTFPPTEPKKDKKKKADETQALPQRQKKQQTVTLLPAADLDDFSKQLQQSMSSADSTQA

SEQ ID NO: 1189 - protein, 671 aa, Artificial Sequence
  Description of Artificial Sequence: Synthetic polypeptide
MHHHHHHGGSGSPILGYWKIKGLVQPTRLLLEYLEEKYEEHLYERDEGDKWRNKKFELGLEFPNLPYYIDGDVKLTQSMAIIRYIADKHNMLGGCPKERAEISMLEGAVLDIRYGVSRIAYSKDFETLKVDFLSKLPEMLKMFEDRLCHKTYLNGDHVTHPDFMLYDALDVVLYMDPMCLDAFPKLVCFKKRIEAIPQIDKYLKSSKYIAWPLQGWQATFGGGDHPPKSDLVPRGSPGIHRDGGSGENLYFQSSDNGPQNQRNAPRITFGGPSDSTGSNQNGERSGARSKQRRPQGLPNNTASWFTALTQHGKEDLKFPRGQGVPINTNSSPDDQIGYYRRATRRIRGGDGKMKDLSPRWYFYYLGTGPEAGLPYGAAKDGIIWVATEGALNTPKDHIGTRNPANNAAIVLQLPQGTTLPKGFYAEGSRGGSQASSRSSSRSRNSSRNSTPGSSRGTSPARMAGNGGDAALALLLLDRLNQLESKMSGKGQQQQGQTVTKKSAAEASKKPRQKRTATKAYNVTQAFGRRGPEQTQGNFGDQELIRQGTDYKHWPQIAQFAPSASAFFGMSRIGMEVTPSGTWLTYTGAIKLDDKDPNFKDQVILLNKHIDAYKTFPPTEPKKDKKKKADETQALPQRQKKQQTVTLLPAADLDDFSKQLQQSMSSADSTQA

SEQ ID NO: 1190 - protein, 671 aa, Artificial Sequence
  Description of Artificial Sequence: Synthetic polypeptide
MHHHHHHGGSGSPILGYWKIKGLVQPTRLLLEYLEEKYEEHLYERDEGDKWRNKKFELGLEFPNLPYYIDGDVKLTQSMAIIRYIADKHNMLGGCPKERAEISMLEGAVLDIRYGVSRIAYSKDFETLKVDFLSKLPEMLKMFEDRLCHKTYLNGDHVTHPDFMLYDALDVVLYMDPMCLDAFPKLVCFKKRIEAIPQIDKYLKSSKYIAWPLQGWQATFGGGDHPPKSDLVPRGSPGIHRDGGSGENLYFQSSDNGPQNQRNAPRITFGGPSDSTGSNQNGERSGARSKQRRPQGLPNNTASWFTALTQHGKEDLKFPRGQGVPINTNSSPDDQIGYYRRATRRIRGGDGKMKDLSPRWYFYYLGTGPEAGLPYGANKDGIIWVATEGALNTPKDHIGTRNPANNAAIVLQLPQGTTLPKGFYAEGSRGGSQASSRSSSRSRNSSRNSTPGSSRGTSPARMAGNGGDAALALLLLDRLNQLESKMSGKGQQQQGQTVTKKSAAEASKKPRQKRTATKAYNVTQAFGTRGPEQTQGNFGDQELIRQGTDYKHWPQIAQFAPSASAFFGMSRIGMEVTPSGTWLTYTGAIKLDDKDPNFKDQVILLNKHIDAYKTFPPTEPKKDKKKKADETQALPQRQKKQQTVTLLPAADLDDFSKQLQQSMSSADSTQA

SEQ ID NO: 1191 - protein, 671 aa, Artificial Sequence
  Description of Artificial Sequence: Synthetic polypeptide
MHHHHHHGGSGSPILGYWKIKGLVQPTRLLLEYLEEKYEEHLYERDEGDKWRNKKFELGLEFPNLPYYIDGDVKLTQSMAIIRYIADKHNMLGGCPKERAEISMLEGAVLDIRYGVSRIAYSKDFETLKVDFLSKLPEMLKMFEDRLCHKTYLNGDHVTHPDFMLYDALDVVLYMDPMCLDAFPKLVCFKKRIEAIPQIDKYLKSSKYIAWPLQGWQATFGGGDHPPKSDLVPRGSPGIHRDGGSGENLYFQSSDNGPQNQRNAPRITFGGPSDSTGSNQNGERSGARSKQRRPQGLPNNTASWFTALTQHGKEDLKFPRGQGVPINTNSSPDDQIGYYRRATRRIRGGDGKMKDLSPRWYFYYLGTGPEAGLPYGANKDGIIWVATEGALNTPKDHIGTRNPANNAAIVLQLPQGTTLPKGFYAEGSRGGSQASSRSSSRSRNSSRNSTPGSSRGTSPARMAGNGGDAALALLLLDRLNQLESKMSGKGQQQQGQTVTKKSAAEASKKPRQKRTATKAYNVTQAFGRRGPEQTQGNFGDQELIRQGTDYKHWPQIAQFAPSASAFFGMSRIGMEVTPSGTWLTYTGAIKLDDKDPNFKDQVILLNKHIDAWKTFPPTEPKKDKKKKADETQALPQRQKKQQTVTLLPAADLDDFSKQLQQSMSSADSTQA

SEQ ID NO: 1192 - protein, 671 aa, Artificial Sequence
  Description of Artificial Sequence: Synthetic polypeptide
MHHHHHHGGSGSPILGYWKIKGLVQPTRLLLEYLEEKYEEHLYERDEGDKWRNKKFELGLEFPNLPYYIDGDVKLTQSMAIIRYIADKHNMLGGCPKERAEISMLEGAVLDIRYGVSRIAYSKDFETLKVDFLSKLPEMLKMFEDRLCHKTYLNGDHVTHPDFMLYDALDVVLYMDPMCLDAFPKLVCFKKRIEAIPQIDKYLKSSKYIAWPLQGWQATFGGGDHPPKSDLVPRGSPGIHRDGGSGENLYFQSSDNGPQNQRNAPRITFGGPSDSTGSNQNGERSGARSKQRRPQGLPNNTASWFTALTQHGKEDLKFPRGQGVPINTNSSPDDQIGYYRRATRRIRGGDGKMKDLSPRWYFYYLGTGPEAGLPYGANKDGIIWVATEGALNTPKTHIGTRNPANNAAIVLQLPQGTTLPKGFYAEGSRGGSQASSRSSSRSRNSSRNSTPGSSRGTSPARMAGNGGDAALALLLLDRLNQLESKMSGKGQQQQGQTVTKKSAAEASKKPRQKRTATKAYNVTQAFGRRGPEQTQGNFGDQELIRQGTDYKHWPQIAQFAPSASAFFGMSRIGMEVTPSGTWLTYTGAIKLDDKDPNFKDQVILLNKHIDAYKTFPPTEPKKDKKKKADETQALPQRQKKQQTVTLLPAADLDDFSKQLQQSMSSADSTQA

SEQ ID NO: 1193 - protein, 671 aa, Artificial Sequence
  Description of Artificial Sequence: Synthetic polypeptide
MHHHHHHGGSGSPILGYWKIKGLVQPTRLLLEYLEEKYEEHLYERDEGDKWRNKKFELGLEFPNLPYYIDGDVKLTQSMAIIRYIADKHNMLGGCPKERAEISMLEGAVLDIRYGVSRIAYSKDFETLKVDFLSKLPEMLKMFEDRLCHKTYLNGDHVTHPDFMLYDALDVVLYMDPMCLDAFPKLVCFKKRIEAIPQIDKYLKSSKYIAWPLQGWQATFGGGDHPPKSDLVPRGSPGIHRDGGSGENLYFQSSDNGPQNQRNAPRITFGGPSDSTGSNQNGERSGARSKQRRPQGLPNNTASWFTALTQHGKEDLKFPRGQGVPINTNSSPDDQIGYYRRATRRIRGGDGKMKDLSPRWYFYYLGTGPEAGLPYGANKDGIIWVATEGALNTPKDHIGTRNPANNAAIVLQLPQGTTLPKGFYAEGSRGGSQASSRSSSRSRNSSRNSTPGSSRGTSPARMAGNGGDAALALLLLDRLNQLESKMSGKGQQQQGQTVTKKSAAEASKKPRQKRTATKAYNVTQAFGRRGPEQTQGNFGDQELIRQGTDYKHWPQIAQFAPSASAFFGMSRIGMEVTPSGTWLTYTGAIKLDDKDPNFKDQVILLNEHIDAYKTFPPTEPKKDKKKKADETQALPQRQKKQQTVTLLPAADLDDFSKQLQQSMSSADSTQA

SEQ ID NO: 1194 - protein, 671 aa, Artificial Sequence
  Description of Artificial Sequence: Synthetic polypeptide
MHHHHHHGGSGSPILGYWKIKGLVQPTRLLLEYLEEKYEEHLYERDEGDKWRNKKFELGLEFPNLPYYIDGDVKLTQSMAIIRYIADKHNMLGGCPKERAEISMLEGAVLDIRYGVSRIAYSKDFETLKVDFLSKLPEMLKMFEDRLCHKTYLNGDHVTHPDFMLYDALDVVLYMDPMCLDAFPKLVCFKKRIEAIPQIDKYLKSSKYIAWPLQGWQATFGGGDHPPKSDLVPRGSPGIHRDGGSGENLYFQSSDNGPQNQRNAPRITFGGPSDSTGSNQNGERSGARSKQRRPQGLPNNTASWFTALTQHGKEDLKFPRGQGVPINTNSSPDDQIGYYRRATRRIRGGDGKMKDLSPRWYFYYLGTGPEAGLPYGAIKDGIIWVATEGALNTPKDHIGTRNPANNAAIVLQLPQGTTLPKGFYAEGSRGGSQASSRSSSRSRNSSRNSTPGSSRGTSPARMAGNGGDAALALLLLDRLNQLESKMSGKGQQQQGQTVTKKSAAEASKKPRQKRTATKAYNVTQAFGRRGPEQTQGNFGDQELIRQGTDYKHWPQIAQFAPSASAFFGMSRIGMEVTPSGTWLTYTGAIKLDDKDPNFKDQVILLNKHIDAYKTFPPTEPKKDKKKKADETQALPQRQKKQQTVTLLPAADLDDFSKQLQQSMSSADSTQA

SEQ ID NO: 1195 - DNA, 3846 bp, Artificial Sequence
  Description of Artificial Sequence: Synthetic polynucleotide
atgggcatcctgccaagcccaggaatgcccgccctgctgtctctggtgagcctgctgtccgtgctgctgatgggatgcgtggcagagacaggcacacagtgcgtgaacctgaccacaaggacccagctgccccctgcctataccaattctttcacacggggcgtgtactatcccgacaaggtgtttagaagctccgtgctgcactccacacaggatctgtttctgcctttcttttctaacgtgacctggttccacgccatccacgtgtccggcaccaatggcacaaagcggttcgacaatcccgtgctgccttttaacgatggcgtgtacttcgccagcaccgagaagtccaacatcatcagaggctggatctttggcaccacactggactctaagacacagagcctgctgatcgtgaacaatgccaccaacgtggtgatcaaggtgtgcgagttccagttttgtaatgatccattcctgggcgtgtactatcacaagaacaataagtcctggatggagtctgagtttcgcgtgtattctagcgccaacaattgcacatttgagtacgtgagccagcccttcctgatggacctggagggcaagcagggcaatttcaagaacctgagggagttcgtgtttaagaatatcgatggctacttcaagatctacagcaagcacaccccaatcaacctggtgcgcgacctgccacagggattctccgccctggagccactggtggatctgcccatcggcatcaacatcacccggtttcagacactgctggccctgcacagatcctacctgacaccaggcgactcctctagcggatggaccgcaggagctgccgcctactatgtgggctatctgcagccccggaccttcctgctgaagtacaacgagaatggcaccatcacagacgcagtggattgcgccctggaccccctgtctgagacaaagtgtacactgaagagctttaccgtggagaagggcatctatcagacaagcaatttcagggtgcagcctaccgagtccatcgtgcgctttcccaatatcacaaacctgtgcccttttggcgaggtgttcaacgccaccagattcgccagcgtgtacgcctggaatcggaagagaatctccaactgcgtggccgactattctgtgctgtacaactccgcctctttcagcacctttaagtgctatggcgtgtctcccacaaagctgaatgatctgtgctttaccaacgtgtacgccgatagcttcgtgatcaggggagacgaagtgagacagatcgcaccaggacagacaggaaagatcgcagactacaattataagctgcctgacgatttcaccggctgcgtgatcgcctggaactccaacaatctggattctaaagtgggcggcaactacaattatctgtacaggctgtttcgcaagtccaatctgaagccattcgagcgggacatctccacagagatctaccaggccggctctaccccctgcaatggcgtggagggctttaactgttatttccctctgcagtcttacggcttccagccaacaaacggcgtgggctatcagccctacagagtggtggtgctgtcctttgagctgctgcacgcaccagcaacagtgtgcggcccaaagaagtctaccaatctggtgaagaacaagtgcgtgaacttcaacttcaacggactgaccggcacaggcgtgctgaccgagagcaataagaagttcctgccttttcagcagttcggcagggacatcgcagataccacagacgccgtgcgcgaccctcagaccctggagatcctggacatcacaccatgcagcttcggcggcgtgtccgtgatcacaccaggcaccaatacatccaaccaggtggccgtgctgtatcaggacgtgaattgtaccgaggtgcccgtggcaatccacgcagatcagctgacccctacatggcgggtgtactctaccggcagcaacgtgttccagacaagagccggatgcctgatcggagcagagcacgtgaacaatagctatgagtgcgacatccctatcggcgccggcatctgtgccagctaccagacccagacaaactccccatctggagcaggctccgtggccagccagtccatcatcgcctataccatgagcctgggcgccgagaacagcgtggcctactccaacaattctatcgccatccctaccaacttcacaatcagcgtgaccacagagatcctgccagtgtctatgaccaagacaagcgtggactgcacaatgtatatctgtggcgatagcaccgagtgctccaacctgctgctgcagtacggctccttttgtacccagctgaatagagccctgacaggcatcgccgtggagcaggataagaacacacaggaggtgttcgcccaggtgaagcagatctacaagaccccacccatcaaggactttggcggcttcaacttcagccagatcctgcctgatccaagcaagccctccaagaggtcttttatcgaggacctgctgttcaacaaggtgaccctggccgatgccggcttcatcaagcagtatggagattgcctgggagacatcgcagcccgcgacctgatctgtgcccagaagtttaatggcctgaccgtgctgcctccactgctgacagatgagatgatcgcccagtacacatctgccctgctggccggcaccatcacaagcggatggaccttcggcgcaggagccgccctgcagatcccttttgccatgcagatggcctataggttcaacggcatcggcgtgacccagaatgtgctgtacgagaaccagaagctgatcgccaatcagtttaacagcgccatcggcaagatccaggactctctgtcctctacagccagcgccctgggcaagctgcaggatgtggtgaatcagaacgcccaggccctgaataccctggtgaagcagctgagctccaacttcggcgccatctctagcgtgctgaatgacatcctgagccggctggacccccctgaggcagaggtgcaggtagacaggctgatcacaggccgcctgcagagcctgcagacctacgtgacacagcagctgatcagggcagcagagatcagagcctccgccaatctggccgccaccaagatgagcgagtgcgtgctgggacagtccaagagggtggacttttgtggcaagggctatcacctgatgtctttcccacagagcgcccctcacggcgtggtgtttctgcacgtgacctacgtgccagcccaggagaagaacttcaccacagcaccagccatctgccacgatggaaaggcacactttcctagggagggcgtgttcgtgtctaacggcacccactggtttgtgacacagcgcaatttctacgagccacagatcatcaccacagacaatacattcgtgagcggcaactgtgatgtggtgatcggcatcgtgaacaataccgtgtatgatccactgcagcccgagctggactcctttaaggaggagctggataagtacttcaagaatcacacctctcccgacgtggatctgggcgacatctccggcatcaatgcctctgtggtgaacatccagaaggagatcgaccggctgaacgaggtggccaagaatctgaacgagagcctgatcgatctgcaggagctgggcaagtatgagcagtacatcaagggctctggcagagagaacctgtatttccagggaggaggaggcagcggatacatccctgaggcaccaagggacggacaggcctacgtgcgcaaggatggcgagtgggtgctgctgtccacctttctgggccatcatcaccaccaccaccaccactga

SEQ ID NO: 1196 - DNA, 3846 bp, Artificial Sequence
  Description of Artificial Sequence: Synthetic polynucleotide
atgggcatcctgccaagcccaggaatgcccgccctgctgtctctggtgagcctgctgtccgtgctgctgatgggatgcgtggcagagacaggcacacagtgcgtgaacctgaccacaaggacccagctgccccctgcctataccaattctttcacacggggcgtgtactatcccgacaaggtgtttagaagctccgtgctgcactccacacaggatctgtttctgcctttcttttctaacgtgacctggttccacgccatccacgtgtccggcaccaatggcacaaagcggttcgacaatcccgtgctgccttttaacgatggcgtgtacttcgccagcaccgagaagtccaacatcatcagaggctggatctttggcaccacactggactctaagacacagagcctgctgatcgtgaacaatgccaccaacgtggtgatcaaggtgtgcgagttccagttttgtaatgatccattcctgggcgtgtactatcacaagaacaataagtcctggatggagtctgagtttcgcgtgtattctagcgccaacaattgcacatttgagtacgtgagccagcccttcctgatggacctggagggcaagcagggcaatttcaagaacctgagggagttcgtgtttaagaatatcgatggctacttcaagatctacagcaagcacaccccaatcaacctggtgcgcgacctgccacagggattctccgccctggagccactggtggatctgcccatcggcatcaacatcacccggtttcagacactgctggccctgcacagatcctacctgacaccaggcgactcctctagcggatggaccgcaggagctgccgcctactatgtgggctatctgcagccccggaccttcctgctgaagtacaacgagaatggcaccatcacagacgcagtggattgcgccctggaccccctgtctgagacaaagtgtacactgaagagctttaccgtggagaagggcatctatcagacaagcaatttcagggtgcagcctaccgagtccatcgtgcgctttcccaatatcacaaacctgtgcccttttggcgaggtgttcaacgccaccagattcgccagcgtgtacgcctggaatcggaagagaatctccaactgcgtggccgactattctgtgctgtacaactccgcctctttcagcacctttaagtgctatggcgtgtctcccacaaagctgaatgatctgtgctttaccaacgtgtacgccgatagcttcgtgatcaggggagacgaagtgagacagatcgcaccaggacagacaggaaagatcgcagactacaattataagctgcctgacgatttcaccggctgcgtgatcgcctggaactccaacaatctggattctaaagtgggcggcaactacaattatctgtacaggctgtttcgcaagtccaatctgaagccattcgagcgggacatctccacagagatctaccaggccggctctaccccctgcaatggcgtggagggctttaactgttatttccctctgcagtcttacggcttccagccaacaaacggcgtgggctatcagccctacagagtggtggtgctgtcctttgagctgctgcacgcaccagcaacagtgtgcggcccaaagaagtctaccaatctggtgaagaacaagtgcgtgaacttcaacttcaacggactgaccggcacaggcgtgctgaccgagagcaataagaagttcctgccttttcagcagttcggcagggacatcgcagataccacagacgccgtgcgcgaccctcagaccaacgagatcctggacatcacaccatgcagcttcggcggcgtgtccgtgatcacaccaggcaccaatacatccaaccaggtggccgtgctgtatcaggacgtgaattgtaccgaggtgcccgtggcaatccacgcagatcagctgacccctacatggcgggtgtactctaccggcagcaacgtgttccagacaagagccggatgcctgatcggagcagagcacgtgaacaatagctatgagtgcgacatccctatcggcgccggcatctgtgccagctaccagacccagacaaactccccatctggagcaggctccgtggccagccagtccatcatcgcctataccatgagcctgggcgccgagaacagcgtggcctactccaacaattctatcgccatccctaccaacttcacaatcagcgtgaccacagagatcctgccagtgtctatgaccaagacaagcgtggactgcacaatgtatatctgtggcgatagcaccgagtgctccaacctgctgctgcagtacggctccttttgtacccagctgaatagagccctgacaggcatcgccgtggagcaggataagaacacacaggaggtgttcgcccaggtgaagcagatctacaagaccccacccatcaaggactttggcggcttcaacttcagccagatcctgcctgatccaagcaagccctccaagaggtcttttatcgaggacctgctgttcaacaaggtgaccctggccgatgccggcttcatcaagcagtatggagattgcctgggagacatcgcagcccgcgacctgatctgtgcccagaagtttaatggcctgaccgtgctgcctccactgctgacagatgagatgatcgcccagtacacatctgccctgctggccggcaccatcacaagcggatggaccttcggcgcaggagccgccctgcagatcccttttgccatgcagatggcctataggttcaacggcatcggcgtgacccagaatgtgctgtacgagaaccagaagctgatcgccaatcagtttaacagcgccatcggcaagatccaggactctctgtcctctacagccagcgccctgggcaagctgcaggatgtggtgaatcagaacgcccaggccctgaataccctggtgaagcagctgagctccaacttcggcgccatctctagcgtgctgaatgacatcctgagccggctggacccccctgaggcagaggtgcagatcgacaggctgatcacaggccgcctgcagagcctgcagacctacgtgacacagcagctgatcagggcagcagagatcagagcctccgccaatctggccgccaccaagatgagcgagtgcgtgctgggacagtccaagagggtggacttttgtggcaagggctatcacctgatgtctttcccacagagcgcccctcacggcgtggtgtttctgcacgtgacctacgtgccagcccaggagaagaacttcaccacagcaccagccatctgccacgatggaaaggcacactttcctagggagggcgtgttcgtgtctaacggcacccactggtttgtgacacagcgcaatttctacgagccacagatcatcaccacagacaatacattcgtgagcggcaactgtgatgtggtgatcggcatcgtgaacaataccgtgtatgatccactgcagcccgagctggactcctttaaggaggagctggataagtacttcaagaatcacacctctcccgacgtggatctgggcgacatctccggcatcaatgcctctgtggtgaacatccagaaggagatcgaccggctgaacgaggtggccaagaatctgaacgagagcctgatcgatctgcaggagctgggcaagtatgagcagtacatcaagggctctggcagagagaacctgtatttccagggaggaggaggcagcggatacatccctgaggcaccaagggacggacaggcctacgtgcgcaaggatggcgagtgggtgctgctgtccacctttctgggccatcatcaccaccaccaccaccactga

SEQ ID NO: 1197 - DNA, 3846 bp, Artificial Sequence
  Description of Artificial Sequence: Synthetic polynucleotide
atgggcatcctgccaagcccaggaatgcccgccctgctgtctctggtgagcctgctgtccgtgctgctgatgggatgcgtggcagagacaggcacacagtgcgtgaacctgaccacaaggacccagctgccccctgcctataccaattctttcacacggggcgtgtactatcccgacaaggtgtttagaagctccgtgctgcactccacacaggatctgtttctgcctttcttttctaacgtgacctggttccacgccatccacgtgtccggcaccaatggcacaaagcggttcgacaatcccgtgctgccttttaacgatggcgtgtacttcgccagcaccgagaagtccaacatcatcagaggctggatctttggcaccacactggactctaagacacagagcctgctgatcgtgaacaatgccaccaacgtggtgatcaaggtgtgcgagttccagttttgtaatgatccattcctgggcgtgtactatcacaagaacaataagtcctggatggagtctgagtttcgcgtgtattctagcgccaacaattgcacatttgagtacgtgagccagcccttcctgatggacctggagggcaagcagggcaatttcaagaacctgagggagttcgtgtttaagaatatcgatggctacttcaagatctacagcaagcacaccccaatcaacctggtgcgcgacctgccacagggattctccgccctggagccactggtggatctgcccatcggcatcaacatcacccggtttcagacactgctggccctgcacagatcctacctgacaccaggcgactcctctagcggatggaccgcaggagctgccgcctactatgtgggctatctgcagccccggaccttcctgctgaagtacaacgagaatggcaccatcacagacgcagtggattgcgccctggaccccctgtctgagacaaagtgtacactgaagagctttaccgtggagaagggcatctatcagacaagcaatttcagggtgcagcctaccgagtccatcgtgcgctttcccaatatcacaaacctgtgcccttttggcgaggtgttcaacgccaccagattcgccagcgtgtacgcctggaatcggaagagaatctccaactgcgtggccgactattctgtgctgtacaactccgcctctttcagcacctttaagtgctatggcgtgtctcccacaaagctgaatgatctgtgctttaccaacgtgtacgccgatagcttcgtgatcaggggagacgaagtgagacagatcgcaccaggacagacaggaaagatcgcagactacaattataagctgcctgacgatttcaccggctgcgtgatcgcctggaactccaacaatctggattctaaagtgggcggcaactacaattatctgtacaggctgtttcgcaagtccaatctgaagccattcgagcgggacatctccacagagatctaccaggccggctctaccccctgcaatggcgtggagggctttaactgttatttccctctgcagtcttacggcttccagccaacaaacggcgtgggctatcagccctacagagtggtggtgctgtcctttgagctgctgcacgcaccagcaacagtgtgcggcccaaagaagtctaccaatctggtgaagaacaagtgcgtgaacttcaacttcaacggactgaccggcacaggcgtgctgaccgagagcaataagaagttcctgccttttcagcagttcggcagggacatcgcagataccacagacgccgtgcgcgaccctcagaccctggagatcctggacatcacaccatgcagcttcggcggcgtgtccgtgatcacaccaggcaccaatacatccaaccaggtggccgtgctgtatcaggacgtgaattgtaccgaggtgcccgtggcaatccacgcagatcagctgacccctacatggcgggtgtactctaccggcagcaacgtgttccagacaagagccggatgcctgatcggagcagagcacgtgaacaatagctatgagtgcgacatccctatcggcgccggcatctgtgccagctaccagacccagacaaactccccatctggagcaggctccgtggccagccagtccatcatcgcctataccatgagcctgggcgccgagaacagcgtggcctactccaacaattctatcgccatccctaccaacttcacaatcagcgtgaccacagagatcctgccagtgtctatgaccaagacaagcgtggactgcacaatgtatatctgtggcgatagcaccgagtgctccaacctgctgctgcagtacggctccttttgtacccagctgaatagagccctgacaggcatcgccgtggagcaggataagaacacacaggaggtgttcgcccaggtgaagcagatctacaagaccccacccatcaaggactttggcggcttcaacttcagccagatcctgcctgatccaagcaagccctccaagaggtcttttatcgaggacctgctgttcaacaaggtgaccctggccgatgccggcttcatcaagcagtatggagattgcctgggagacatcgcagcccgcgacctgatctgtgcccagaagtttaatggcctgaccgtgctgcctccactgctgacagatgagatgatcgcccagtacacatctgccctgctggccggcaccatcacaagcggatggaccttcggcgcaggagccgccctgcagatcccttttgccatgcagatggcctataggttcaacggcatcggcgtgacccagaatgtgctgtacgagaaccagaagctgatcgccaatcagtttaacagcgccatcggcaatatccaggactctctgtcctctacagccagcgccctgggcaagctgcaggatgtggtgaatcagaacgcccaggccctgaataccctggtgaagcagctgagctccaacttcggcgccatctctagcgtgctgaatgacatcctgagccggctggacccccctgaggcagaggtgcagatcgacaggctgatcacaggccgcctgcagagcctgcagacctacgtgacacagcagctgatcagggcagcagagatcagagcctccgccaatctggccgccaccaagatgagcgagtgcgtgctgggacagtccaagagggtggacttttgtggcaagggctatcacctgatgtctttcccacagagcgcccctcacggcgtggtgtttctgcacgtgacctacgtgccagcccaggagaagaacttcaccacagcaccagccatctgccacgatggaaaggcacactttcctagggagggcgtgttcgtgtctaacggcacccactggtttgtgacacagcgcaatttctacgagccacagatcatcaccacagacaatacattcgtgagcggcaactgtgatgtggtgatcggcatcgtgaacaataccgtgtatgatccactgcagcccgagctggactcctttaaggaggagctggataagtacttcaagaatcacacctctcccgacgtggatctgggcgacatctccggcatcaatgcctctgtggtgaacatccagaaggagatcgaccggctgaacgaggtggccaagaatctgaacgagagcctgatcgatctgcaggagctgggcaagtatgagcagtacatcaagggctctggcagagagaacctgtatttccagggaggaggaggcagcggatacatccctgaggcaccaagggacggacaggcctacgtgcgcaaggatggcgagtgggtgctgctgtccacctttctgggccatcatcaccaccaccaccaccactga

SEQ ID NO: 1198 - DNA, 3846 bp, Artificial Sequence
  Description of Artificial Sequence: Synthetic polynucleotide
atgggcatcctgccaagcccaggaatgcccgccctgctgtctctggtgagcctgctgtccgtgctgctgatgggatgcgtggcagagacaggcacacagtgcgtgaacctgaccacaaggacccagctgccccctgcctataccaattctttcacacggggcgtgtactatcccgacaaggtgtttagaagctccgtgctgcactccacacaggatctgtttctgcctttcttttctaacgtgacctggttccacgccatccacgtgtccggcaccaatggcacaaagcggttcgacaatcccgtgctgccttttaacgatggcgtgtacttcgccagcaccgagaagtccaacatcatcagaggctggatctttggcaccacactggactctaagacacagagcctgctgatcgtgaacaatgccaccaacgtggtgatcaaggtgtgcgagttccagttttgtaatgatccattcctgggcgtgtactatcacaagaacaataagtcctggatggagtctgagtttcgcgtgtattctagcgccaacaattgcacatttgagtacgtgagccagcccttcctgatggacctggagggcaagcagggcaatttcaagaacctgagggagttcgtgtttaagaatatcgatggctacttcaagatctacagcaagcacaccccaatcaacctggtgcgcgacctgccacagggattctccgccctggagccactggtggatctgcccatcggcatcaacatcacccggtttcagacactgctggccctgcacagatcctacctgacaccaggcgactcctctagcggatggaccgcaggagctgccgcctactatgtgggctatctgcagccccggaccttcctgctgaagtacaacgagaatggcaccatcacagacgcagtggattgcgccctggaccccctgtctgagacaaagtgtacactgaagagctttaccgtggagaagggcatctatcagacaagcaatttcagggtgcagcctaccgagtccatcgtgcgctttcccaatatcacaaacctgtgcccttttggcgaggtgttcaacgccaccagattcgccagcgtgtacgcctggaatcggaagagaatctccaactgcgtggccgactattctgtgctgtacaactccgcctctttcagcacctttaagtgctatggcgtgtctcccacaaagctgaatgatctgtgctttaccaacgtgtacgccgatagcttcgtgatcaggggagacgaagtgagacagatcgcaccaggacagacaggaaagatcgcagactacaattataagctgcctgacgatttcaccggctgcgtgatcgcctggaactccaacaatctggattctaaagtgggcggcaactacaattatctgtacaggctgtttcgcaagtccaatctgaagccattcgagcgggacatctccacagagatctaccaggccggctctaccccctgcaatggcgtggagggctttaactgttatttccctctgcagtcttacggcttccagccaacaaacggcgtgggctatcagccctacagagtggtggtgctgtcctttgagctgctgcacgcaccagcaacagtgtgcggcccaaagaagtctaccaatctggtgaagaacaagtgcgtgaacttcaacttcaacggactgaccggcacaggcgtgctgaccgagagcaataagaagttcctgccttttcagcagttcggcagggacatcgcagataccacagacgccgtgcgcgaccctcagaccctggagatcctggacatcacaccatgcagcttcggcggcgtgtccgtgatcacaccaggcaccaatacatccaaccaggtggccgtgctgtatcaggacgtgaattgtaccgaggtgcccgtggcaatccacgcagatcagctgacccctacatggcgggtgtactctaccggcagcaacgtgttccagacaagagccggatgcctgatcggagcagagcacgtgaacaatagctatgagtgcgacatccctatcggcgccggcatctgtgccagctaccagacccagacaaactccccatctggagcaggctccgtggccagccagtccatcatcgcctataccatgagcctgggcgccgagaacagcgtggcctactccaacaattctatcgccatccctaccaacttcgctatcagcgtgaccacagagatcctgccagtgtctatgaccaagacaagcgtggactgcacaatgtatatctgtggcgatagcaccgagtgctccaacctgctgctgcagtacggctccttttgtacccagctgaatagagccctgacaggcatcgccgtggagcaggataagaacacacaggaggtgttcgcccaggtgaagcagatctacaagaccccacccatcaaggactttggcggcttcaacttcagccagatcctgcctgatccaagcaagccctccaagaggtcttttatcgaggacctgctgttcaacaaggtgaccctggccgatgccggcttcatcaagcagtatggagattgcctgggagacatcgcagcccgcgacctgatctgtgcccagaagtttaatggcctgaccgtgctgcctccactgctgacagatgagatgatcgcccagtacacatctgccctgctggccggcaccatcacaagcggatggaccttcggcgcaggagccgccctgcagatcccttttgccatgcagatggcctataggttcaacggcatcggcgtgacccagaatgtgctgtacgagaaccagaagctgatcgccaatcagtttaacagcgccatcggcaagatccaggactctctgtcctctacagccagcgccctgggcaagctgcaggatgtggtgaatcagaacgcccaggccctgaataccctggtgaagcagctgagctccaacttcggcgccatctctagcgtgctgaatgacatcctgagccggctggacccccctgaggcagaggtgcagatcgacaggctgatcacaggccgcctgcagagcctgcagacctacgtgacacagcagctgatcagggcagcagagatcagagcctccgccaatctggccgccaccaagatgagcgagtgcgtgctgggacagtccaagagggtggacttttgtggcaagggctatcacctgatgtctttcccacagagcgcccctcacggcgtggtgtttctgcacgtgacctacgtgccagcccaggagaagaacttcaccacagcaccagccatctgccacgatggaaaggcacactttcctagggagggcgtgttcgtgtctaacggcacccactggtttgtgacacagcgcaatttctacgagccacagatcatcaccacagacaatacattcgtgagcggcaactgtgatgtggtgatcggcatcgtgaacaataccgtgtatgatccactgcagcccgagctggactcctttaaggaggagctggataagtacttcaagaatcacacctctcccgacgtggatctgggcgacatctccggcatcaatgcctctgtggtgaacatccagaaggagatcgaccggctgaacgaggtggccaagaatctgaacgagagcctgatcgatctgcaggagctgggcaagtatgagcagtacatcaagggctctggcagagagaacctgtatttccagggaggaggaggcagcggatacatccctgaggcaccaagggacggacaggcctacgtgcgcaaggatggcgagtgggtgctgctgtccacctttctgggccatcatcaccaccaccaccaccactga

SEQ ID NO: 1199 - DNA, 3846 bp, Artificial Sequence
  Description of Artificial Sequence: Synthetic polynucleotide
atgggcatcctgccaagcccaggaatgcccgccctgctgtctctggtgagcctgctgtccgtgctgctgatgggatgcgtggcagagacaggcacacagtgcgtgaacctgaccacaaggacccagctgccccctgcctataccaattctttcacacggggcgtgtactatcccgacaaggtgtttagaagctccgtgctgcactccacacaggatctgtttctgcctttcttttctaacgtgacctggttccacgccatccacgtgtccggcaccaatggcacaaagcggttcgacaatcccgtgctgccttttaacgatggcatttacttcgccagcaccgagaagtccaacatcatcagaggctggatctttggcaccacactggactctaagacacagagcctgctgatcgtgaacaatgccaccaacgtggtgatcaaggtgtgcgagttccagttttgtaatgatccattcctgggcgtgtactatcacaagaacaataagtcctggatggagtctgagtttcgcgtgtattctagcgccaacaattgcacatttgagtacgtgagccagcccttcctgatggacctggagggcaagcagggcaatttcaagaacctgagggagttcgtgtttaagaatatcgatggctacttcaagatctacagcaagcacaccccaatcaacctggtgcgcgacctgccacagggattctccgccctggagccactggtggatctgcccatcggcatcaacatcacccggtttcagacactgctggccctgcacagatcctacctgacaccaggcgactcctctagcggatggaccgcaggagctgccgcctactatgtgggctatctgcagccccggaccttcctgctgaagtacaacgagaatggcaccatcacagacgcagtggattgcgccctggaccccctgtctgagacaaagtgtacactgaagagctttaccgtggagaagggcatctatcagacaagcaatttcagggtgcagcctaccgagtccatcgtgcgctttcccaatatcacaaacctgtgcccttttggcgaggtgttcaacgccaccagattcgccagcgtgtacgcctggaatcggaagagaatctccaactgcgtggccgactattctgtgctgtacaactccgcctctttcagcacctttaagtgctatggcgtgtctcccacaaagctgaatgatctgtgctttaccaacgtgtacgccgatagcttcgtgatcaggggagacgaagtgagacagatcgcaccaggacagacaggaaagatcgcagactacaattataagctgcctgacgatttcaccggctgcgtgatcgcctggaactccaacaatctggattctaaagtgggcggcaactacaattatctgtacaggctgtttcgcaagtccaatctgaagccattcgagcgggacatctccacagagatctaccaggccggctctaccccctgcaatggcgtggagggctttaactgttatttccctctgcagtcttacggcttccagccaacaaacggcgtgggctatcagccctacagagtggtggtgctgtcctttgagctgctgcacgcaccagcaacagtgtgcggcccaaagaagtctaccaatctggtgaagaacaagtgcgtgaacttcaacttcaacggactgaccggcacaggcgtgctgaccgagagcaataagaagttcctgccttttcagcagttcggcagggacatcgcagataccacagacgccgtgcgcgaccctcagaccctggagatcctggacatcacaccatgcagcttcggcggcgtgtccgtgatcacaccaggcaccaatacatccaaccaggtggccgtgctgtatcaggacgtgaattgtaccgaggtgcccgtggcaatccacgcagatcagctgacccctacatggcgggtgtactctaccggcagcaacgtgttccagacaagagccggatgcctgatcggagcagagcacgtgaacaatagctatgagtgcgacatccctatcggcgccggcatctgtgccagctaccagacccagacaaactccccatctggagcaggctccgtggccagccagtccatcatcgcctataccatgagcctgggcgccgagaacagcgtggcctactccaacaattctatcgccatccctaccaacttcacaatcagcgtgaccacagagatcctgccagtgtctatgaccaagacaagcgtggactgcacaatgtatatctgtggcgatagcaccgagtgctccaacctgctgctgcagtacggctccttttgtacccagctgaatagagccctgacaggcatcgccgtggagcaggataagaacacacaggaggtgttcgcccaggtgaagcagatctacaagaccccacccatcaaggactttggcggcttcaacttcagccagatcctgcctgatccaagcaagccctccaagaggtcttttatcgaggacctgctgttcaacaaggtgaccctggccgatgccggcttcatcaagcagtatggagattgcctgggagacatcgcagcccgcgacctgatctgtgcccagaagtttaatggcctgaccgtgctgcctccactgctgacagatgagatgatcgcccagtacacatctgccctgctggccggcaccatcacaagcggatggaccttcggcgcaggagccgccctgcagatcccttttgccatgcagatggcctataggttcaacggcatcggcgtgacccagaatgtgctgtacgagaaccagaagctgatcgccaatcagtttaacagcgccatcggcaagatccaggactctctgtcctctacagccagcgccctgggcaagctgcaggatgtggtgaatcagaacgcccaggccctgaataccctggtgaagcagctgagctccaacttcggcgccatctctagcgtgctgaatgacatcctgagccggctggacccccctgaggcagaggtgcagatcgacaggctgatcacaggccgcctgcagagcctgcagacctacgtgacacagcagctgatcagggcagcagagatcagagcctccgccaatctggccgccaccaagatgagcgagtgcgtgctgggacagtccaagagggtggacttttgtggcaagggctatcacctgatgtctttcccacagagcgcccctcacggcgtggtgtttctgcacgtgacctacgtgccagcccaggagaagaacttcaccacagcaccagccatctgccacgatggaaaggcacactttcctagggagggcgtgttcgtgtctaacggcacccactggtttgtgacacagcgcaatttctacgagccacagatcatcaccacagacaatacattcgtgagcggcaactgtgatgtggtgatcggcatcgtgaacaataccgtgtatgatccactgcagcccgagctggactcctttaaggaggagctggataagtacttcaagaatcacacctctcccgacgtggatctgggcgacatctccggcatcaatgcctctgtggtgaacatccagaaggagatcgaccggctgaacgaggtggccaagaatctgaacgagagcctgatcgatctgcaggagctgggcaagtatgagcagtacatcaagggctctggcagagagaacctgtatttccagggaggaggaggcagcggatacatccctgaggcaccaagggacggacaggcctacgtgcgcaaggatggcgagtgggtgctgctgtccacctttctgggccatcatcaccaccaccaccaccactga

SEQ ID NO: 1200 - DNA, 3846 bp, Artificial Sequence
  Description of Artificial Sequence: Synthetic polynucleotide
atgggcatcctgccaagcccaggaatgcccgccctgctgtctctggtgagcctgctgtccgtgctgctgatgggatgcgtggcagagacaggcacacagtgcgtgaacctgaccacaaggacccagctgccccctgcctataccaattctttcacacggggcgtgtactatcccgacaaggtgtttagaagctccgtgctgcactccacacaggatctgtttctgcctttcttttctaacgtgacctggttccacgccatccacgtgtccggcaccaatggcacaaagcggttcgacaatcccgtgctgccttttaacgatggcgtgtacttcgccagcaccgagaagtccaacatcatcagaggctggatctttggcaccacactggactctaagacacagagcctgctgatcgtgaacaatgccaccaacgtggtgatcaaggtgtgcgagttccagttttgtaatgatccattcctgggcgtgtactatcacaagaacaataagtcctggatggagtctgagtttcgcgtgtattctagcgccaacaattgcacatttgagtacgtgagccagcccttcctgatggacctggagggcaagcagggcaatttcaagaacctgagggagttcgtgtttaagaatatcgatggctacttcaagatctacagcaagcacaccccaatcaacctggtgcgcgacctgccacagggattctccgccctggagccactggtggatctgcccatcggcatcaacatcacccggtttcagacactgctggccctgcacagatcctacctgacaccaggcgactcctctagcggatggaccgcaggagctgccgcctactatgtgggctatctgcagccccggaccttcctgctgaagtacaacgagaatggcaccatcacagacgcagtggattgcgccctggaccccctgtctgagacaaagtgtacactgaagagctttaccgtggagaagggcatctatcagacaagcaatttcagggtgcagcctaccgagtccatcgtgcgctttcccaatatcacaaacctgtgcccttttggcgaggtgttcaacgccaccagattcgccagcgtgtacgcctggaatcggaagagaatctccaactgcgtggccgactattctgtgctgtacaactccgcctctttcagcacctttaagtgctatggcgtgtctcccacaaagctgaatgatctgtgctttaccaacgtgtacgccgatagcttcgtgatcaggggagacgaagtgagacagatcgcaccaggacagacaggaaagatcgcagactacaattataagctgcctgacgatttcaccggctgcgtgatcgcctggaactccaacaatctggattctaaagtgggcggcaactacaattatctgtacaggctgtttcgcaagtccaatctgaagccattcgagcgggacatctccacagagatctaccaggccggctctaccccctgcaatggcgtggagggctttaactgttatttccctctgcagtcttacggcttccagccaacaaacggcgtgggctatcagccctacagagtggtggtgctgtcctttgagctgctgcacgcaccagcaacagtgtgcggcccaaagaagtctaccaatctggtgaagaacaagtgcgtgaacttcaacttcaacggactgaccggcacaggcgtgctgaccgagagcaataagaagttcctgccttttcagcagttcggcagggacatcgcagataccacagacgccgtgcgcgaccctcagaccctggagatcctggacatcacaccatgcagcttcggcggcgtgtccgtgatcacaccaggcaccaatacatccaaccaggtggccgtgctgtatcaggacgtgaattgtaccgaggtgcccgtggcaatccacgcagatcagctgacccctacatggcgggtgtactctaccggcagcaacgtgttccagacaagagccggatgcctgatcggagcagagcacgtgaacaatagctatgagtgcgacatccctatcggcgccggcatctgtgccagctaccagacccagacaaactccccatctggagcaggctccgtggccagccagtccatcatcgcctataccatgagcctgggcgccgagaacagcgtggcctactccaacaattctatcgccatccctaccaacttcacaatcagcgtgaccacagagatcctgccagtgtctatgaccaagacaagcgtggactgcacaatgtatatctgtggcgatagcaccgagtgctccaacctgctgctgcagtacggctccttttgtacccagctgaatagagccctgacaggcatcgccgtggagcaggataagaacacacaggaggtgttcgcccaggtgaagcagatctacaagaccccacccatcaaggactttggcggcttcaacttcagccagatcctgcctgatccaagcaagccctccaagaggtcttttatcgaggacctgctgttcaacaaggtgaccctggccgatgccggcttcatcaagcagtatggagattgcctgggagacatcgcagcccgcgacctgatctgtgcccagaagtttaatggcctgaccgtgctgcctccactgctgacagatgagatgatcgcccagtacacatctgccctgctggccggcaccatcacaagcggatggaccttcggcgcaggagccgccctgcagatcccttttgccatgcagatggcctataggttcaacggcatcggcgtgacccagaatgtgctgtacgagaaccagaagctgatcgccaatcagtttaaccgagccatcggcaagatccaggactctctgtcctctacagccagcgccctgggcaagctgcaggatgtggtgaatcagaacgcccaggccctgaataccctggtgaagcagctgagctccaacttcggcgccatctctagcgtgctgaatgacatcctgagccggctggacccccctgaggcagaggtgcagatcgacaggctgatcacaggccgcctgcagagcctgcagacctacgtgacacagcagctgatcagggcagcagagatcagagcctccgccaatctggccgccaccaagatgagcgagtgcgtgctgggacagtccaagagggtggacttttgtggcaagggctatcacctgatgtctttcccacagagcgcccctcacggcgtggtgtttctgcacgtgacctacgtgccagcccaggagaagaacttcaccacagcaccagccatctgccacgatggaaaggcacactttcctagggagggcgtgttcgtgtctaacggcacccactggtttgtgacacagcgcaatttctacgagccacagatcatcaccacagacaatacattcgtgagcggcaactgtgatgtggtgatcggcatcgtgaacaataccgtgtatgatccactgcagcccgagctggactcctttaaggaggagctggataagtacttcaagaatcacacctctcccgacgtggatctgggcgacatctccggcatcaatgcctctgtggtgaacatccagaaggagatcgaccggctgaacgaggtggccaagaatctgaacgagagcctgatcgatctgcaggagctgggcaagtatgagcagtacatcaagggctctggcagagagaacctgtatttccagggaggaggaggcagcggatacatccctgaggcaccaagggacggacaggcctacgtgcgcaaggatggcgagtgggtgctgctgtccacctttctgggccatcatcaccaccaccaccaccactga

SEQ ID NO: 1201 - DNA, 3846 bp, Artificial Sequence
  Description of Artificial Sequence: Synthetic polynucleotide
atgggcatcctgccaagcccaggaatgcccgccctgctgtctctggtgagcctgctgtccgtgctgctgatgggatgcgtggcagagacaggcacacagtgcgtgaacctgaccacaaggacccagctgccccctgcctataccaattctttcacacggggcgtgtactatcccgacaaggtgtttagaagctccgtgctgcactccacacaggatctgtttctgcctttcttttctaacgtgacctggttccacgccatccacgtgtccggcaccaatggcacaaagcggttcgacaatcccgtgctgccttttaacgatggcgtgtacttcgccagcaccgagaagtccaacatcatcagaggctggatctttggcaccacactggactctaagacacagagcctgctgatcgtgaacaatgccaccaacgtggtgatcaaggtgtgcgagttccagttttgtaatgatccattcctgggcgtgtactatcacaagaacaataagtcctggatggagtctgagtttcgcgtgtattctagcgccaacaattgcacatttgagtacgtgagccagcccttcctgatggacctggagggcaagcagggcaatttcaagaacctgagggagttcgtgtttaagaatatcgatggctacttcaagatctacagcaagcacaccccaatcaacctggtgcgcgacctgccacagggattctccgccctggagccactggtggatctgcccatcggcatcaacatcacccggtttcagacactgctggccctgcacagatcctacctgacaccaggcgactcctctagcggatggaccgcaggagctgccgcctactatgtgggctatctgcagccccggaccttcctgctgaagtacaacgagaatggcaccatcacagacgcagtggattgcgccctggaccccctgtctgagacaaagtgtacactgaagagctttaccgtggagaagggcatctatcagacaagcaatttcagggtgcagcctaccgagtccatcgtgcgctttcccaatatcacaaacctgtgcccttttggcgaggtgttcaacgccaccagattcgccagcgtgtacgcctggaatcggaagagaatctccaactgcgtggccgactattctgtgctgtacaactccgcctctttcagcacctttaagtgctatggcgtgtctcccacaaagctgaatgatctgtgctttaccaacgtgtacgccgatagcttcgtgatcaggggagacgaagtgagacagatcgcaccaggacagacaggaaagatcgcagactacaattataagctgcctgacgatttcaccggctgcgtgatcgcctggaactccaacaatctggattctaaagtgggcggcaactacaattatctgtacaggctgtttcgcaagtccaatctgaagccattcgagcgggacatctccacagagatctaccaggccggctctaccccctgcaatggcgtggagggctttaactgttatttccctctgcagtcttacggcttccagccaacaaacggcgtgggctatcagccctacagagtggtggtgctgtcctttgagctgctgcacgcaccagcaacagtgtgcggcccaaagaagtctaccaatctggtgaagaacaagtgcgtgaacttcaacttcaacggactgaccggcacaggcgtgctgaccgagagcaataagaagttcctgccttttcagcagttcggcagggacatcgcagataccacagacgccgtgcgcgaccctcagaccctggagatcctggacatcacaccatgcagcttcggcggcgtgtccgtgatcacaccaggcaccaatacatccaaccaggtggccgtgctgtatcaggacgtgaattgtaccgaggtgcccgtggcaatccacgcagatcagctgacccctacatggcgggtgtactctaccggcagcaacgtgttccagacaagagccggatgcctgatcggagcagagcacgtgaacaatagctatgagtgcgacatccctatcggcgccggcatctgtgccagctaccagacccagacaaactccccatctggagcaggctccgtggccagccagtccatcatcgcctataccatgagcctgggcgccgagaacagcgtggcctactccaacaattctatcgccatccctaccaacttcacaatcagcgtgaccacagagatcctgccagtgtctatgaccaagacaagcgtggactgcacaatgtatatctgtggcgatagcaccgagtgctccaacctgctgctgcagtacggctccttttgtacccagctgaatagagccctgacaggcatcgccgtggagcaggataagaacacacaggaggtgttcgcccaggtgaagcagatctacaagaccccacccatcaaggactttggcggcttcaacttcagccagatcctgcctgatccaagcaagccctccaagaggtcttttatcgaggacctgctgttcaacaaggtgaccctggccgatgccggcttcatcaagcagtatggagattgcctgggagacatcgcagcccgcgacctgatctgtgcccagaagtttaatggcctgaccgtgctgcctccactgctgacagatgagatgatcgcccagtacacatctgccctgctggccggcaccatcacaagcggatggaccttcggcgcaggagccgccctgcagatcccttttgccatgcagatggcctataggttcaacggcatcggcgtgacccagaatgtgctgtacgagaaccagaagctgatcgccaatcagtttaacagcgccatcggcaagatccaggactctctgtcctctacagccagcgccctgggcaagctgcaggatgtggtgaatcagaacgcccaggccctgaataccctggtgaagcagctgagctccaacttcggcgccatctctagcgtgctgaatgacatcctgagccggctggacaaacctgaggcagaggtgcagatcgacaggctgatcacaggccgcctgcagagcctgcagacctacgtgacacagcagctgatcagggcagcagagatcagagcctccgccaatctggccgccaccaagatgagcgagtgcgtgctgggacagtccaagagggtggacttttgtggcaagggctatcacctgatgtctttcccacagagcgcccctcacggcgtggtgtttctgcacgtgacctacgtgccagcccaggagaagaacttcaccacagcaccagccatctgccacgatggaaaggcacactttcctagggagggcgtgttcgtgtctaacggcacccactggtttgtgacacagcgcaatttctacgagccacagatcatcaccacagacaatacattcgtgagcggcaactgtgatgtggtgatcggcatcgtgaacaataccgtgtatgatccactgcagcccgagctggactcctttaaggaggagctggataagtacttcaagaatcacacctctcccgacgtggatctgggcgacatctccggcatcaatgcctctgtggtgaacatccagaaggagatcgaccggctgaacgaggtggccaagaatctgaacgagagcctgatcgatctgcaggagctgggcaagtatgagcagtacatcaagggctctggcagagagaacctgtatttccagggaggaggaggcagcggatacatccctgaggcaccaagggacggacaggcctacgtgcgcaaggatggcgagtgggtgctgctgtccacctttctgggccatcatcaccaccaccaccaccactga

SEQ ID NO: 1202 - DNA, 3846 bp, Artificial Sequence
  Description of Artificial Sequence: Synthetic polynucleotide
atgggcatcctgccaagcccaggaatgcccgccctgctgtctctggtgagcctgctgtccgtgctgctgatgggatgcgtggcagagacaggcacacagtgcgtgaacctgaccacaaggacccagctgccccctgcctataccaattctttcacacggggcgtgtactatcccgacaaggtgtttagaagctccgtgctgcactccacacaggatctgtttctgcctttcttttctaacgtgacctggttccacgccatccacgtgtccggcaccaatggcacaaagcggttcgacaatcccgtgctgccttttaacgatggcgtgtacttcgccagcaccgagaagtccaacatcatcagaggctggatctttggcaccacactggactctaagacacagagcctgctgatcgtgaacaatgccaccaacgtggtgatcaaggtgtgcgagttccagttttgtaatgatccattcctgggcgtgtactatcacaagaacaataagtcctggatggagtctgagtttcgcgtgtattctagcgccaacaattgcacatttgagtacgtgagccagcccttcctgatggacctggagggcaagcagggcaatttcaagaacctgagggagttcgtgtttaagaatatcgatggctacttcaagatctacagcaagcacaccccaatcaacctggtgcgcgacctgccacagggattctccgccctggagccactggtggatctgcccatcggcatcaacatcacccggtttcagacactgctggccctgcacagatcctacctgacaccaggcgactcctctagcggatggaccgcaggagctgccgcctactatgtgggctatctgcagccccggaccttcctgctgaagtacaacgagaatggcaccatcacagacgcagtggattgcgccctggaccccctgtctgagacaaagtgtacactgaagagctttaccgtggagaagggcatctatcagacaagcaatttcagggtgcagcctaccgagtccatcgtgcgctttcccaatatcacaaacctgtgcccttttggcgaggtgttcaacgccaccagattcgccagcgtgtacgcctggaatcggaagagaatctccaactgcgtggccgactattctgtgctgtacaactccgcctctttcagcacctttaagtgctatggcgtgtctcccacaaagctgaatgatctgtgctttaccaacgtgtacgccgatagcttcgtgatcaggggagacgaagtgagacagatcgcaccaggacagacaggaaagatcgcagactacaattataagctgcctgacgatttcaccggctgcgtgatcgcctggaactccaacaatctggattctaaagtgggcggcaactacaattatctgtacaggctgtttcgcaagtccaatctgaagccattcgagcgggacatctccacagagatctaccaggccggctctaccccctgcaatggcgtggagggctttaactgttatttccctctgcagtcttacggcttccagccaacaaacggcgtgggctatcagccctacagagtggtggtgctgtcctttgagctgctgcacgcaccagcaacagtgtgcggcccaaagaagtctaccaatctggtgaagaacaagtgcgtgaacttcaacttcaacggactgaccggcacaggcgtgctgaccgagagcaataagaagttcctgccttttcagcagttcggcagggacatcgcagataccacagacgccgtgcgcgaccctcagacctcagagatcctggacatcacaccatgcagcttcggcggcgtgtccgtgatcacaccaggcaccaatacatccaaccaggtggccgtgctgtatcaggacgtgaattgtaccgaggtgcccgtggcaatccacgcagatcagctgacccctacatggcgggtgtactctaccggcagcaacgtgttccagacaagagccggatgcctgatcggagcagagcacgtgaacaatagctatgagtgcgacatccctatcggcgccggcatctgtgccagctaccagacccagacaaactccccatctggagcaggctccgtggccagccagtccatcatcgcctataccatgagcctgggcgccgagaacagcgtggcctactccaacaattctatcgccatccctaccaacttcacaatcagcgtgaccacagagatcctgccagtgtctatgaccaagacaagcgtggactgcacaatgtatatctgtggcgatagcaccgagtgctccaacctgctgctgcagtacggctccttttgtacccagctgaatagagccctgacaggcatcgccgtggagcaggataagaacacacaggaggtgttcgcccaggtgaagcagatctacaagaccccacccatcaaggactttggcggcttcaacttcagccagatcctgcctgatccaagcaagccctccaagaggtcttttatcgaggacctgctgttcaacaaggtgaccctggccgatgccggcttcatcaagcagtatggagattgcctgggagacatcgcagcccgcgacctgatctgtgcccagaagtttaatggcctgaccgtgctgcctccactgctgacagatgagatgatcgcccagtacacatctgccctgctggccggcaccatcacaagcggatggaccttcggcgcaggagccgccctgcagatcccttttgccatgcagatggcctataggttcaacggcatcggcgtgacccagaatgtgctgtacgagaaccagaagctgatcgccaatcagtttaacagcgccatcggcaagatccaggactctctgtcctctacagccagcgccctgggcaagctgcaggatgtggtgaatcagaacgcccaggccctgaataccctggtgaagcagctgagctccaacttcggcgccatctctagcgtgctgaatgacatcctgagccggctggacccccctgaggcagaggtgcagatcgacaggctgatcacaggccgcctgcagagcctgcagacctacgtgacacagcagctgatcagggcagcagagatcagagcctccgccaatctggccgccaccaagatgagcgagtgcgtgctgggacagtccaagagggtggacttttgtggcaagggctatcacctgatgtctttcccacagagcgcccctcacggcgtggtgtttctgcacgtgacctacgtgccagcccaggagaagaacttcaccacagcaccagccatctgccacgatggaaaggcacactttcctagggagggcgtgttcgtgtctaacggcacccactggtttgtgacacagcgcaatttctacgagccacagatcatcaccacagacaatacattcgtgagcggcaactgtgatgtggtgatcggcatcgtgaacaataccgtgtatgatccactgcagcccgagctggactcctttaaggaggagctggataagtacttcaagaatcacacctctcccgacgtggatctgggcgacatctccggcatcaatgcctctgtggtgaacatccagaaggagatcgaccggctgaacgaggtggccaagaatctgaacgagagcctgatcgatctgcaggagctgggcaagtatgagcagtacatcaagggctctggcagagagaacctgtatttccagggaggaggaggcagcggatacatccctgaggcaccaagggacggacaggcctacgtgcgcaaggatggcgagtgggtgctgctgtccacctttctgggccatcatcaccaccaccaccaccactga

SEQ ID NO: 1203 - DNA, 3846 bp, Artificial Sequence
  Description of Artificial Sequence: Synthetic polynucleotide
atgggcatcctgccaagcccaggaatgcccgccctgctgtctctggtgagcctgctgtccgtgctgctgatgggatgcgtggcagagacaggcacacagtgcgtgaacctgaccacaaggacccagctgccccctgcctataccaattctttcacacggggcgtgtactatcccgacaaggtgtttagaagctccgtgctgcactccacacaggatctgtttctgcctttcttttctaacgtgacctggttccacgccatccacgtgtccggcaccaatggcacaaagcggttcgacaatcccgtgctgccttttaacgatggcgtgtacttcgccagcaccgagaagtccaacatcatcagaggctggatctttggcaccacactggactctaagacacagagcctgctgatcgtgaacaatgccaccaacgtggtgatcaaggtgtgcgagttccagttttgtaatgatccattcctgggcgtgtactatcacaagaacaataagtcctggatggagtctgagtttcgcgtgtattctagcgccaacaattgcacatttgagtacgtgagccagcccttcctgatggacctggagggcaagcagggcaatttcaagaacctgagggagttcgtgtttaagaatatcgatggctacttcaagatctacagcaagcacaccccaatcaacctggtgcgcgacctgccacagggattctccgccctggagccactggtggatctgcccatcggcatcaacatcacccggtttcagacactgctggccctgcacagatcctacctgacaccaggcgactcctctagcggatggaccgcaggagctgccgcctactatgtgggctatctgcagccccggaccttcctgctgaagtacaacgagaatggcaccatcacagacgcagtggattgcgccctggaccccctgtctgagacaaagtgtacactgaagagctttaccgtggagaagggcatctatcagacaagcaatttcagggtgcagcctaccgagtccatcgtgcgctttcccaatatcacaaacctgtgcccttttggcgaggtgttcaacgccaccagattcgccagcgtgtacgcctggaatcggaagagaatctccaactgcgtggccgactattctgtgctgtacaactccgcctctttcagcacctttaagtgctatggcgtgtctcccacaaagctgaatgatctgtgctttaccaacgtgtacgccgatagcttcgtgatcaggggagacgaagtgagacagatcgcaccaggacagacaggaaagatcgcagactacaattataagctgcctgacgatttcaccggctgcgtgatcgcctggaactccaacaatctggattctaaagtgggcggcaactacaattatctgtacaggctgtttcgcaagtccaatctgaagccattcgagcgggacatctccacagagatctaccaggccggctctaccccctgcaatggcgtggagggctttaactgttatttccctctgcagtcttacggcttccagccaacaaacggcgtgggctatcagccctacagagtggtggtgctgtcctttgagctgctgcacgcaccagcaacagtgtgcggcccaaagaagtctaccaatctggtgaagaacaagtgcgtgaacttcaacttcaacggactgaccggcacaggcgtgctgaccgagagcaataagaagttcctgccttttcagcagttcggcagggacatcgcagataccacagacgccgtgcgcgaccctcagaccctggagatcctggacatcacaccatgcagcttcggcggcgtgtccgtgatcacaccaggcaccaatacatccaaccaggtggccgtgctgtatcaggacgtgaattgtaccgaggtgcccgtggcaatccacgcagatcagctgacccctacatggcgggtgtactctaccggcagcaacgtgttccagacaagagccggatgcctgatcggagcagagcacgtgaacaatagctatgagtgcgacatccctatcggcgccggcatctgtgccagctaccagacccagacaaactccccatctggagcaggctccgtggccagccagtccatcatcgcctataccatgagcctgggcgccgagaacagcgtggcctactccaacaattctatcgccatccctaccaacttcacaatcagcgtgaccacagagatcctgccagtgtctatgaccaagacaagcgtggactgcacaatgtatatctgtggcgatagcaccgagtgctccaacctgctgctgcagtacggctccttttgtacccagctgaatagagccctgacaggcatcgccgtggagcaggataagaacacacaggaggtgttcgcccaggtgaagcagatctacaagaccccacccatcaaggactttggcggcttcaacttcagccagatcctgcctgatccaagcaagccctccaagaggtcttttatcgaggacctgctgttcaacaaggtgaccctggccgatgccggcttcatcaagcagtatggagattgcctgggagacatcgcagcccgcgacctgatctgtgcccagaagtttaatggcctgaccgtgctgcctccactgctgacagatgagatgatcgcccagtacacatctgccctgctggccggcaccatcacaagcggatggaccttcggcgcaggagccgccctgcagatcccttttgccatgcagatggcctataggttcaacggcatcggcgtgacccagaatgtgctgtacgagaaccagaagctgatcgccaatcagtttaacagcgccatcggcaagatccaggactctctgtcctctacagccagcgccctgggcaagctgcaggatgtggtgaatcagaacgcccaggccctgaataccctggtgaagcagctgagctccaacttcggcgccatctctagcgtgctgaatgacatcctgagccggctggacccccctgaggcagaggtgcagatcgacaggctgatcacaggccgcctgcagagcctgcagacctacgtgacacagcagctgatcagggcagcagagatcagagcctccgccaatctggccgccaccaagatgagcgagtgcgtgctgggacagtccaagagggtggacttttgtggcaagggctatcacctgatgtctttcccacagagcgcccctcacggcgtggtgtttctgcacgtgacctacgtgccagcccaggagaagaacttcaccacagcaccagccatctgccacgatggaaaggcacactttcctagggagggcgtgttcgtgtctaacggcacccactggtttgtgacacagcgcaatttctacgagccacagatcatcaccacagacaatacattcgtgagcggcaactgtgatgtggtgatcggcatcattaacaataccgtgtatgatccactgcagcccgagctggactcctttaaggaggagctggataagtacttcaagaatcacacctctcccgacgtggatctgggcgacatctccggcatcaatgcctctgtggtgaacatccagaaggagatcgaccggctgaacgaggtggccaagaatctgaacgagagcctgatcgatctgcaggagctgggcaagtatgagcagtacatcaagggctctggcagagagaacctgtatttccagggaggaggaggcagcggatacatccctgaggcaccaagggacggacaggcctacgtgcgcaaggatggcgagtgggtgctgctgtccacctttctgggccatcatcaccaccaccaccaccactga

SEQ ID NO: 1204 - DNA, 3846 bp, Artificial Sequence
  Description of Artificial Sequence: Synthetic polynucleotide
atgggcatcctgccaagcccaggaatgcccgccctgctgtctctggtgagcctgctgtccgtgctgctgatgggatgcgtggcagagacaggcacacagtgcgtgaacctgaccacaaggacccagctgccccctgcctataccaattctttcacacggggcgtgtactatcccgacaaggtgtttagaagctccgtgctgcactccacacaggatctgtttctgcctttcttttctaacgtgacctggttccacgccatccacgtgtccggcaccaatggcacaaagcggttcgacaatcccgtgctgccttttaacgatggcgtgtacttcgccagcaccgagaagtccaacatcatcagaggctggatctttggcaccacactggactctaagacacagagcctgctgatcgtgaacaatgccaccaacgtggtgatcaaggtgtgcgagttccagttttgtaatgatccattcctgggcgtgtactatcacaagaacaataagtcctggatggagtctgagtttcgcgtgtattctagcgccaacaattgcacatttgagtacgtgagccagcccttcctgatggacctggagggcaagcagggcaatttcaagaacctgagggagttcgtgtttaagaatatcgatggctacttcaagatctacagcaagcacaccccaatcaacctggtgcgcgacctgccacagggattctccgccctggagccactggtggatctgcccatcggcatcaacatcacccggtttcagacactgctggccctgcacagatcctacctgacaccaggcgactcctctagcggatggaccgcaggagctgccgcctactatgtgggctatctgcagccccggaccttcctgctgaagtacaacgagaatggcaccatcacagacgcagtggattgcgccctggaccccctgtctgagacaaagtgtacactgaagagctttaccgtggagaagggcatctatcagacaagcaatttcagggtgcagcctaccgagtccatcgtgcgctttcccaatatcacaaacctgtgcccttttggcgaggtgttcaacgccaccagattcgccagcgtgtacgcctggaatcggaagagaatctccaactgcgtggccgactattctgtgctgtacaactccgcctctttcagcacctttaagtgctatggcgtgtctcccacaaagctgaatgatctgtgctttaccaacgtgtacgccgatagcttcgtgatcaggggagacgaagtgagacagatcgcaccaggacagacaggaaagatcgcagactacaattataagctgcctgacgatttcaccggctgcgtgatcgcctggaactccaacaatctggattctaaagtgggcggcaactacaattatctgtacaggctgtttcgcaagtccaatctgaagccattcgagcgggacatctccacagagatctaccaggccggctctaccccctgcaatggcgtggagggctttaactgttatttccctctgcagtcttacggcttccagccaacaaacggcgtgggctatcagccctacagagtggtggtgctgtcctttgagctgctgcacgcaccagcaacagtgtgcggcccaaagaagtctaccaatctggtgaagaacaagtgcgtgaacttcaacttcaacggactgaccggcacaggcgtgctgaccgagagcaataagaagttcctgccttttcagcagttcggcagggacatcgcagataccacagacgccgtgcgcgaccctcagaccctggagatcctggacatcacaccatgcagcttcggcggcgtgtccgtgatcacaccaggcaccaatacatccaaccaggtggccgtgctgtatcaggacgtgaattgtaccgaggtgcccgtggcaatccacgcagatcagctgacccctacatggcgggtgtactctaccggcagcaacgtgttccagacaagagccggatgcctgatcggagcagagcacgtgaacaatagctatgagtgcgacatccctatcggcgccggcatctgtgccagctaccagacccagacaaactccccatctggagcaggctccgtggccagccagtccatcatcgcctataccatgagcctgggcgccgagaacagcgtggcctactccaacaattctatcgccatccctaccaacttcacaatcagcgtgaccacagagatcctgccagtgtctatgaccaagacaagcgtggactgcacaatgtatatctgtggcgatagcaccgagtgctccaacctgctgctgcagtacggctccttttgtacccagctgaatagagccctgacaggcatcgccgtggagcaggataagaacacacaggaggtgttcgcccaggtgaagcagatctacaagaccccacccatcaaggactttggcggcttcaacttcagccagatcctgcctgatccaagcaagccctccaagaggtctgcgatcgaggacctgctgttcaacaaggtgaccctggccgatgccggcttcatcaagcagtatggagattgcctgggagacatcgcagcccgcgacctgatctgtgcccagaagtttaatggcctgaccgtgctgcctccactgctgacagatgagatgatcgcccagtacacatctgccctgctggccggcaccatcacaagcggatggaccttcggcgcaggagccgccctgcagatcccttttgccatgcagatggcctataggttcaacggcatcggcgtgacccagaatgtgctgtacgagaaccagaagctgatcgccaatcagtttaacagcgccatcggcaagatccaggactctctgtcctctacagccagcgccctgggcaagctgcaggatgtggtgaatcagaacgcccaggccctgaataccctggtgaagcagctgagctccaacttcggcgccatctctagcgtgctgaatgacatcctgagccggctggacccccctgaggcagaggtgcagatcgacaggctgatcacaggccgcctgcagagcctgcagacctacgtgacacagcagctgatcagggcagcagagatcagagcctccgccaatctggccgccaccaagatgagcgagtgcgtgctgggacagtccaagagggtggacttttgtggcaagggctatcacctgatgtctttcccacagagcgcccctcacggcgtggtgtttctgcacgtgacctacgtgccagcccaggagaagaacttcaccacagcaccagccatctgccacgatggaaaggcacactttcctagggagggcgtgttcgtgtctaacggcacccactggtttgtgacacagcgcaatttctacgagccacagatcatcaccacagacaatacattcgtgagcggcaactgtgatgtggtgatcggcatcgtgaacaataccgtgtatgatccactgcagcccgagctggactcctttaaggaggagctggataagtacttcaagaatcacacctctcccgacgtggatctgggcgacatctccggcatcaatgcctctgtggtgaacatccagaaggagatcgaccggctgaacgaggtggccaagaatctgaacgagagcctgatcgatctgcaggagctgggcaagtatgagcagtacatcaagggctctggcagagagaacctgtatttccagggaggaggaggcagcggatacatccctgaggcaccaagggacggacaggcctacgtgcgcaaggatggcgagtgggtgctgctgtccacctttctgggccatcatcaccaccaccaccaccactga

SEQ ID NO: 1205 - DNA, 3846 bp, Artificial Sequence
  Description of Artificial Sequence: Synthetic polynucleotide
atgggcatcctgccaagcccaggaatgcccgccctgctgtctctggtgagcctgctgtccgtgctgctgatgggatgcgtggcagagacaggcacacagtgcgtgaacctgaccacaaggacccagctgccccctgcctataccaattctttcacacggggcgtgtactatcccgacaaggtgtttagaagctccgtgctgcactccacacaggatctgtttctgcctttcttttctaacgtgacctggttccacgccatccacgtgtccggcaccaatggcacaaagcggttcgacaatcccgtgctgccttttaacgatggcgtgtacttcgccagcaccgagaagtccaacatcatcagaggctggatctttggcaccacactggactctaagacacagagcctgctgatcgtgaacaatgccaccaacgtggtgatcaaggtgtgcgagttccagttttgtaatgatccattcctgggcgtgtactatcacaagaacaataagtcctggatggagtctgagtttcgcgtgtattctagcgccaacaattgcacatttgagtacgtgagccagcccttcctgatggacctggagggcaagcagggcaatttcaagaacctgagggagttcgtgtttaagaatatcgatggctacttcaagatctacagcaagcacaccccaatcaacctggtgcgcgacctgccacagggattctccgccctggagccactggtggatctgcccatcggcatcaacatcacccggtttcagacactgctggccctgcacagatcctacctgacaccaggcgactcctctagcggatggaccgcaggagctgccgcctactatgtgggctatctgcagccccggaccttcctgctgaagtacaacgagaatggcaccatcacagacgcagtggattgcgccctggaccccctgtctgagacaaagtgtacactgaagagctttaccgtggagaagggcatctatcagacaagcaatttcagggtgcagcctaccgagtccatcgtgcgctttcccaatatcacaaacctgtgcccttttggcgaggtgttcaacgccaccagattcgccagcgtgtacgcctggaatcggaagagaatctccaactgcgtggccgactattctgtgctgtacaactccgcctctttcagcacctttaagtgctatggcgtgtctcccacaaagctgaatgatctgtgctttaccaacgtgtacgccgatagcttcgtgatcaggggagacgaagtgagacagatcgcaccaggacagacaggaaagatcgcagactacaattataagctgcctgacgatttcaccggctgcgtgatcgcctggaactccaacaatctggattctaaagtgggcggcaactacaattatctgtacaggctgtttcgcaagtccaatctgaagccattcgagcgggacatctccacagagatctaccaggccggctctaccccctgcaatggcgtggagggctttaactgttatttccctctgcagtcttacggcttccagccaacaaacggcgtgggctatcagccctacagagtggtggtgctgtcctttgagctgctgcacgcaccagcaacagtgtgcggcccaaagaagtctaccaatctggtgaagaacaagtgcgtgaacttcaacttcaacggactgaccggcacaggcgtgctgaccgagagcaataagaagttcctgccttttcagcagttcggcagggacatcgcagataccacagacgccgtgcgcgaccctcagaccctggagatcctggacatcacaccatgcagcttcggcggcgtgtccgtgatcacaccaggcaccaatacatccaaccaggtggccgtgctgtatcaggacgtgaattgtaccgatgtgcccactgcaatccacgcagatcagctgacccctacatggcgggtgtactctaccggcagcaacgtgttccagacaagagccggatgcctgatcggagcagagcacgtgaacaatagctatgagtgcgacatccctatcggcgccggcatctgtgccagctaccagacccagacaaactccccatctggagcaggctccgtggccagccagtccatcatcgcctataccatgagcctgggcgccgagaacagcgtggcctactccaacaattctatcgccatccctaccaacttcacaatcagcgtgaccacagagatcctgccagtgtctatgaccaagacaagcgtggactgcacaatgtatatctgtggcgatagcaccgagtgctccaacctgctgctgcagtacggctccttttgtacccagctgaatagagccctgacaggcatcgccgtggagcaggataagaacacacaggaggtgttcgcccaggtgaagcagatctacaagaccccacccatcaaggactttggcggcttcaacttcagccagatcctgcctgatccaagcaagccctccaagaggtcttttatcgaggacctgctgttcaacaaggtgaccctggccgatgccggcttcatcaagcagtatggagattgcctgggagacatcgcagcccgcgacctgatctgtgcccagaagtttaatggcctgaccgtgctgcctccactgctgacagatgagatgatcgcccagtacacatctgccctgctggccggcaccatcacaagcggatggaccttcggcgcaggagccgccctgcagatcccttttgccatgcagatggcctataggttcaacggcatcggcgtgacccagaatgtgctgtacgagaaccagaagctgatcgccaatcagtttaacagcgccatcggcaagatccaggactctctgtcctctacagccagcgccctgggcaagctgcaggatgtggtgaatcagaacgcccaggccctgaataccctggtgaagcagctgagctccaacttcggcgccatctctagcgtgctgaatgacatcctgagccggctggacccccctgaggcagaggtgcagatcgacaggctgatcacaggccgcctgcagagcctgcagacctacgtgacacagcagctgatcagggcagcagagatcagagcctccgccaatctggccgccaccaagatgagcgagtgcgtgctgggacagtccaagagggtggacttttgtggcaagggctatcacctgatgtctttcccacagagcgcccctcacggcgtggtgtttctgcacgtgacctacgtgccagcccaggagaagaacttcaccacagcaccagccatctgccacgatggaaaggcacactttcctagggagggcgtgttcgtgtctaacggcacccactggtttgtgacacagcgcaatttctacgagccacagatcatcaccacagacaatacattcgtgagcggcaactgtgatgtggtgatcggcatcgtgaacaataccgtgtatgatccactgcagcccgagctggactcctttaaggaggagctggataagtacttcaagaatcacacctctcccgacgtggatctgggcgacatctccggcatcaatgcctctgtggtgaacatccagaaggagatcgaccggctgaacgaggtggccaagaatctgaacgagagcctgatcgatctgcaggagctgggcaagtatgagcagtacatcaagggctctggcagagagaacctgtatttccagggaggaggaggcagcggatacatccctgaggcaccaagggacggacaggcctacgtgcgcaaggatggcgagtgggtgctgctgtccacctttctgggccatcatcaccaccaccaccaccactga

SEQ ID NO: 1206 - DNA, 3846 bp, Artificial Sequence
  Description of Artificial Sequence: Synthetic polynucleotide
atgggcatcctgccaagcccaggaatgcccgccctgctgtctctggtgagcctgctgtccgtgctgctgatgggatgcgtggcagagacaggcacacagtgcgtgaacctgaccacaaggacccagctgccccctgcctataccaattctttcacacggggcgtgtactatcccgacaaggtgtttagaagctccgtgctgcactccacacaggatctgtttctgcctttcttttctaacgtgacctggttccacgccatccacgtgtccggcaccaatggcacaaagcggttcgacaatcccgtgctgccttttaacgatggcgtgtacttcgccagcaccgagaagtccaacatcatcagaggctggatctttggcaccacactggactctaagacacagagcctgctgatcgtgaacaatgccaccaacgtggtgatcaaggtgtgcgagttccagttttgtaatgatccattcctgggcgtgtactatcacaagaacaataagtcctggatggagtctgagtttcgcgtgtattctagcgccaacaattgcacatttgagtacgtgagccagcccttcctgatggacctggagggcaagcagggcaatttcaagaacctgagggagttcgtgtttaagaatatcgatggctacttcaagatctacagcaagcacaccccaatcaacctggtgcgcgacctgccacagggattctccgccctggagccactggtggatctgcccatcggcatcaacatcacccggtttcagacactgctggccctgcacagatcctacctgacaccaggcgactcctctagcggatggaccgcaggagctgccgcctactatgtgggctatctgcagccccggaccttcctgctgaagtacaacgagaatggcaccatcacagacgcagtggattgcgccctggaccccctgtctgagacaaagtgtacactgaagagctttaccgtggagaagggcatctatcagacaagcaatttcagggtgcagcctaccgagtccatcgtgcgctttcccaatatcacaaacctgtgcccttttggcgaggtgttcaacgccaccagattcgccagcgtgtacgcctggaatcggaagagaatctccaactgcgtggccgactattctgtgctgtacaactccgcctctttcagcacctttaagtgctatggcgtgtctcccacaaagctgaatgatctgtgctttaccaacgtgtacgccgatagcttcgtgatcaggggagacgaagtgagacagatcgcaccaggacagacaggaaagatcgcagactacaattataagctgcctgacgatttcaccggctgcgtgatcgcctggaactccaacaatctggattctaaagtgggcggcaactacaattatctgtacaggctgtttcgcaagtccaatctgaagccattcgagcgggacatctccacagagatctaccaggccggctctaccccctgcaatggcgtggagggctttaactgttatttccctctgcagtcttacggcttccagccaacaaacggcgtgggctatcagccctacagagtggtggtgctgtcctttgagctgctgcacgcaccagcaacagtgtgcggcccaaagaagtctaccaatctggtgaagaacaagtgcgtgaacttcaacttcaacggactgaccggcacaggcgtgctgaccgagagcaataagaagttcctgccttttcagcagttcggcagggacatcgcagataccacagacgccgtgcgcgaccctcagaccctggagatcctggacatcacaccatgcagcttcggcggcgtgtccgtgatcacaccaggcaccaatacatccaaccaggtggccgtgctgtatcaggacgtgaattgtaccgaggtgcccgtggcaatccacgcagatcagctgacccctacatggcgggtgtactctaccggcagcaacgtgttccagacaagagccggatgcctgatcggagcagagcacgtgaacaatagctatgagtgcgacatccctatcggcgccggcatctgtgccagctaccagacccagacaaactccccatctggagcaggctccgtggccagccagtccatcatcgcctataccatgagcctgggcgccgagaacagcgtggcctactccaacaattctatcgccatccctaccaacttcacaatcagcgtgaccacagagatcctgccagtgtctatgaccaagacaagcgtggactgcacaatgtatatctgtggcgatagcaccgagtgctccaacctgctgctgcagtacggctccttttgtacccagctgaatagagccctgacaggcatcgccgtggagcaggataagaacacacaggaggtgttcgcccaggtgaagcagatctacaagaccccacccatcaaggactttggcggcttcaacttcagccagatcctgcctgatccaagcaagccctccaagaggtcttttatcgaggacctgctgttcaacaaggtgaccctggccgatctcggcttcgttaagcagtataaagattgcctgggagatcaagcagcccgcgacctgatctgtgcccagaagtttaatggcctgaccgtgctgcctccactgctgacagatgagatgatcgcccagtacacatctgccctgctggccggcaccatcacaagcggatggaccttcggcgcaggagccgccctgcagatcccttttgccatgcagatggcctataggttcaacggcatcggcgtgacccagaatgtgctgtacgagaaccagaagctgatcgccaatcagtttaacagcgccatcggcaagatccaggacggactgtccactacagccagcgccctgtcgaagctgcaggatgtggtgaatcagaacgcccaggccctgaataccctggtgaagcagctgagctccaacttcggcgccatctctagcgtgctgaatgacatcctgagccggctggacccccctgaggcagaggtgcagatcgacaggctgatcacaggccgcctgcagagcctgcagacctacgtgacacagcagctgatcagggcagcagagatcagagcctccgccaatctggccgccaccaagatgagcgagtgcgtgctgggacagtccaagagggtggacttttgtggcaagggctatcacctgatgtctttcccacagagcgcccctcacggcgtggtgtttctgcacgtgacctacgtgccagcccaggagaagaacttcaccacagcaccagccatctgccacgatggaaaggcacactttcctagggagggcgtgttcgtgtctaacggcacccactggtttgtgacacagcgcaatttctacgagccacagatcatcaccacagacaatacattcgtgagcggcaactgtgatgtggtgatcggcatcgtgaacaataccgtgtatgatccactgcagcccgagctggactcctttaaggaggagctggataagtacttcaagaatcacacctctcccgacgtggatctgggcgacatctccggcatcaatgcctctgtggtgaacatccagaaggagatcgaccggctgaacgaggtggccaagaatctgaacgagagcctgatcgatctgcaggagctgggcaagtatgagcagtacatcaagggctctggcagagagaacctgtatttccagggaggaggaggcagcggatacatccctgaggcaccaagggacggacaggcctacgtgcgcaaggatggcgagtgggtgctgctgtccacctttctgggccatcatcaccaccaccaccaccactga

SEQ ID NO: 1207 - DNA, 3846 bp, Artificial Sequence
  Description of Artificial Sequence: Synthetic polynucleotide
atgggcatcctgccaagcccaggaatgcccgccctgctgtctctggtgagcctgctgtccgtgctgctgatgggatgcgtggcagagacaggcacacagtgcgtgaacctgaccacaaggacccagctgccccctgcctataccaattctttcacacggggcgtgtactatcccgacaaggtgtttagaagctccgtgctgcactccacacaggatctgtttctgcctttcttttctaacgtgacctggttccacgccatccacgtgtccggcaccaatggcacaaagcggttcgacaatcccgtgctgccttttaacgatggcgtgtacttcgccagcaccgagaagtccaacatcatcagaggctggatctttggcaccacactggactctaagacacagagcctgctgatcgtgaacaatgccaccaacgtggtgatcaaggtgtgcgagttccagttttgtaatgatccattcctgggcgtgtactatcacaagaacaataagtcctggatggagtctgagtttcgcgtgtattctagcgccaacaattgcacatttgagtacgtgagccagcccttcctgatggacctggagggcaagcagggcaatttcaagaacctgagggagttcgtgtttaagaatatcgatggctacttcaagatctacagcaagcacaccccaatcaacctggtgcgcgacctgccacagggattctccgccctggagccactggtggatctgcccatcggcatcaacatcacccggtttcagacactgctggccctgcacagatcctacctgacaccaggcgactcctctagcggatggaccgcaggagctgccgcctactatgtgggctatctgcagccccggaccttcctgctgaagtacaacgagaatggcaccatcacagacgcagtggattgcgccctggaccccctgtctgagacaaagtgtacactgaagagctttaccgtggagaagggcatctatcagacaagcaatttcagggtgcagcctacctacgaaatcgtgcgctttcccaatatcacaaacctgtgcccttttggcgaggtgttcaacgccaccagattcgccagcgtgtacgcctggaatcggaagagaatctccaactgcgtggccgactattctgtgctgtacaactccgcctctttcagcacctttaagtgctatggcgtgtctcccacaaagctgaatgatctgtgctttaccaacgtgtacgccgatagcttcgtgatcaggggagacgaagtgagacagatcgcaccaggacagacaggaaagatcgcagactacaattataagctgcctgacgatttcaccggctgcgtgatcgcctggaactccaacaatctggattctaaagtgggcggcaactacaattatctgtacaggctgtttcgcaagtccaatctgaagccattcgagcgggacatctccacagagatctaccaggccggctctaccccctgcaatggcgtggagggctttaactgttatttccctctgcagtcttacggcttccagccaacaaacggcgtgggctatcagccctacagagtggtggtgctgtcctttgagctgctgcacgcaccagcaacagtgtgcggcccaaaggattctaccaatctggtgaagaacaagtgcgtggattataacttcaacggacgtaccggcacaggcgtgctgaccgagagcaataagaagttcctgccttttcagcagttcggcagggacatctcagataccacagacgccgtgcgcgaccctacgaccggtgagatcctgtgtatcacaccatgcagcttcggcggcgtgtccgtgatcacaccaggcaccaatacatccaaccaggtggccgtgctgtatcaggacgtgaattgtaccgaggtgcccgtggcaatccacgcagatcagctgacccctacatggcgggtgtactctaccggcagcaacgtgttccagacaagagccggatgcctgatcggagcagagcacgtgaacaatagctatgagtgcgacatccctatcggcgccggcatctgtgccagctaccagacccagacaaactccccatctggagcaggctccgtggccagccagtccatcatcgcctataccatgagcctgggcgccgagaacagcgtggcctactccaacaattctatcgccatccctaccaacttcacaatcagcgtgaccacagagatcctgccagtgtctatgaccaagacaagcgtggactgcacaatgtatatctgtggcgatagcaccgagtgctccaacctgctgctgcagtacggctccttttgtacccagctgaatagagccctgacaggcatcgccgtggagcaggataagaacacacaggaggtgttcgcccaggtgaagcagatctacaagaccccacccatcaaggactttggcggcttcaacttcagccagatcctgcctgatccaagcaagccctccaagaggtcttttatcgaggacctgctgttcaacaaggtgaccctggccgatgccggcttcatcaagcagtatggagattgcctgggagacatcgcagcccgcgacctgatctgtgcccagaagtttaatggcctgaccgtgctgcctccactgctgacagatgagatgatcgcccagtacacatctgccctgctggccggcaccatcacaagcggatggaccttcggcgcaggagccgccctgcagatcccttttgccatgcagatggcctataggttcaacggcatcggcgtgacccagaatgtgctgtacgagaaccagaagctgatcgccaatcagtttaacagcgccatcggcaagatccaggactctctgtcctctacagccagcgccctgggcaagctgcaggatgtggtgaatcagaacgcccaggccctgaataccctggtgaagcagctgagctccaacttcggcgccatctctagcgtgctgaatgacatcctgagccggctggacccccctgaggcagaggtgcagatcgacaggctgatcacaggccgcctgcagagcctgcagacctacgtgacacagcagctgatcagggcagcagagatcagagcctccgccaatctggccgccaccaagatgagcgagtgcgtgctgggacagtccaagagggtggacttttgtggcaagggctatcacctgatgtctttcccacagagcgcccctcacggcgtggtgtttctgcacgtgacctacgtgccagcccaggagaagaacttcaccacagcaccagccatctgccacgatggaaaggcacactttcctagggagggcgtgttcgtgtctaacggcacccactggtttgtgacacagcgcaatttctacgagccacagatcatcaccacagacaatacattcgtgagcggcaactgtgatgtggtgatcggcatcgtgaacaataccgtgtatgatccactgcagcccgagctggactcctttaaggaggagctggataagtacttcaagaatcacacctctcccgacgtggatctgggcgacatctccggcatcaatgcctctgtggtgaacatccagaaggagatcgaccggctgaacgaggtggccaagaatctgaacgagagcctgatcgatctgcaggagctgggcaagtatgagcagtacatcaagggctctggcagagagaacctgtatttccagggaggaggaggcagcggatacatccctgaggcaccaagggacggacaggcctacgtgcgcaaggatggcgagtgggtgctgctgtccacctttctgggccatcatcaccaccaccaccaccactga

SEQ ID NO: 1208 - DNA, 3846 bp, Artificial Sequence
  Description of Artificial Sequence: Synthetic polynucleotide
atgggcatcctgccaagcccaggaatgcccgccctgctgtctctggtgagcctgctgtccgtgctgctgatgggatgcgtggcagagacaggcacacagtgcgtgaacctgaccacaaggacccagctgccccctgcctataccaattctttcacacggggcgtgtactatcccgacaaggtgtttagaagctccgtgctgcactccacacaggatctgtttctgcctttcttttctaacgtgacctggttccacgccatccacgtgtccggcaccaatggcacaaagcggttcgacaatcccgtgctgccttttaacgatggcgtgtacttcgccagcaccgagaagtccaacatcatcagaggctggatctttggcaccacactggactctaagacacagagcctgctgatcgtgaacaatgccaccaacgtggtgatcaaggtgtgcgagttccagttttgtaatgatccattcctgggcgtgtactatcacaagaacaataagtcctggatggagtctgagtttcgcgtgtattctagcgccaacaattgcacatttgagtacgtgagccagcccttcctgatggacctggagggcaagcagggcaatttcaagaacctgagggagttcgtgtttaagaatatcgatggctacttcaagatctacagcaagcacaccccaatcaacctggtgcgcgacctgccacagggattctccgccctggagccactggtggatctgcccatcggcatcaacatcacccggtttcagacactgctggccctgcacagatcctacctgacaccaggcgactcctctagcggatggaccgcaggagctgccgcctactatgtgggctatctgcagccccggaccttcctgctgaagtacaacgagaatggcaccatcacagacgcagtggattgcgccctggaccccctgtctgagacaaagtgtacactgaagagctttaccgtggagaagggcatctatcagacaagcaatttcagggtgcagcctaccgagtccatcgtgcgctttcccaatatcacaaacctgtgcccttttggcgaggtgttcaacgccaccagattcgccagcgtgtacgcctggaatcggaagagaatctccaactgcgtggccgactattctgtgctgtacaactccgcctctttcagcacctttaagtgctatggcgtgtctcccacaaagctgaatgatctgtgctttaccaacgtgtacgccgatagcttcgtgatcaggggagacgaagtgagacagatcgcaccaggacagacaggaaagatcgcagactacaattataagctgcctgacgatttcaccggctgcgtgatcgcctggaactccaacaatctggattctaaagtgggcggcaactacaattatctgtacaggctgtttcgcaagtccaatctgaagccattcgagcgggacatctccacagagatctaccaggccggctctaccccctgcaatggcgtggagggctttaactgttatttccctctgcagtcttacggcttccagccaacaaacggcgtgggctatcagccctacagagtggtggtgctgtcctttgagctgctgcacgcaccagcaacagtgtgcggcccaaagaagtctaccaatctggtgaagaacaagtgcgtgaacttcaacttcaacggactgaccggcacaggcgtgctgaccgagagcaataagaagttcctgccttttcagcagttcggcagggacatcgcagataccacagacgccgtgcgcgaccctcagaccctggagatcctggacatcacaccatgcagcttcggcggcgtgtccgtgatcacaccaggcaccaatacatccaaccaggtggccgtgctgtatcaggacgtgaattgtaccgaggtgcccgtggcaatccacgcagatcagctgacccctacatggcgggtgtactctaccggcagcaacgtgttccagacaagagccggatgcctgatcggagcagagcacgtgaacaatagctatgagtgcgacatccctatcggcgccggcatctgtgccagctaccagacccagacaaactccccatctggagcaggctccgtggccagccagtccatcatcgcctataccatgagcctgggcgccgagaacagcgtggcctactccaacaattctatcgccatccctaccaacttcacaatcagcgtgaccacagagatcctgccagtgtctatgaccaagacaagcgtggactgcacaatgtatatctgtggcgatagcaccgagtgctccaacctgctgctgcagtacggctccttttgtacccagctgaatagagccctgacaggcatcgccgtggagcaggataagaacacacaggaggtgttcgcccaggtgaagcagatctacaagaccccacccatcaaggactttggcggcttcaacttcagccagatcctgcctgatccaagcaagccctccaagaggtcttttatcgaggacctgctgttcaacaaggtgaccctggccgatgccggcttcatcaagcagtatggagattgcctgggagacatcgcagcccgcgacctgatctgtgcccagaagtttaatggcctgaccgtgctgcctccactgctgacagatgagatgatcgcccagtacacatctgccctgctggccggcaccatcacaagcggatggaccttcggcgcaggagccgccctgcagatcccttttgccatgcagatggcctataggttcaacggcatcggcgtgacccagaatgtgctgtacgagaaccagaagctgatcgccaatcagtttaacagcgccatcggcaagatccaggactctctgtcctctacagccagcgccctgggcaagctgcaggatgtggtgaatcagaacgcccaggccctgaataccctggtgaagcagctgagctccaacttcggcgccatctctagcgtgctgaatgacatcctgagccggctggacccccctgaggcagaggtgcagatcgacaggctgatcacaggccgcctgcagagcctgcagacctacgtgacacagcagctgatcagggcaactgagatcagagcctccgccaatctggccgccaccaagatgagcgagtgcgtgctgggacagtccaagagggtggacttttgtggcaagggctatcacctgatgtctttcccacagagcgcccctcacggcgtggtgtttctgcacgtgacctacgtgccagcccaggagaagaacttcaccacagcaccagccatctgccacgatggaaaggcacactttcctagggagggcgtgttcgtgtctaacggcacccactggtttgtgacacagcgcaatttctacgagccacagatcatcaccacagacaatacattcgtgagcggcaactgtgatgtggtgatcggcatcgtgaacaataccgtgtatgatccactgcagcccgagctggactcctttaaggaggagctggataagtacttcaagaatcacacctctcccgacgtggatctgggcgacatctccggcatcaatgcctctgtggtgaacatccagaaggagatcgaccggctgaacgaggtggccaagaatctgaacgagagcctgatcgatctgcaggagctgggcaagtatgagcagtacatcaagggctctggcagagagaacctgtatttccagggaggaggaggcagcggatacatccctgaggcaccaagggacggacaggcctacgtgcgcaaggatggcgagtgggtgctgctgtccacctttctgggccatcatcaccaccaccaccaccactga

SEQ ID NO: 1209 - DNA, 3846 bp, Artificial Sequence
  Description of Artificial Sequence: Synthetic polynucleotide
atgggcatcctgccaagcccaggaatgcccgccctgctgtctctggtgagcctgctgtccgtgctgctgatgggatgcgtggcagagacaggcacacagtgcgtgaacctgaccacaaggacccagctgccccctgcctataccaattctttcacacggggcgtgtactatcccgacaaggtgtttagaagctccgtgctgcactccacacaggatctgtttctgcctttcttttctaacgtgacctggttccacgccatccacgtgtccggcaccaatggcacaaagcggttcgacaatcccgtgctgccttttaacgatggcgtgtacttcgccagcaccgagaagtccaacatcatcagaggctggatctttggcaccacactggactctaagacacagagcctgctgatcgtgaacaatgccaccaacgtggtgatcaaggtgtgcgagttccagttttgtaatgatccattcctgggcgtgtactatcacaagaacaataagtcctggatggagtctgagtttcgcgtgtattctagcgccaacaattgcacatttgagtacgtgagccagcccttcctgatggacctggagggcaagcagggcaatttcaagaacctgagggagttcgtgtttaagaatatcgatggctacttcaagatctacagcgggcacaccccaatcaacctggtgcgcgacctgccacagggattctccgccctggagccactggtggatctgcccatcggcatcaacatcacccggtttcagacactgctggccctgcacagatcctacctgacaccaggcgactcctctagcggatggaccgcaggagctgccgcctactatgtgggctatctgcagccccggaccttcctgctgaagtacaacgagaatggcaccatcacagacgcagtggattgcgccctggaccccctgtctgagacaaagtgtacactgaagagctttaccgtggagaagggcatctatcagacaagcaatttcagggtgcagcctaccgagtccatcgtgcgctttcccaatatcacaaacctgtgcccttttggcgaggtgttcaacgccaccagattcgccagcgtgtacgcctggaatcggaagagaatctccaactgcgtggccgactattctgtgctgtacaactccgcctctttcagcacctttaagtgctatggcgtgtctcccacaaagctgaatgatctgtgctttaccaacgtgtacgccgatagcttcgtgatcaggggagacgaagtgagacagatcgcaccaggacagacaggaaagatcgcagactacaattataagctgcctgacgatttcaccggctgcgtgatcgcctggaactccaacaatctggattctaaagtgggcggcaactacaattatctgtacaggctgtttcgcaagtccaatctgaagccattcgagcgggacatctccacagagatctaccaggccggctctaccccctgcaatggcgtggagggctttaactgttatttccctctgcagtcttacggcttccagccaacaaacggcgtgggctatcagccctacagagtggtggtgctgtcctttgagctgctgcacgcaccagcaacagtgtgcggcccaaagaagtctaccaatctggtgaagaacaagtgcgtgaacttcaacttcaacggactgaccggcacaggcgtgctgaccgagagcaataagaagttcctgccttttcagcagttcggcagggacatcgcagataccacagacgccgtgcgcgaccctcagaccctggagatcctggacatcacaccatgcagcttcggcggcgtgtccgtgatcacaccaggcaccaatacatccaaccaggtggccgtgctgtatcaggacgtgaattgtaccgaggtgcccgtggcaatccacgcagatcagctgacccctacatggcgggtgtactctaccggcagcaacgtgttccagacaagagccggatgcctgatcggagcagagcacgtgaacaatagctatgagtgcgacatccctatcggcgccggcatctgtgccagctaccagacccagacaaactccccatctggagcaggctccgtggccagccagtccatcatcgcctataccatgagcctgggcgccgagaacagcgtggcctactccaacaattctatcgccatccctaccaacttcacaatcagcgtgaccacagagatcctgccagtgtctatgaccaagacaagcgtggactgcacaatgtatatctgtggcgatagcaccgagtgctccaacctgctgctgcagtacggctccttttgtacccagctgaatagagccctgacaggcatcgccgtggagcaggataagaacacacaggaggtgttcgcccaggtgaagcagatctacaagaccccacccatcaaggactttggcggcttcaacttcagccagatcctgcctgatccaagcaagccctccaagaggtcttttatcgaggacctgctgttcaacaaggtgaccctggccgatgccggcttcatcaagcagtatggagattgcctgggagacatcgcagcccgcgacctgatctgtgcccagaagtttaatggcctgaccgtgctgcctccactgctgacagatgagatgatcgcccagtacacatctgccctgctggccggcaccatcacaagcggatggaccttcggcgcaggagccgccctgcagatcccttttgccatgcagatggcctataggttcaacggcatcggcgtgacccagaatgtgctgtacgagaaccagaagctgatcgccaatcagtttaacagcgccatcggcaagatccaggactctctgtcctctacagccagcgccctgggcaagctgcaggatgtggtgaatcagaacgcccaggccctgaataccctggtgaagcagctgagctccaacttcggcgccatctctagcgtgctgaatgacatcctgagccggctggacccccctgaggcagaggtgcagatcgacaggctgatcacaggccgcctgcagagcctgcagacctacgtgacacagcagctgatcagggcagcagagatcagagcctccgccaatctggccgccaccaagatgagcgagtgcgtgctgggacagtccaagagggtggacttttgtggcaagggctatcacctgatgtctttcccacagagcgcccctcacggcgtggtgtttctgcacgtgacctacgtgccagcccaggagaagaacttcaccacagcaccagccatctgccacgatggaaaggcacactttcctagggagggcgtgttcgtgtctaacggcacccactggtttgtgacacagcgcaatttctacgagccacagatcatcaccacagacaatacattcgtgagcggcaactgtgatgtggtgatcggcatcgtgaacaataccgtgtatgatccactgcagcccgagctggactcctttaaggaggagctggataagtacttcaagaatcacacctctcccgacgtggatctgggcgacatctccggcatcaatgcctctgtggtgaacatccagaaggagatcgaccggctgaacgaggtggccaagaatctgaacgagagcctgatcgatctgcaggagctgggcaagtatgagcagtacatcaagggctctggcagagagaacctgtatttccagggaggaggaggcagcggatacatccctgaggcaccaagggacggacaggcctacgtgcgcaaggatggcgagtgggtgctgctgtccacctttctgggccatcatcaccaccaccaccaccactga

SEQ ID NO: 1210 - DNA, 3846 bp, Artificial Sequence
  Description of Artificial Sequence: Synthetic polynucleotide
atgggcatcctgccaagcccaggaatgcccgccctgctgtctctggtgagcctgctgtccgtgctgctgatgggatgcgtggcagagacaggcacacagtgcgtgaacctgaccacaaggacccagctgccccctgcctataccaattctttcacacggggcgtgtactatcccgacaaggtgtttagaagctccgtgctgcactccacacaggatctgtttctgcctttcttttctaacgtgacctggttccacgccatccacgtgtccggcaccaatggcacaaagcggttcgacaatcccgtgctgccttttaacgatggcgtgtacttcgccagcaccgagaagtccaacatcatcagaggctggatctttggcaccacactggactctaagacacagagcctgctgatcgtgaacaatgccaccaacgtggtgatcaaggtgtgcgagttccagttttgtaatgatccattcctgggcgtgtactatcacaagaacaataagtcctggatggagtctgagtttcgcgtgtattctagcgccaacaattgcacatttgagtacgtgagccagcccttcctgatggacctggagggcaagcagggcaatttcaagaacctgagggagttcgtgtttaagaatatcgatggctacttcaagatctacagcaagtggaccccaatcaacctggtgcgcgacctgccacagggattctccgccctggagccactggtggatctgcccatcggcatcaacatcacccggtttcagacactgctggccctgcacagatcctacctgacaccaggcgactcctctagcggatggaccgcaggagctgccgcctactatgtgggctatctgcagccccggaccttcctgctgaagtacaacgagaatggcaccatcacagacgcagtggattgcgccctggaccccctgtctgagacaaagtgtacactgaagagctttaccgtggagaagggcatctatcagacaagcaatttcagggtgcagcctaccgagtccatcgtgcgctttcccaatatcacaaacctgtgcccttttggcgaggtgttcaacgccaccagattcgccagcgtgtacgcctggaatcggaagagaatctccaactgcgtggccgactattctgtgctgtacaactccgcctctttcagcacctttaagtgctatggcgtgtctcccacaaagctgaatgatctgtgctttaccaacgtgtacgccgatagcttcgtgatcaggggagacgaagtgagacagatcgcaccaggacagacaggaaagatcgcagactacaattataagctgcctgacgatttcaccggctgcgtgatcgcctggaactccaacaatctggattctaaagtgggcggcaactacaattatctgtacaggctgtttcgcaagtccaatctgaagccattcgagcgggacatctccacagagatctaccaggccggctctaccccctgcaatggcgtggagggctttaactgttatttccctctgcagtcttacggcttccagccaacaaacggcgtgggctatcagccctacagagtggtggtgctgtcctttgagctgctgcacgcaccagcaacagtgtgcggcccaaagaagtctaccaatctggtgaagaacaagtgcgtgaacttcaacttcaacggactgaccggcacaggcgtgctgaccgagagcaataagaagttcctgccttttcagcagttcggcagggacatcgcagataccacagacgccgtgcgcgaccctcagaccctggagatcctggacatcacaccatgcagcttcggcggcgtgtccgtgatcacaccaggcaccaatacatccaaccaggtggccgtgctgtatcaggacgtgaattgtaccgaggtgcccgtggcaatccacgcagatcagctgacccctacatggcgggtgtactctaccggcagcaacgtgttccagacaagagccggatgcctgatcggagcagagcacgtgaacaatagctatgagtgcgacatccctatcggcgccggcatctgtgccagctaccagacccagacaaactccccatctggagcaggctccgtggccagccagtccatcatcgcctataccatgagcctgggcgccgagaacagcgtggcctactccaacaattctatcgccatccctaccaacttcacaatcagcgtgaccacagagatcctgccagtgtctatgaccaagacaagcgtggactgcacaatgtatatctgtggcgatagcaccgagtgctccaacctgctgctgcagtacggctccttttgtacccagctgaatagagccctgacaggcatcgccgtggagcaggataagaacacacaggaggtgttcgcccaggtgaagcagatctacaagaccccacccatcaaggactttggcggcttcaacttcagccagatcctgcctgatccaagcaagccctccaagaggtcttttatcgaggacctgctgttcaacaaggtgaccctggccgatgccggcttcatcaagcagtatggagattgcctgggagacatcgcagcccgcgacctgatctgtgcccagaagtttaatggcctgaccgtgctgcctccactgctgacagatgagatgatcgcccagtacacatctgccctgctggccggcaccatcacaagcggatggaccttcggcgcaggagccgccctgcagatcccttttgccatgcagatggcctataggttcaacggcatcggcgtgacccagaatgtgctgtacgagaaccagaagctgatcgccaatcagtttaacagcgccatcggcaagatccaggactctctgtcctctacagccagcgccctgggcaagctgcaggatgtggtgaatcagaacgcccaggccctgaataccctggtgaagcagctgagctccaacttcggcgccatctctagcgtgctgaatgacatcctgagccggctggacccccctgaggcagaggtgcagatcgacaggctgatcacaggccgcctgcagagcctgcagacctacgtgacacagcagctgatcagggcagcagagatcagagcctccgccaatctggccgccaccaagatgagcgagtgcgtgctgggacagtccaagagggtggacttttgtggcaagggctatcacctgatgtctttcccacagagcgcccctcacggcgtggtgtttctgcacgtgacctacgtgccagcccaggagaagaacttcaccacagcaccagccatctgccacgatggaaaggcacactttcctagggagggcgtgttcgtgtctaacggcacccactggtttgtgacacagcgcaatttctacgagccacagatcatcaccacagacaatacattcgtgagcggcaactgtgatgtggtgatcggcatcgtgaacaataccgtgtatgatccactgcagcccgagctggactcctttaaggaggagctggataagtacttcaagaatcacacctctcccgacgtggatctgggcgacatctccggcatcaatgcctctgtggtgaacatccagaaggagatcgaccggctgaacgaggtggccaagaatctgaacgagagcctgatcgatctgcaggagctgggcaagtatgagcagtacatcaagggctctggcagagagaacctgtatttccagggaggaggaggcagcggatacatccctgaggcaccaagggacggacaggcctacgtgcgcaaggatggcgagtgggtgctgctgtccacctttctgggccatcatcaccaccaccaccaccactga

SEQ ID NO: 1211 - DNA, 3846 bp, Artificial Sequence
  Description of Artificial Sequence: Synthetic polynucleotide
atgggcatcctgccaagcccaggaatgcccgccctgctgtctctggtgagcctgctgtccgtgctgctgatgggatgcgtggcagagacaggcacacagtgcgtgaacctgaccacaaggacccagctgccccctgcctataccaattctttcacacggggcgtgtactatcccgacaaggtgtttagaagctccgtgctgcactccacacaggatctgtttctgcctttcttttctaacgtgacctggttccacgccatccacgtgtccggcaccaatggcacaaagcggttcgacaatcccgtgctgccttttaacgatggcgtgtacttcgccagcaccgagaagtccaacatcatcagaggctggatctttggcaccacactggactctaagacacagagcctgctgatcgtgaacaatgccaccaacgtggtgatcaaggtgtgcgagttccagttttgtaatgatccattcctgggcgtgtactatcacaagaacaataagtcctggatggagtctgagtttcgcgtgtattctagcgccaacaattgcacatttgagtacgtgagccagcccttcctgatggacctggagggcaagcagggcaatttcaagaacctgagggagttcgtgtttaagaatatcgatggctacttcaagatctacagcaagcacaccccaatcaacctggtgcgcgacctgccacagggattctccgccctggagccactggtggatctgcccatcggcatcaacatcacccggtttcagacactgctggccctgcacagatcctacctgacaccaggcgactcctctagcggatggaccgcaggagctgccgcctactatgtgggctatctgcagccccggaccttcctgctgaagtacaacgagaatggcaccatcacagacgcagtggattgcgccctggaccccctgtctgagacaaagtgtacactgaagagctttaccgtggagaagggcatctatcagacaagcaatttcagggtgcagcctaccgagtccatcgtgcgctttcccaatatcacaaacctgtgcccttttggcgaggtgttcaacgccaccagattcgccagcgtgtacgcctggaatcggaagagaatctccaactgcgtggccgactattctgtgctgtacaactccgcctctttcagcacctttaagtgctatggcgtgtctcccacaaagctgaatgatctgtgctttaccaacgtgtacgccgatagcttcgtgatcaggggagacgaagtgagacagatcgcaccaggacagacaggaaagatcgcagactacaattataagctgcctgacgatttcaccggctgcgtgatcgcctggaactccaacaatctggattctaaagtgggcggcaactacaattatctgtacaggctgtttcgcaagtccaatctgaagccattcgagcgggacatctccacagagatctaccaggccggctctaccccctgcaatggcgtggagggctttaactgttatttccctctgcagtcttacggcttccagccaacaaacggcgtgggctatcagccctacagagtggtggtgctgtcctttgagctgctgcacgcaccagcaacagtgtgcggcccaaagaagtctaccaatctggtgaagaacaagtgcgtgaacttcaacttcaacggactgaccggcacaggcgtgctgaccgagagcaataagaagttcctgccttttcagcagttcggcagggacatcgcagataccacagacgccgtgcgcgaccctcagaccctggagatcctggacatcacaccatgcagcttcggcggcgtgtccgtgatcacaccaggcaccaatacatccaaccaggtggccgtgctgtatcaggacgtgaattgtaccgaggtgcccgtggcaatccacgcagatcagctgacccctacatggcgggtgtactctaccggcagcaacgtgttccagacaagagccggatgcctgatcggagcagagcacgtgaacaatagctatgagtgcgacatccctatcggcgccggcatctgtgccagctaccagacccagacaaactccccatctggagcaggctccgtggccagccagtccatcatcgcctataccatgagcctgggcgccgagaacagcgtgccgtactccaacaattctatcgccatccctaccaacttcacaatcagcgtgaccacagagatcctgccagtgtctatgaccaagacaagcgtggactgcacaatgtatatctgtggcgatagcaccgagtgctccaacctgctgctgcagtacggctccttttgtacccagctgaatagagccctgacaggcatcgccgtggagcaggataagaacacacaggaggtgttcgcccaggtgaagcagatctacaagaccccacccatcaaggactttggcggcttcaacttcagccagatcctgcctgatccaagcaagccctccaagaggtcttttatcgaggacctgctgttcaacaaggtgaccctggccgatgccggcttcatcaagcagtatggagattgcctgggagacatcgcagcccgcgacctgatctgtgcccagaagtttaatggcctgaccgtgctgcctccactgctgacagatgagatgatcgcccagtacacatctgccctgctggccggcaccatcacaagcggatggaccttcggcgcaggagccgccctgcagatcccttttgccatgcagatggcctataggttcaacggcatcggcgtgacccagaatgtgctgtacgagaaccagaagctgatcgccaatcagtttaacagcgccatcggcaagatccaggactctctgtcctctacagccagcgccctgggcaagctgcaggatgtggtgaatcagaacgcccaggccctgaataccctggtgaagcagctgagctccaacttcggcgccatctctagcgtgctgaatgacatcctgagccggctggacccccctgaggcagaggtgcagatcgacaggctgatcacaggccgcctgcagagcctgcagacctacgtgacacagcagctgatcagggcagcagagatcagagcctccgccaatctggccgccaccaagatgagcgagtgcgtgctgggacagtccaagagggtggacttttgtggcaagggctatcacctgatgtctttcccacagagcgcccctcacggcgtggtgtttctgcacgtgacctacgtgccagcccaggagaagaacttcaccacagcaccagccatctgccacgatggaaaggcacactttcctagggagggcgtgttcgtgtctaacggcacccactggtttgtgacacagcgcaatttctacgagccacagatcatcaccacagacaatacattcgtgagcggcaactgtgatgtggtgatcggcatcgtgaacaataccgtgtatgatccactgcagcccgagctggactcctttaaggaggagctggataagtacttcaagaatcacacctctcccgacgtggatctgggcgacatctccggcatcaatgcctctgtggtgaacatccagaaggagatcgaccggctgaacgaggtggccaagaatctgaacgagagcctgatcgatctgcaggagctgggcaagtatgagcagtacatcaagggctctggcagagagaacctgtatttccagggaggaggaggcagcggatacatccctgaggcaccaagggacggacaggcctacgtgcgcaaggatggcgagtgggtgctgctgtccacctttctgggccatcatcaccaccaccaccaccactga

SEQ ID NO: 1212 - DNA, 3846 bp, Artificial Sequence
  Description of Artificial Sequence: Synthetic polynucleotide
atgggcatcctgccaagcccaggaatgcccgccctgctgtctctggtgagcctgctgtccgtgctgctgatgggatgcgtggcagagacaggcacacagtgcgtgaacctgaccacaaggacccagctgccccctgcctataccaattctttcacacggggcgtgtactatcccgacaaggtgtttagaagctccgtgctgcactccacacaggatctgtttctgcctttcttttctaacgtgacctggttccacgccatccacgtgtccggcaccaatggcacaaagcggttcgacaatcccgtgctgccttttaacgatggcgtgtacttcgccagcaccgagaagtccaacatcatcagaggctggatctttggcaccacactggactctaagacacagagcctgctgatcgtgaacaatgccaccaacgtggtgatcaaggtgtgcgagttccagttttgtaatgatccattcctgggcgtgtactatcacaagaacaataagtcctggatggagtctgagtttcgcgtgtattctagcgccaacaattgcacatttgagtacgtgagccagcccttcctgatggacctggagggcaagcagggcaatttcaagaacctgagggagttcgtgtttaagaatatcgatggctacttcaagatctacagcaagcacaccccaatcaacctggtgcgcgacctgccacagggattctccgccctggagccactggtggatctgcccatcggcatcaacatcacccggtttcagacactgctggccctgcacagatcctacctgacaccaggcgactcctctagcggatggaccgcaggagctgccgcctactatgtgggctatctgcagccccggaccttcctgctgaagtacaacgagaatggcaccatcacagacgcagtggattgcgccctggaccccctgtctgagacaaagtgtacactgaagagctttaccgtggagaagggcatctatcagacaagcaatttcagggtgcagcctaccgagtccatcgtgcgctttcccaatatcacaaacctgtgcccttttggcgaggtgttcaacgccaccagattcgccagcgtgtacgcctggaatcggaagagaatctccaactgcgtggccgactattctgtgctgtacaactccgcctctttcagcacctttaagtgctatggcgtgtctcccacaaagctgaatgatctgtgctttaccaacgtgtacgccgatagcttcgtgatcaggggagacgaagtgagacagatcgcaccaggacagacaggaaagatcgcagactacaattataagctgcctgacgatttcaccggctgcgtgatcgcctggaactccaacaatctggattctaaagtgggcggcaactacaattatctgtacaggctgtttcgcaagtccaatctgaagccattcgagcgggacatctccacagagatctaccaggccggctctaccccctgcaatggcgtggagggctttaactgttatttccctctgcagtcttacggcttccagccaacaaacggcgtgggctatcagccctacagagtggtggtgctgtcctttgagctgctgcacgcaccagcaacagtgtgcggcccaaagaagtctaccaatctggtgaagaacaagtgcgtgaacttcaacttcaacggactgaccggcacaggcgtgctgaccgagagcaataagaagttcctgccttttcagcagttcggcagggacatcgcagataccacagacgccgtgcgcgaccctcagaccctggagatcctggacatcacaccatgcagcttcggcggcgtgtccgtgatcacaccaggcaccaatacatccaaccaggtggccgtgctgtatcaggacgtgaattgtaccgaggtgcccgtggcaatccacgcagatcagctgacccctacatggcgggtgtactctaccggcagcaacgtgttccagacaagagccggatgcctgatcggagcagagcacgtgaacaatagctatgagtgcgacatccctatcggcgccggcatctgtgccagctaccagacccagacaaactccccatctggagcaggctccgtggccagccagtccatcatcgcctataccatgagcctgggcgccgagaacagcgtggcctactccaacaattctatcgccatccctaccaacttcacaatcagcgtgaccacagagatcctgccagtgtctatgaccaagacaagcgtggactgcacaatgtatatctgtggcgatagcaccgagtgctccaacctgctgctgcagtacggctccttttgtacccagctgaatagagccctgacaggcatcgccgtggagcaggataagaacacacaggaggtgttcgcccaggtgaagcagatctacaagaccccacccatcaaggactttggcggcttcaacttcagccagatcctgcctgatccaagcaagccctccaagaggtcttttatcgaggacctgctgttcaacaaggtgaccctggccgatgccggcttcatcaagcagtatggagattgcctgggagacatcgcagcccgcgacctgatctgtgcccagaagtttaatggcctgaccgtgctgcctccactgctgacagatgagatgatcgcccagtacacatctgccctgctggccggcaccatcacaagcggatggaccttcggcgcaggagccgccctgcagatcccttttgccatgcagatggcctataggttcaacggcatcggcgtgacccagaatgtgctgtacgagaaccagaagctgatcgccaatcagtttaacagcgccatcggcaagatccaggactctctgtcctctacagccagcgccctgggcaagctgcaggatgtggtgaatcagaacgcccaggccctgaataccctggtgaagcagctgagctccaacttcggcgccatctctagcgtgataaatgacatcctgagccggctggacccccctgaggcagaggtgcagatcgacaggctgatcacaggccgcctgcagagcctgcagacctacgtgacacagcagctgatcagggcagcagagatcagagcctccgccaatctggccgccaccaagatgagcgagtgcgtgctgggacagtccaagagggtggacttttgtggcaagggctatcacctgatgtctttcccacagagcgcccctcacggcgtggtgtttctgcacgtgacctacgtgccagcccaggagaagaacttcaccacagcaccagccatctgccacgatggaaaggcacactttcctagggagggcgtgttcgtgtctaacggcacccactggtttgtgacacagcgcaatttctacgagccacagatcatcaccacagacaatacattcgtgagcggcaactgtgatgtggtgatcggcatcgtgaacaataccgtgtatgatccactgcagcccgagctggactcctttaaggaggagctggataagtacttcaagaatcacacctctcccgacgtggatctgggcgacatctccggcatcaatgcctctgtggtgaacatccagaaggagatcgaccggctgaacgaggtggccaagaatctgaacgagagcctgatcgatctgcaggagctgggcaagtatgagcagtacatcaagggctctggcagagagaacctgtatttccagggaggaggaggcagcggatacatccctgaggcaccaagggacggacaggcctacgtgcgcaaggatggcgagtgggtgctgctgtccacctttctgggccatcatcaccaccaccaccaccactga

SEQ ID NO: 1213 - DNA, 3846 bp, Artificial Sequence
  Description of Artificial Sequence: Synthetic polynucleotide
atgggcatcctgccaagcccaggaatgcccgccctgctgtctctggtgagcctgctgtccgtgctgctgatgggatgcgtggcagagacaggcacacagtgcgtgaacctgaccacaaggacccagctgccccctgcctataccaattctttcacacggggcgtgtactatcccgacaaggtgtttagaagctccgtgctgcactccacacaggatctgtttctgcctttcttttctaacgtgacctggttccacgccatccacgtgtccggcaccaatggcacaaagcggttcgacaatcccgtgctgccttttaacgatggcgtgtacttcgccagcaccgagaagtccaacatcatcagaggctggatctttggcaccacactggactctaagacacagagcctgctgatcgtgaacaatgccaccaacgtggtgatcaaggtgtgcgagttccagttttgtaatgatccattcctgggcgtgtactatcacaagaacaataagtcctggatggagtctgagtttcgcgtgtattctagcgccaacaattgcacatttgagtacgtgagccagcccttcctgatggacctggagggcaagcagggcaatttcaagaacctgagggagttcgtgtttaagaatatcgatggctacttcaagatctacagcaagcacaccccaatcaacctggtgcgcgacctgccacagggattctccgccctggagccaaatgtggatctgcccatcggcatcaacatcacccggtttcagacactgctggccctgcacagatcctacctgacaccaggcgactcctctagcggatggaccgcaggagctgccgcctactatgtgggctatctgcagccccggaccttcctgctgaagtacaacgagaatggcaccatcacagacgcagtggattgcgccctggaccccctgtctgagacaaagtgtacactgaagagctttaccgtggagaagggcatctatcagacaagcaatttcagggtgcagcctaccgagtccatcgtgcgctttcccaatatcacaaacctgtgcccttttggcgaggtgttcaacgccaccagattcgccagcgtgtacgcctggaatcggaagagaatctccaactgcgtggccgactattctgtgctgtacaactccgcctctttcagcacctttaagtgctatggcgtgtctcccacaaagctgaatgatctgtgctttaccaacgtgtacgccgatagcttcgtgatcaggggagacgaagtgagacagatcgcaccaggacagacaggaaagatcgcagactacaattataagctgcctgacgatttcaccggctgcgtgatcgcctggaactccaacaatctggattctaaagtgggcggcaactacaattatctgtacaggctgtttcgcaagtccaatctgaagccattcgagcgggacatctccacagagatctaccaggccggctctaccccctgcaatggcgtggagggctttaactgttatttccctctgcagtcttacggcttccagccaacaaacggcgtgggctatcagccctacagagtggtggtgctgtcctttgagctgctgcacgcaccagcaacagtgtgcggcccaaagaagtctaccaatctggtgaagaacaagtgcgtgaacttcaacttcaacggactgaccggcacaggcgtgctgaccgagagcaataagaagttcctgccttttcagcagttcggcagggacatcgcagataccacagacgccgtgcgcgaccctcagaccctggagatcctggacatcacaccatgcagcttcggcggcgtgtccgtgatcacaccaggcaccaatacatccaaccaggtggccgtgctgtatcaggacgtgaattgtaccgaggtgcccgtggcaatccacgcagatcagctgacccctacatggcgggtgtactctaccggcagcaacgtgttccagacaagagccggatgcctgatcggagcagagcacgtgaacaatagctatgagtgcgacatccctatcggcgccggcatctgtgccagctaccagacccagacaaactccccatctggagcaggctccgtggccagccagtccatcatcgcctataccatgagcctgggcgccgagaacagcgtggcctactccaacaattctatcgccatccctaccaacttcacaatcagcgtgaccacagagatcctgccagtgtctatgaccaagacaagcgtggactgcacaatgtatatctgtggcgatagcaccgagtgctccaacctgctgctgcagtacggctccttttgtacccagctgaatagagccctgacaggcatcgccgtggagcaggataagaacacacaggaggtgttcgcccaggtgaagcagatctacaagaccccacccatcaaggactttggcggcttcaacttcagccagatcctgcctgatccaagcaagccctccaagaggtcttttatcgaggacctgctgttcaacaaggtgaccctggccgatgccggcttcatcaagcagtatggagattgcctgggagacatcgcagcccgcgacctgatctgtgcccagaagtttaatggcctgaccgtgctgcctccactgctgacagatgagatgatcgcccagtacacatctgccctgctggccggcaccatcacaagcggatggaccttcggcgcaggagccgccctgcagatcccttttgccatgcagatggcctataggttcaacggcatcggcgtgacccagaatgtgctgtacgagaaccagaagctgatcgccaatcagtttaacagcgccatcggcaagatccaggactctctgtcctctacagccagcgccctgggcaagctgcaggatgtggtgaatcagaacgcccaggccctgaataccctggtgaagcagctgagctccaacttcggcgccatctctagcgtgctgaatgacatcctgagccggctggacccccctgaggcagaggtgcagatcgacaggctgatcacaggccgcctgcagagcctgcagacctacgtgacacagcagctgatcagggcagcagagatcagagcctccgccaatctggccgccaccaagatgagcgagtgcgtgctgggacagtccaagagggtggacttttgtggcaagggctatcacctgatgtctttcccacagagcgcccctcacggcgtggtgtttctgcacgtgacctacgtgccagcccaggagaagaacttcaccacagcaccagccatctgccacgatggaaaggcacactttcctagggagggcgtgttcgtgtctaacggcacccactggtttgtgacacagcgcaatttctacgagccacagatcatcaccacagacaatacattcgtgagcggcaactgtgatgtggtgatcggcatcgtgaacaataccgtgtatgatccactgcagcccgagctggactcctttaaggaggagctggataagtacttcaagaatcacacctctcccgacgtggatctgggcgacatctccggcatcaatgcctctgtggtgaacatccagaaggagatcgaccggctgaacgaggtggccaagaatctgaacgagagcctgatcgatctgcaggagctgggcaagtatgagcagtacatcaagggctctggcagagagaacctgtatttccagggaggaggaggcagcggatacatccctgaggcaccaagggacggacaggcctacgtgcgcaaggatggcgagtgggtgctgctgtccacctttctgggccatcatcaccaccaccaccaccactga

SEQ ID NO: 1214 - DNA, 3846 bp, Artificial Sequence
  Description of Artificial Sequence: Synthetic polynucleotide
atgggcatcctgccaagcccaggaatgcccgccctgctgtctctggtgagcctgctgtccgtgctgctgatgggatgcgtggcagagacaggcacacagtgcgtgaacctgaccacaaggacccagctgccccctgcctataccaattctttcacacggggcgtgtactatcccgacaaggtgtttagaagctccgtgctgcactccacacaggatctgtttctgcctttcttttctaacgtgacctggttccacgccatccacgtgtccggcaccaatggcacaaagcggttcgacaatcccgtgctgccttttaacgatggcgtgtacttcgccagcaccgagaagtccaacatcatcagaggctggatctttggcaccacactggactctaagacacagagcctgctgatcgtgaacaatgccaccaacgtggtgatcaaggtgtgcgagttccagttttgtaatgatccattcctgggcgtgtactatcacaagaacaataagtcctggatggagtctgagtttcgcgtgtattctagcgccaacaattgcacatttgagtacgtgagccagcccttcctgatggacctggagggcaagcagggcaatttcaagaacctgagggagttcgtgtttaagaatatcgatggctacttcaagatctacagcaagcacaccccaatcaacctggtgcgcgacctgccacagggattctccgccctggagccactggtggatctgcccatcggcatcaacatcacccggtttcagacactgctggccctgcacagatcctacctgacaccaggcgactcctctagcggatggaccgcaggagctgccgcctactatgtgggctatctgcagccccggaccttcctgctgaagtacaacgagaatggcaccatcacagacgcagtggattgcgccctggaccccctgtctgagacaaagtgtacactgaagagctttaccgtggagaagggcatctatcagacaagcaatttcagggtgcagcctaccgagtccatcgtgcgctttcccaatatcacaaacctgtgcccttttggcgaggtgttcaacgccaccagattcgccagcgtgtacgcctggaatcggaagagaatctccaactgcgtggccgactattctgtgctgtacaactccgcctctttcagcacctttaagtgctatggcgtgtctcccacaaagctgaatgatctgtgctttaccaacgtgtacgccgatagcttcgtgatcaggggagacgaagtgagacagatcgcaccaggacagacaggaaagatcgcagactacaattataagctgcctgacgatttcaccggctgcgtgatcgcctggaactccaacaatctggattctaaagtgggcggcaactacaattatctgtacaggctgtttcgcaagtccaatctgaagccattcgagcgggacatctccacagagatctaccaggccggctctaccccctgcaatggcgtggagggctttaactgttatttccctctgcagtcttacggcttccagccaacaaacggcgtgggctatcagccctacagagtggtggtgctgtcctttgagctgctgcacgcaccagcaacagtgtgcggcccaaagaagtctaccaatctggtgaagaacaagtgcgtgaacttcaacttcaacggactgaccggcacaggcgtgctgaccgagagcaataagaagttcctgccttttcagcagttcggcagggacatcgcagataccacagacgccgtgcgcgaccctcagaccctggagatcctggacatcacaccatgcagcttcggcggcgtgtccgtgatcacaccaggcaccaatacatccaaccaggtggccgtgctgtatcaggacgtgaattgtaccgaggtgcccgtggcaatccacgcagatcagctgacccctacatggcgggtgtactctaccggcagcaacgtgttccagacaagagccggatgcctgatcggagcagagcacgtgaacaatagctatgagtgcgacatccctatcggcgccggcatctgtgccagctaccagacccagacaaactccccatctggagcaggctccgtggccagccagtccatcatcgcctataccatgagcctgggcgccgagaacagcgtggcctactccaacaattctatcgccatccctaccaacttcacaatcagcgtgaccacagagatcctgccagtgtctatgaccaagacaagcgtggactgcacaatgtatatctgtggcgatagcaccgagtgctccaacctgctgctgcagtacggctccttttgtacccagctgaatagagccctgacaggcatcgccgtggagcaggataagaacacacaggaggtgttcgcccaggtgaagcagatctacaagaccccacccatcaaggactttggcggcttcaacttcagccagatcctgcctgatccaagcaagccctccaagaggtcttttatcgaggacctgctgttcaacaaggtgaccctggccgatgccggcttcatcaagcagtatggagattgcatgggagacatcgcagcccgcgacctgatctgtgcccagaagtttaatggcctgaccgtgctgcctccactgctgacagatgagatgatcgcccagtacacatctgccctgctggccggcaccatcacaagcggatggaccttcggcgcaggagccgccctgcagatcccttttgccatgcagatggcctataggttcaacggcatcggcgtgacccagaatgtgctgtacgagaaccagaagctgatcgccaatcagtttaacagcgccatcggcaagatccaggactctctgtcctctacagccagcgccctgggcaagctgcaggatgtggtgaatcagaacgcccaggccctgaataccctggtgaagcagctgagctccaacttcggcgccatctctagcgtgctgaatgacatcctgagccggctggacccccctgaggcagaggtgcagatcgacaggctgatcacaggccgcctgcagagcctgcagacctacgtgacacagcagctgatcagggcagcagagatcagagcctccgccaatctggccgccaccaagatgagcgagtgcgtgctgggacagtccaagagggtggacttttgtggcaagggctatcacctgatgtctttcccacagagcgcccctcacggcgtggtgtttctgcacgtgacctacgtgccagcccaggagaagaacttcaccacagcaccagccatctgccacgatggaaaggcacactttcctagggagggcgtgttcgtgtctaacggcacccactggtttgtgacacagcgcaatttctacgagccacagatcatcaccacagacaatacattcgtgagcggcaactgtgatgtggtgatcggcatcgtgaacaataccgtgtatgatccactgcagcccgagctggactcctttaaggaggagctggataagtacttcaagaatcacacctctcccgacgtggatctgggcgacatctccggcatcaatgcctctgtggtgaacatccagaaggagatcgaccggctgaacgaggtggccaagaatctgaacgagagcctgatcgatctgcaggagctgggcaagtatgagcagtacatcaagggctctggcagagagaacctgtatttccagggaggaggaggcagcggatacatccctgaggcaccaagggacggacaggcctacgtgcgcaaggatggcgagtgggtgctgctgtccacctttctgggccatcatcaccaccaccaccaccactga

SEQ ID NO: 1215 - DNA, 3846 bp, Artificial Sequence
  Description of Artificial Sequence: Synthetic polynucleotide
atgggcatcctgccaagcccaggaatgcccgccctgctgtctctggtgagcctgctgtccgtgctgctgatgggatgcgtggcagagacaggcacacagtgcgtgaacctgaccacaaggacccagctgccccctgcctataccaattctttcacacggggcgtgtactatcccgacaaggtgtttagaagctccgtgctgcactccacacaggatctgtttctgcctttcttttctaacgtgacctggttccacgccatccacgtgtccggcaccaatggcacaaagcggttcgacaatcccgtgctgccttttaacgatggcgtgtacttcgccagcaccgagaagtccaacatcatcagaggctggatctttggcaccacactggactctaagacacagagcctgctgatcgtgaacaatgccaccaacgtggtgatcaaggtgtgcgagttccagttttgtaatgatccattcctgggcgtgtactatcacaagaacaataagtcctggatggagtctgagtttcgcgtgtattctagcgccaacaattgcacatttgagtacgtggaacagcccttcctgatggacctggagggcaagcagggcaatttcaagaacctgagggagttcgtgtttaagaatatcgatggctacttcaagatctacagcaagcacaccccaatcaacctggtgcgcgacctgccacagggattctccgccctggagccactggtggatctgcccatcggcatcaacatcacccggtttcagacactgctggccctgcacagatcctacctgacaccaggcgactcctctagcggatggaccgcaggagctgccgcctactatgtgggctatctgcagccccggaccttcctgctgaagtacaacgagaatggcaccatcacagacgcagtggattgcgccctggaccccctgtctgagacaaagtgtacactgaagagctttaccgtggagaagggcatctatcagacaagcaatttcagggtgcagcctaccgagtccatcgtgcgctttcccaatatcacaaacctgtgcccttttggcgaggtgttcaacgccaccagattcgccagcgtgtacgcctggaatcggaagagaatctccaactgcgtggccgactattctgtgctgtacaactccgcctctttcagcacctttaagtgctatggcgtgtctcccacaaagctgaatgatctgtgctttaccaacgtgtacgccgatagcttcgtgatcaggggagacgaagtgagacagatcgcaccaggacagacaggaaagatcgcagactacaattataagctgcctgacgatttcaccggctgcgtgatcgcctggaactccaacaatctggattctaaagtgggcggcaactacaattatctgtacaggctgtttcgcaagtccaatctgaagccattcgagcgggacatctccacagagatctaccaggccggctctaccccctgcaatggcgtggagggctttaactgttatttccctctgcagtcttacggcttccagccaacaaacggcgtgggctatcagccctacagagtggtggtgctgtcctttgagctgctgcacgcaccagcaacagtgtgcggcccaaagaagtctaccaatctggtgaagaacaagtgcgtgaacttcaacttcaacggactgaccggcacaggcgtgctgaccgagagcaataagaagttcctgccttttcagcagttcggcagggacatcgcagataccacagacgccgtgcgcgaccctcagaccctggagatcctggacatcacaccatgcagcttcggcggcgtgtccgtgatcacaccaggcaccaatacatccaaccaggtggccgtgctgtatcaggacgtgaattgtaccgaggtgcccgtggcaatccacgcagatcagctgacccctacatggcgggtgtactctaccggcagcaacgtgttccagacaagagccggatgcctgatcggagcagagcacgtgaacaatagctatgagtgcgacatccctatcggcgccggcatctgtgccagctaccagacccagacaaactccccatctggagcaggctccgtggccagccagtccatcatcgcctataccatgagcctgggcgccgagaacagcgtggcctactccaacaattctatcgccatccctaccaacttcacaatcagcgtgaccacagagatcctgccagtgtctatgaccaagacaagcgtggactgcacaatgtatatctgtggcgatagcaccgagtgctccaacctgctgctgcagtacggctccttttgtacccagctgaatagagccctgacaggcatcgccgtggagcaggataagaacacacaggaggtgttcgcccaggtgaagcagatctacaagaccccacccatcaaggactttggcggcttcaacttcagccagatcctgcctgatccaagcaagccctccaagaggtcttttatcgaggacctgctgttcaacaaggtgaccctggccgatgccggcttcatcaagcagtatggagattgcctgggagacatcgcagcccgcgacctgatctgtgcccagaagtttaatggcctgaccgtgctgcctccactgctgacagatgagatgatcgcccagtacacatctgccctgctggccggcaccatcacaagcggatggaccttcggcgcaggagccgccctgcagatcccttttgccatgcagatggcctataggttcaacggcatcggcgtgacccagaatgtgctgtacgagaaccagaagctgatcgccaatcagtttaacagcgccatcggcaagatccaggactctctgtcctctacagccagcgccctgggcaagctgcaggatgtggtgaatcagaacgcccaggccctgaataccctggtgaagcagctgagctccaacttcggcgccatctctagcgtgctgaatgacatcctgagccggctggacccccctgaggcagaggtgcagatcgacaggctgatcacaggccgcctgcagagcctgcagacctacgtgacacagcagctgatcagggcagcagagatcagagcctccgccaatctggccgccaccaagatgagcgagtgcgtgctgggacagtccaagagggtggacttttgtggcaagggctatcacctgatgtctttcccacagagcgcccctcacggcgtggtgtttctgcacgtgacctacgtgccagcccaggagaagaacttcaccacagcaccagccatctgccacgatggaaaggcacactttcctagggagggcgtgttcgtgtctaacggcacccactggtttgtgacacagcgcaatttctacgagccacagatcatcaccacagacaatacattcgtgagcggcaactgtgatgtggtgatcggcatcgtgaacaataccgtgtatgatccactgcagcccgagctggactcctttaaggaggagctggataagtacttcaagaatcacacctctcccgacgtggatctgggcgacatctccggcatcaatgcctctgtggtgaacatccagaaggagatcgaccggctgaacgaggtggccaagaatctgaacgagagcctgatcgatctgcaggagctgggcaagtatgagcagtacatcaagggctctggcagagagaacctgtatttccagggaggaggaggcagcggatacatccctgaggcaccaagggacggacaggcctacgtgcgcaaggatggcgagtgggtgctgctgtccacctttctgggccatcatcaccaccaccaccaccactga

SEQ ID NO: 1216 - DNA, 3846 bp, Artificial Sequence
  Description of Artificial Sequence: Synthetic polynucleotide
atgggcatcctgccaagcccaggaatgcccgccctgctgtctctggtgagcctgctgtccgtgctgctgatgggatgcgtggcagagacaggcacacagtgcgtgaacctgaccacaaggacccagctgccccctgcctataccaattctttcacacggggcgtgtactatcccgacaaggtgtttagaagctccgtgctgcactccacacaggatctgtttctgcctttcttttctaacgtgacctggttccacgccatccacgtgtccggcaccaatggcacaaagcggttcgacaatcccgtgctgccttttaacgatggcgtgtacttcgccagcaccgagaagtccaacatcatcagaggctggatctttggcaccacactggactctaagacacagagcctgctgatcgtgaacaatgccaccaacgtggtgatcaaggtgtgcgagttccagttttgtaatgatccattcctgggcgtgtactatcacaagaacaataagtcctggatggagtctgagtttcgcgtgtattctagcgccaacaattgcacatttgagtacgtgagccagcccttcctgatggacctggagggcaagcagggcaatttcaagaacctgagggagttcgtgtttaagaatatcgatggctacttcaagatctacagcaagcacaccccaatcaacctggtgcgcgacctgccacagggattctccgccctggagccactggtggatctgcccatcggcatcaacatcacccggtttcagacactgctggccctgcacagatcctacctgacaccaggcgactcctctagcggatggaccgcaggagctgccgcctactatgtgggctatctgcagccccggaccttcctgctgaagtacaacgagaatggcaccatcacagacgcagtggattgcgccctggaccccctgtctgagacaaagtgtacactgaagagctttaccgtggagaagggcatctatcagacaagcaatttcagggtgcagcctaccgagtccatcgtgcgctttcccaatatcacaaacctgtgcccttttggcgaggtgttcaacgccaccagattcgccagcgtgtacgcctggaatcggaagagaatctccaactgcgtggccgactattctgtgctgtacaactccgcctctttcagcacctttaagtgctatggcgtgtctcccacaaagctgaatgatctgtgctttaccaacgtgtacgccgatagcttcgtgatcaggggagacgaagtgagacagatcgcaccaggacagacaggaaagatcgcagactacaattataagctgcctgacgatttcaccggctgcgtgatcgcctggaactccaacaatctggattctaaagtgggcggcaactacaattatctgtacaggctgtttcgcaagtccaatctgaagccattcgagcgggacatctccacagagatctaccaggccggctctaccccctgcaatggcgtggagggctttaactgttatttccctctgcagtcttacggcttccagccaacaaacggcgtgggctatcagccctacagagtggtggtgctgtcctttgagctgctgcacgcaccagcaacagtgtgcggcccaaagaagtctaccaatctggtgaagaacaagtgcgtgaacttcaacttcaacggactgaccggcacaggcgtgctgaccgagagcaataagaagttcctgccttttcagcagttcggcagggacatcgcagataccacagacgccgtgcgcgaccctcagaccctggagatcctggacatcacaccatgcagcttcggcggcgtgtccgtggtaacaccaggcaccaatacatccaaccaggtggccgtgctgtatcaggacgtgaattgtaccgaggtgcccgtggcaatccacgcagatcagctgacccctacatggcgggtgtactctaccggcagcaacgtgttccagacaagagccggatgcctgatcggagcagagcacgtgaacaatagctatgagtgcgacatccctatcggcgccggcatctgtgccagctaccagacccagacaaactccccatctggagcaggctccgtggccagccagtccatcatcgcctataccatgagcctgggcgccgagaacagcgtggcctactccaacaattctatcgccatccctaccaacttcacaatcagcgtgaccacagagatcctgccagtgtctatgaccaagacaagcgtggactgcacaatgtatatctgtggcgatagcaccgagtgctccaacctgctgctgcagtacggctccttttgtacccagctgaatagagccctgacaggcatcgccgtggagcaggataagaacacacaggaggtgttcgcccaggtgaagcagatctacaagaccccacccatcaaggactttggcggcttcaacttcagccagatcctgcctgatccaagcaagccctccaagaggtcttttatcgaggacctgctgttcaacaaggtgaccctggccgatgccggcttcatcaagcagtatggagattgcctgggagacatcgcagcccgcgacctgatctgtgcccagaagtttaatggcctgaccgtgctgcctccactgctgacagatgagatgatcgcccagtacacatctgccctgctggccggcaccatcacaagcggatggaccttcggcgcaggagccgccctgcagatcccttttgccatgcagatggcctataggttcaacggcatcggcgtgacccagaatgtgctgtacgagaaccagaagctgatcgccaatcagtttaacagcgccatcggcaagatccaggactctctgtcctctacagccagcgccctgggcaagctgcaggatgtggtgaatcagaacgcccaggccctgaataccctggtgaagcagctgagctccaacttcggcgccatctctagcgtgctgaatgacatcctgagccggctggacccccctgaggcagaggtgcagatcgacaggctgatcacaggccgcctgcagagcctgcagacctacgtgacacagcagctgatcagggcagcagagatcagagcctccgccaatctggccgccaccaagatgagcgagtgcgtgctgggacagtccaagagggtggacttttgtggcaagggctatcacctgatgtctttcccacagagcgcccctcacggcgtggtgtttctgcacgtgacctacgtgccagcccaggagaagaacttcaccacagcaccagccatctgccacgatggaaaggcacactttcctagggagggcgtgttcgtgtctaacggcacccactggtttgtgacacagcgcaatttctacgagccacagatcatcaccacagacaatacattcgtgagcggcaactgtgatgtggtgatcggcatcgtgaacaataccgtgtatgatccactgcagcccgagctggactcctttaaggaggagctggataagtacttcaagaatcacacctctcccgacgtggatctgggcgacatctccggcatcaatgcctctgtggtgaacatccagaaggagatcgaccggctgaacgaggtggccaagaatctgaacgagagcctgatcgatctgcaggagctgggcaagtatgagcagtacatcaagggctctggcagagagaacctgtatttccagggaggaggaggcagcggatacatccctgaggcaccaagggacggacaggcctacgtgcgcaaggatggcgagtgggtgctgctgtccacctttctgggccatcatcaccaccaccaccaccactga

SEQ ID NO: 1217 - DNA, 3846 bp, Artificial Sequence
  Description of Artificial Sequence: Synthetic polynucleotide
atgggcatcctgccaagcccaggaatgcccgccctgctgtctctggtgagcctgctgtccgtgctgctgatgggatgcgtggcagagacaggcacacagtgcgtgaacctgaccacaaggacccagctgccccctgcctataccaattctttcacacggggcgtgtactatcccgacaaggtgtttagaagctccgtgctgcactccacacaggatctgtttctgcctttcttttctaacgtgacctggttccacgccatccacgtgtccggcaccaatggcacaaagcggttcgacaatcccgtgctgccttttaacgatggcgtgtacttcgccagcaccgagaagtccaacatcatcagaggctggatctttggcaccacactggactctaagacacagagcctgctgatcgtgaacaatgccaccaacgtggtgatcaaggtgtgcgagttccagttttgtaatgatccattcctgggcgtgtactatcacaagaacaataagtcctggatggagtctgagtttcgcgtgtattctagcgccaacaattgcacatttgagtacgtgagccagcccttcctgttagacctggagggcaagcagggcaatttcaagaacctgagggagttcgtgtttaagaatatcgatggctacttcaagatctacagcaagcacaccccaatcaacctggtgcgcgacctgccacagggattctccgccctggagccactggtggatctgcccatcggcatcaacatcacccggtttcagacactgctggccctgcacagatcctacctgacaccaggcgactcctctagcggatggaccgcaggagctgccgcctactatgtgggctatctgcagccccggaccttcctgctgaagtacaacgagaatggcaccatcacagacgcagtggattgcgccctggaccccctgtctgagacaaagtgtacactgaagagctttaccgtggagaagggcatctatcagacaagcaatttcagggtgcagcctaccgagtccatcgtgcgctttcccaatatcacaaacctgtgcccttttggcgaggtgttcaacgccaccagattcgccagcgtgtacgcctggaatcggaagagaatctccaactgcgtggccgactattctgtgctgtacaactccgcctctttcagcacctttaagtgctatggcgtgtctcccacaaagctgaatgatctgtgctttaccaacgtgtacgccgatagcttcgtgatcaggggagacgaagtgagacagatcgcaccaggacagacaggaaagatcgcagactacaattataagctgcctgacgatttcaccggctgcgtgatcgcctggaactccaacaatctggattctaaagtgggcggcaactacaattatctgtacaggctgtttcgcaagtccaatctgaagccattcgagcgggacatctccacagagatctaccaggccggctctaccccctgcaatggcgtggagggctttaactgttatttccctctgcagtcttacggcttccagccaacaaacggcgtgggctatcagccctacagagtggtggtgctgtcctttgagctgctgcacgcaccagcaacagtgtgcggcccaaagaagtctaccaatctggtgaagaacaagtgcgtgaacttcaacttcaacggactgaccggcacaggcgtgctgaccgagagcaataagaagttcctgccttttcagcagttcggcagggacatcgcagataccacagacgccgtgcgcgaccctcagaccctggagatcctggacatcacaccatgcagcttcggcggcgtgtccgtgatcacaccaggcaccaatacatccaaccaggtggccgtgctgtatcaggacgtgaattgtaccgaggtgcccgtggcaatccacgcagatcagctgacccctacatggcgggtgtactctaccggcagcaacgtgttccagacaagagccggatgcctgatcggagcagagcacgtgaacaatagctatgagtgcgacatccctatcggcgccggcatctgtgccagctaccagacccagacaaactccccatctggagcaggctccgtggccagccagtccatcatcgcctataccatgagcctgggcgccgagaacagcgtggcctactccaacaattctatcgccatccctaccaacttcacaatcagcgtgaccacagagatcctgccagtgtctatgaccaagacaagcgtggactgcacaatgtatatctgtggcgatagcaccgagtgctccaacctgctgctgcagtacggctccttttgtacccagctgaatagagccctgacaggcatcgccgtggagcaggataagaacacacaggaggtgttcgcccaggtgaagcagatctacaagaccccacccatcaaggactttggcggcttcaacttcagccagatcctgcctgatccaagcaagccctccaagaggtcttttatcgaggacctgctgttcaacaaggtgaccctggccgatgccggcttcatcaagcagtatggagattgcctgggagacatcgcagcccgcgacctgatctgtgcccagaagtttaatggcctgaccgtgctgcctccactgctgacagatgagatgatcgcccagtacacatctgccctgctggccggcaccatcacaagcggatggaccttcggcgcaggagccgccctgcagatcccttttgccatgcagatggcctataggttcaacggcatcggcgtgacccagaatgtgctgtacgagaaccagaagctgatcgccaatcagtttaacagcgccatcggcaagatccaggactctctgtcctctacagccagcgccctgggcaagctgcaggatgtggtgaatcagaacgcccaggccctgaataccctggtgaagcagctgagctccaacttcggcgccatctctagcgtgctgaatgacatcctgagccggctggacccccctgaggcagaggtgcagatcgacaggctgatcacaggccgcctgcagagcctgcagacctacgtgacacagcagctgatcagggcagcagagatcagagcctccgccaatctggccgccaccaagatgagcgagtgcgtgctgggacagtccaagagggtggacttttgtggcaagggctatcacctgatgtctttcccacagagcgcccctcacggcgtggtgtttctgcacgtgacctacgtgccagcccaggagaagaacttcaccacagcaccagccatctgccacgatggaaaggcacactttcctagggagggcgtgttcgtgtctaacggcacccactggtttgtgacacagcgcaatttctacgagccacagatcatcaccacagacaatacattcgtgagcggcaactgtgatgtggtgatcggcatcgtgaacaataccgtgtatgatccactgcagcccgagctggactcctttaaggaggagctggataagtacttcaagaatcacacctctcccgacgtggatctgggcgacatctccggcatcaatgcctctgtggtgaacatccagaaggagatcgaccggctgaacgaggtggccaagaatctgaacgagagcctgatcgatctgcaggagctgggcaagtatgagcagtacatcaagggctctggcagagagaacctgtatttccagggaggaggaggcagcggatacatccctgaggcaccaagggacggacaggcctacgtgcgcaaggatggcgagtgggtgctgctgtccacctttctgggccatcatcaccaccaccaccaccactga

SEQ ID NO: 1218 - DNA, 3846 bp, Artificial Sequence
  Description of Artificial Sequence: Synthetic polynucleotide
atgggcatcctgccaagcccaggaatgcccgccctgctgtctctggtgagcctgctgtccgtgctgctgatgggatgcgtggcagagacaggcacacagtgcgtgaacctgaccacaaggacccagctgccccctgcctataccaattctttcacacggggcgtgtactatcccgacaaggtgtttagaagctccgtgctgcactccacacaggatctgtttctgcctttcttttctaacgtgacctggttccacgccatccacgtgtccggcaccaatggcacaaagcggttcgacaatcccgtgctgccttttaacgatggcgtgtacttcgccagcaccgagaagtccaacatcatcagaggctggatctttggcaccacactggactctaagacacagagcctgctgatcgtgaacaatgccaccaacgtggtgatcaaggtgtgcgagttccagttttgtaatgatccattcctgggcgtgtactatcacaagaacaataagtcctggatggagtctgagtttcgcgtgtattctagcgccaacaattgcacatttgagtacgtgagccagcccttcctgatggacctggagggcaagcagggcaatttcaagaacctgagggagttcgtgtttaagaatatcgatggctacttcaagatctacagcaagcacaccccaatcaacctggtgcgcgacctgccacagggattctccgccctggagccactggtggatctgcccatcggcatcaacatcacccggtttcagacactgctggccctgcacagatcctacctgacaccaggcgactcctctagcggatggaccgcaggagctgccgcctactatgtgggctatctgcagccccggaccttcctgctgaagtacaacgagaatggcaccatcacagacgcagtggattgcgccctggaccccctgtctgagacaaagtgtaaactgaagagctttaccgtggagaagggcatctatcagacaagcaatttcagggtgcagcctaccgagtccatcgtgcgctttcccaatatcacaaacctgtgcccttttggcgaggtgttcaacgccaccagattcgccagcgtgtacgcctggaatcggaagagaatctccaactgcgtggccgactattctgtgctgtacaactccgcctctttcagcacctttaagtgctatggcgtgtctcccacaaagctgaatgatctgtgctttaccaacgtgtacgccgatagcttcgtgatcaggggagacgaagtgagacagatcgcaccaggacagacaggaaagatcgcagactacaattataagctgcctgacgatttcaccggctgcgtgatcgcctggaactccaacaatctggattctaaagtgggcggcaactacaattatctgtacaggctgtttcgcaagtccaatctgaagccattcgagcgggacatctccacagagatctaccaggccggctctaccccctgcaatggcgtggagggctttaactgttatttccctctgcagtcttacggcttccagccaacaaacggcgtgggctatcagccctacagagtggtggtgctgtcctttgagctgctgcacgcaccagcaacagtgtgcggcccaaagaagtctaccaatctggtgaagaacaagtgcgtgaacttcaacttcaacggactgaccggcacaggcgtgctgaccgagagcaataagaagttcctgccttttcagcagttcggcagggacatcgcagataccacagacgccgtgcgcgaccctcagaccctggagatcctggacatcacaccatgcagcttcggcggcgtgtccgtgatcacaccaggcaccaatacatccaaccaggtggccgtgctgtatcaggacgtgaattgtaccgaggtgcccgtggcaatccacgcagatcagctgacccctacatggcgggtgtactctaccggcagcaacgtgttccagacaagagccggatgcctgatcggagcagagcacgtgaacaatagctatgagtgcgacatccctatcggcgccggcatctgtgccagctaccagacccagacaaactccccatctggagcaggctccgtggccagccagtccatcatcgcctataccatgagcctgggcgccgagaacagcgtggcctactccaacaattctatcgccatccctaccaacttcacaatcagcgtgaccacagagatcctgccagtgtctatgaccaagacaagcgtggactgcacaatgtatatctgtggcgatagcaccgagtgctccaacctgctgctgcagtacggctccttttgtacccagctgaatagagccctgacaggcatcgccgtggagcaggataagaacacacaggaggtgttcgcccaggtgaagcagatctacaagaccccacccatcaaggactttggcggcttcaacttcagccagatcctgcctgatccaagcaagccctccaagaggtcttttatcgaggacctgctgttcaacaaggtgaccctggccgatgccggcttcatcaagcagtatggagattgcctgggagacatcgcagcccgcgacctgatctgtgcccagaagtttaatggcctgaccgtgctgcctccactgctgacagatgagatgatcgcccagtacacatctgccctgctggccggcaccatcacaagcggatggaccttcggcgcaggagccgccctgcagatcccttttgccatgcagatggcctataggttcaacggcatcggcgtgacccagaatgtgctgtacgagaaccagaagctgatcgccaatcagtttaacagcgccatcggcaagatccaggactctctgtcctctacagccagcgccctgggcaagctgcaggatgtggtgaatcagaacgcccaggccctgaataccctggtgaagcagctgagctccaacttcggcgccatctctagcgtgctgaatgacatcctgagccggctggacccccctgaggcagaggtgcagatcgacaggctgatcacaggccgcctgcagagcctgcagacctacgtgacacagcagctgatcagggcagcagagatcagagcctccgccaatctggccgccaccaagatgagcgagtgcgtgctgggacagtccaagagggtggacttttgtggcaagggctatcacctgatgtctttcccacagagcgcccctcacggcgtggtgtttctgcacgtgacctacgtgccagcccaggagaagaacttcaccacagcaccagccatctgccacgatggaaaggcacactttcctagggagggcgtgttcgtgtctaacggcacccactggtttgtgacacagcgcaatttctacgagccacagatcatcaccacagacaatacattcgtgagcggcaactgtgatgtggtgatcggcatcgtgaacaataccgtgtatgatccactgcagcccgagctggactcctttaaggaggagctggataagtacttcaagaatcacacctctcccgacgtggatctgggcgacatctccggcatcaatgcctctgtggtgaacatccagaaggagatcgaccggctgaacgaggtggccaagaatctgaacgagagcctgatcgatctgcaggagctgggcaagtatgagcagtacatcaagggctctggcagagagaacctgtatttccagggaggaggaggcagcggatacatccctgaggcaccaagggacggacaggcctacgtgcgcaaggatggcgagtgggtgctgctgtccacctttctgggccatcatcaccaccaccaccaccactga

SEQ ID NO: 1219 - DNA, 3846 bp, Artificial Sequence
  Description of Artificial Sequence: Synthetic polynucleotide
atgggcatcctgccaagcccaggaatgcccgccctgctgtctctggtgagcctgctgtccgtgctgctgatgggatgcgtggcagagacaggcacacagtgcgtgaacctgaccacaaggacccagctgccccctgcctataccaattctttcacacggggcgtgtactatcccgacaaggtgtttagaagctccgtgctgcactccacacaggatctgtttctgcctttcttttctaacgtgacctggttccacgccatccacgtgtccggcaccaatggcacaaagcggttcgacaatcccgtgctgccttttaacgatggcgtgtacttcgccagcaccgagaagtccaacatcatcagaggctggatctttggcaccacactggactctaagacacagagcctgctgatcgtgaacaatgccaccaacgtggtgatcaaggtgtgcgagttccagttttgtaatgatccattcctgggcgtgtactatcacaagaacaataagtcctggatggagtctgagtttcgcgtgtattctagcgccaacaattgcacatttgagtacgtgagccagcccttcctgatggacctggagggcaagcagggcaatttcaagaacctgagggagttcgtgtttaagaatatcgatggctacttcaagatctacagcaagcacaccccaatcaacctggtgcgcgacctgccacagggattctccgccctggagccactggtggatctgcccatcggcatcaacatcacccggtttcagacactgctggccctgcacagatcctacctgacaccaggcgactcctctagcggatggaccgcaggagctgccgcctactatgtgggctatctgcagccccggaccttcctgctgaagtacaacgagaatggcaccatcacagacgcagtggattgcgccctggaccccctgtctgagacaaagtgtacactgaagagctttaccgtggagaagggcatctatcagacaagcaatttcagggtgcagcctaccgagtccatcgtgcgctttcccaatatcacaaacctgtgcccttttggcgaggtgttcaacgccaccagattcgccagcgtgtacgcctggaatcggaagagaatctccaactgcgtggccgactattctgtgctgtacaactccgcctctttcagcacctttaagtgctatggcgtgtctcccacaaagctgaatgatctgtgctttaccaacgtgtacgccgatagcttcgtgatcaggggagacgaagtgagacagatcgcaccaggacagacaggaaagatcgcagactacaattataagctgcctgacgatttcaccggctgcgtgatcgcctggaactccaacaatctggattctaaagtgggcggcaactacaattatctgtacaggctgtttcgcaagtccaatctgaagccattcgagcgggacatctccacagagatctaccaggccggctctaccccctgcaatggcgtggagggctttaactgttatttccctctgcagtcttacggcttccagccaacaaacggcgtgggctatcagccctacagagtggtggtgctgtcctttgagctgctgcacgcaccagcaacagtgtgcggcccaaagaagtctaccaatctggtgaagaacaagtgcgtgaacttcaacttcaacggactgaccggcacaggcgtgctgaccgagagcaataagaagttcctgccttttcagcagttcggcagggacatcgcagataccacagacgccgtgcgcgaccctcagaccctggagatcctggacatcacaccatgcagcttcggcggcgtgtccgtgatcacaccaggcaccaatacatccaaccaggtggccgtgctgtatcaggacgtgaattgtaccgaggtgcccgtggcaatccacgcagatcagctgacccctacatggcgggtgtactctaccggcagcaacgtgttccagacaagagccggatgcctgatcggagcagagcacgtgaacaatagctatgagtgcgacatccctatcggcgccggcatctgtgccagctaccagacccagacaaactccccatctggagcaggctccgtggccagccagtccatcatcgcctataccatgagcctgggcgccgagaacagcgtggcctactccaacaattctatcgccatccctaccaacttcacaatcagcgtgaccacagagatcctgccagtgtctatgaccaagacaagcgtggactgcacaatgtatatctgtggcgatagcaccgagtgctccaacctgctgctgcagtacggctccttttgtacccagctgaatagagccctgacaggcatcgccgtggagcaggataagaacacacaggaggtgttcgcccaggtgaagcagatctacaagaccccacccatcaaggactttggcggcttcaacttcagccagatcctgcctgatccaagcaagccctccaagaggtcttttatcgaggacctgctgttcaacaaggtgaccctggccgatgccggcttcatcaagcagtatggagattgcctgggagacatcgcagcccgcgacctgatctgtgcccagaagtttaatggcctgaccgtgctgcctccactgctgacagatgagatgatcgcccagtacacatctgccctgctggccggcaccatcacaagcggatggaccttcggcgcaggagccgccctgcagatcccttttgccatgcagatggcctataggttcaacggcatcggcgtgacccagaatgtgctgtacgagaaccagaagctgatcgccaatcagtttaacaatgccatcggcaatatccaggactctctgtccactacagccagcgccctgggcaagctgcaggatgtggtgaatcagaacgcccaggccctgaataccctggtgaagcagctgagctccaacttcggcgccatctctagcgtgctgaatgacatcctgagccggctggacccccctgaggcagaggtgcagatcgacaggctgatcacaggccgcctgcagagcctgcagacctacgtgacacagcagctgatcagggcagcagagatcagagcctccgccaatctggccgccaccaagatgagcgagtgcgtgctgggacagtccaagagggtggacttttgtggcaagggctatcacctgatgtctttcccacagagcgcccctcacggcgtggtgtttctgcacgtgacctacgtgccagcccaggagaagaacttcaccacagcaccagccatctgccacgatggaaaggcacactttcctagggagggcgtgttcgtgtctaacggcacccactggtttgtgacacagcgcaatttctacgagccacagatcatcaccacagacaatacattcgtgagcggcaactgtgatgtggtgatcggcatcgtgaacaataccgtgtatgatccactgcagcccgagctggactcctttaaggaggagctggataagtacttcaagaatcacacctctcccgacgtggatctgggcgacatctccggcatcaatgcctctgtggtgaacatccagaaggagatcgaccggctgaacgaggtggccaagaatctgaacgagagcctgatcgatctgcaggagctgggcaagtatgagcagtacatcaagggctctggcagagagaacctgtatttccagggaggaggaggcagcggatacatccctgaggcaccaagggacggacaggcctacgtgcgcaaggatggcgagtgggtgctgctgtccacctttctgggccatcatcaccaccaccaccaccactga

SEQ ID NO: 1220 - DNA, 3846 bp, Artificial Sequence
  Description of Artificial Sequence: Synthetic polynucleotide
atgggcatcctgccaagcccaggaatgcccgccctgctgtctctggtgagcctgctgtccgtgctgctgatgggatgcgtggcagagacaggcacacagtgcgtgaacctgaccacaaggacccagctgccccctgcctataccaattctttcacacggggcgtgtactatcccgacaaggtgtttagaagctccgtgctgcactccacacaggatctgtttctgcctttcttttctaacgtgacctggttccacgccatccacgtgtccggcaccaatggcacaaagcggttcgacaatcccgtgctgccttttaacgatggcgtgtacttcgccagcaccgagaagtccaacatcatcagaggctggatctttggcaccacactggactctaagacacagagcctgctgatcgtgaacaatgccaccaacgtggtgatcaaggtgtgcgagttccagttttgtaatgatccattcctgggcgtgtactatcacaagaacaataagtcctggatggagtctgagtttcgcgtgtattctagcgccaacaattgcacatttgagtacgtgagccagcccttcctgatggacctggagggcaagcagggcaatttcaagaacctgagggagttcgtgtttaagaatatcgatggctacttcaagatctacagcaagcacaccccaatcaacctggtgcgcgacctgccacagggattctccgccctggagccactggtggatctgcccatcggcatcaacatcacccggtttcagacactgctggccctgcacagatcctacctgacaccaggcgactcctctagcggatggaccgcaggagctgccgcctactatgtgggctatctgcagccccggaccttcctgctgaagtacaacgagaatggcaccatcacagacgcagtggattgcgccctggaccccctgtctgagacaaagtgtacactgaagagctttaccgtggagaagggcatctatcagacaagcaatttcagggtgcagcctaccgagtccatcgtgcgctttcccaatatcacaaacctgtgcccttttggcgaggtgttcaacgccaccagattcgccagcgtgtacgcctggaatcggaagagaatctccaactgcgtggccgactattctgtgctgtacaactccgcctctttcagcacctttaagtgctatggcgtgtctcccacaaagctgaatgatctgtgctttaccaacgtgtacgccgatagcttcgtgatcaggggagacgaagtgagacagatcgcaccaggacagacaggaaagatcgcagactacaattataagctgcctgacgatttcaccggctgcgtgatcgcctggaactccaacaatctggattctaaagtgggcggcaactacaattatctgtacaggctgtttcgcaagtccaatctgaagccattcgagcgggacatctccacagagatctaccaggccggctctaccccctgcaatggcgtggagggctttaactgttatttccctctgcagtcttacggcttccagccaacaaacggcgtgggctatcagccctacagagtggtggtgctgtcctttgagctgctgcacgcaccagcaacagtgtgcggcccaaagaagtctaccaatctggtgaagaacaagtgcgtgaacttcaacttcaacggactgaccggcacaggcgtgctgaccgagagcaataagaagttcctgccttttcagcagttcggcagggacatcgcagataccacagacgccgtgcgcgaccctcagaccctggagatcctggacatcacaccatgcagcttcggcggcgtgtccgtgatcacaccaggcaccaatacatccaaccaggtggccgtgctgtatcaggacgtgaattgtaccgaggtgcccgtggcaatccacgcagatcagctgacccctacatggcgggtgtactctaccggcagcaacgtgttccagacaagagccggatgcctgatcggagcagagcacgtgaacaatagctatgagtgcgacatccctatcggcgccggcatctgtgccagctaccagacccagacaaactccccatctggagcaggctccgtggccagccagtccatcatcgcctataccatgagcctgggcgccgagaacagcgtggcctactccaacaattctatcgccatccctaccaacttcacaatcagcgtgaccacagagatcctgccagtgtctatgaccaagacaagcgtggactgcacaatgtatatctgtggcgatagcacccgatgctccaacctgctgctgcagtacggctccttttgtacccagctgaatagagccctgacaggcatcgccgtggagcaggataagaacacacaggaggtgttcgcccaggtgaagcagatctacaagaccccacccatcaaggactttggcggcttcaacttcagccagatcctgcctgatccaagcaagccctccaagaggtcttttatcgaggacctgctgttcaacaaggtgaccctggccgatgccggcttcatcaagcagtatggagattgcctgggagacatcgcagcccgcgacctgatctgtgcccagaagtttaatggcctgaccgtgctgcctccactgctgacagatgagatgatcgcccagtacacatctgccctgctggccggcaccatcacaagcggatggaccttcggcgcaggagccgccctgcagatcccttttgccatgcagatggcctataggttcaacggcatcggcgtgacccagaatgtgctgtacgagaaccagaagctgatcgccaatcagtttaacagcgccatcggcaagatccaggactctctgtcctctacagccagcgccctgggcaagctgcaggatgtggtgaatcagaacgcccaggccctgaataccctggtgaagcagctgagctccaacttcggcgccatctctagcgtgctgaatgacatcctgagccggctggacccccctgaggcagaggtgcagatcgacaggctgatcacaggccgcctgcagagcctgcagacctacgtgacacagcagctgatcagggcagcagagatcagagcctccgccaatctggccgccaccaagatgagcgagtgcgtgctgggacagtccaagagggtggacttttgtggcaagggctatcacctgatgtctttcccacagagcgcccctcacggcgtggtgtttctgcacgtgacctacgtgccagcccaggagaagaacttcaccacagcaccagccatctgccacgatggaaaggcacactttcctagggagggcgtgttcgtgtctaacggcacccactggtttgtgacacagcgcaatttctacgagccacagatcatcaccacagacaatacattcgtgagcggcaactgtgatgtggtgatcggcatcgtgaacaataccgtgtatgatccactgcagcccgagctggactcctttaaggaggagctggataagtacttcaagaatcacacctctcccgacgtggatctgggcgacatctccggcatcaatgcctctgtggtgaacatccagaaggagatcgaccggctgaacgaggtggccaagaatctgaacgagagcctgatcgatctgcaggagctgggcaagtatgagcagtacatcaagggctctggcagagagaacctgtatttccagggaggaggaggcagcggatacatccctgaggcaccaagggacggacaggcctacgtgcgcaaggatggcgagtgggtgctgctgtccacctttctgggccatcatcaccaccaccaccaccactga

SEQ ID NO: 1221 - DNA, 3846 bp, Artificial Sequence
  Description of Artificial Sequence: Synthetic polynucleotide
atgggcatcctgccaagcccaggaatgcccgccctgctgtctctggtgagcctgctgtccgtgctgctgatgggatgcgtggcagagacaggcacacagtgcgtgaacctgaccacaaggacccagctgccccctgcctataccaattctttcacacggggcgtgtactatcccgacaaggtgtttagaagctccgtgctgcactccacacaggatctgtttctgcctttcttttctaacgtgacctggttccacgccatccacgtgtccggcaccaatggcacaaagcggttcgacaatcccgtgctgccttttaacgatggcgtgtacttcgccagcaccgagaagtccaacatcatcagaggctggatctttggcaccacactggactctaagacacagagcctgctgatcgtgaacaatgccaccaacgtggtgatcaaggtgtgcgagttccagttttgtaatgatccattcctgggcgtgtactatcacaagaacaataagtcctggatggagtctgagtttcgcgtgtattctagcgccaacaattgcacatttgagtacgtgagccagtcattcctgatggacctggagggcaagcagggcaatttcaagaacctgagggagttcgtgtttaagaatatcgatggctacttcaagatctacagcaagcacaccccaatcaacctggtgcgcgacctgccacagggattctccgccctggagccactggtggatctgcccatcggcatcaacatcacccggtttcagacactgctggccctgcacagatcctacctgacaccaggcgactcctctagcggatggaccgcaggagctgccgcctactatgtgggctatctgcagccccggaccttcctgctgaagtacaacgagaatggcaccatcacagacgcagtggattgcgccctggaccccctgtctgagacaaagtgtacactgaagagctttaccgtggagaagggcatctatcagacaagcaatttcagggtgcagcctaccgagtccatcgtgcgctttcccaatatcacaaacctgtgcccttttggcgaggtgttcaacgccaccagattcgccagcgtgtacgcctggaatcggaagagaatctccaactgcgtggccgactattctgtgctgtacaactccgcctctttcagcacctttaagtgctatggcgtgtctcccacaaagctgaatgatctgtgctttaccaacgtgtacgccgatagcttcgtgatcaggggagacgaagtgagacagatcgcaccaggacagacaggaaagatcgcagactacaattataagctgcctgacgatttcaccggctgcgtgatcgcctggaactccaacaatctggattctaaagtgggcggcaactacaattatctgtacaggctgtttcgcaagtccaatctgaagccattcgagcgggacatctccacagagatctaccaggccggctctaccccctgcaatggcgtggagggctttaactgttatttccctctgcagtcttacggcttccagccaacaaacggcgtgggctatcagccctacagagtggtggtgctgtcctttgagctgctgcacgcaccagcaacagtgtgcggcccaaagaagtctaccaatctggtgaagaacaagtgcgtgaacttcaacttcaacggactgaccggcacaggcgtgctgaccgagagcaataagaagttcctgccttttcagcagttcggcagggacatcgcagataccacagacgccgtgcgcgaccctcagaccctggagatcctggacatcacaccatgcagcttcggcggcgtgtccgtgatcacaccaggcaccaatacatccaaccaggtggccgtgctgtatcaggacgtgaattgtaccgaggtgcccgtggcaatccacgcagatcagctgacccctacatggcgggtgtactctaccggcagcaacgtgttccagacaagagccggatgcctgatcggagcagagcacgtgaacaatagctatgagtgcgacatccctatcggcgccggcatctgtgccagctaccagacccagacaaactccccatctggagcaggctccgtggccagccagtccatcatcgcctataccatgagcctgggcgccgagaacagcgtggcctactccaacaattctatcgccatccctaccaacttcacaatcagcgtgaccacagagatcctgccagtgtctatgaccaagacaagcgtggactgcacaatgtatatctgtggcgatagcaccgagtgctccaacctgctgctgcagtacggctccttttgtacccagctgaatagagccctgacaggcatcgccgtggagcaggataagaacacacaggaggtgttcgcccaggtgaagcagatctacaagaccccacccatcaaggactttggcggcttcaacttcagccagatcctgcctgatccaagcaagccctccaagaggtcttttatcgaggacctgctgttcaacaaggtgaccctggccgatgccggcttcatcaagcagtatggagattgcctgggagacatcgcagcccgcgacctgatctgtgcccagaagtttaatggcctgaccgtgctgcctccactgctgacagatgagatgatcgcccagtacacatctgccctgctggccggcaccatcacaagcggatggaccttcggcgcaggagccgccctgcagatcccttttgccatgcagatggcctataggttcaacggcatcggcgtgacccagaatgtgctgtacgagaaccagaagctgatcgccaatcagtttaacagcgccatcggcaagatccaggactctctgtcctctacagccagcgccctgggcaagctgcaggatgtggtgaatcagaacgcccaggccctgaataccctggtgaagcagctgagctccaacttcggcgccatctctagcgtgctgaatgacatcctgagccggctggacccccctgaggcagaggtgcagatcgacaggctgatcacaggccgcctgcagagcctgcagacctacgtgacacagcagctgatcagggcagcagagatcagagcctccgccaatctggccgccaccaagatgagcgagtgcgtgctgggacagtccaagagggtggacttttgtggcaagggctatcacctgatgtctttcccacagagcgcccctcacggcgtggtgtttctgcacgtgacctacgtgccagcccaggagaagaacttcaccacagcaccagccatctgccacgatggaaaggcacactttcctagggagggcgtgttcgtgtctaacggcacccactggtttgtgacacagcgcaatttctacgagccacagatcatcaccacagacaatacattcgtgagcggcaactgtgatgtggtgatcggcatcgtgaacaataccgtgtatgatccactgcagcccgagctggactcctttaaggaggagctggataagtacttcaagaatcacacctctcccgacgtggatctgggcgacatctccggcatcaatgcctctgtggtgaacatccagaaggagatcgaccggctgaacgaggtggccaagaatctgaacgagagcctgatcgatctgcaggagctgggcaagtatgagcagtacatcaagggctctggcagagagaacctgtatttccagggaggaggaggcagcggatacatccctgaggcaccaagggacggacaggcctacgtgcgcaaggatggcgagtgggtgctgctgtccacctttctgggccatcatcaccaccaccaccaccactga

SEQ ID NO: 1222 - DNA, 3846 bp, Artificial Sequence
  Description of Artificial Sequence: Synthetic polynucleotide
atgggcatcctgccaagcccaggaatgcccgccctgctgtctctggtgagcctgctgtccgtgctgctgatgggatgcgtggcagagacaggcacacagtgcgtgaacctgaccacaaggacccagctgccccctgcctataccaattctttcacacggggcgtgtactatcccgacgatatctttagaagctccgtgctgcactccacacaggatctgtttctgcctttcttttctaacgtgacctggttccacgccatccacgtgtccggcaccaatggcacaaagcggttcgacaatcccgtgctgccttttaacgatggcgtgtacttcgccagcaccgagaagtccaacatcatcagaggctggatctttggcaccacactggactctaagacacagagcctgctgatcgtgaacaatgccaccaacgtggtgatcaaggtgtgcgagttccagttttgtaatgatccattcctgggcgtgtactatcacaagaacaataagtcctggatggagtctgagtttcgcgtgtattctagcgccaacaattgcacatttgagtacgtgagccagcccttcctgatggacctggagggcaagcagggcaatttcaagaacctgagggagttcgtgtttaagaatatcgatggctacttcaagatctacagcaagcacaccccaatcaacctggtgcgcgacctgccacagggattctccgccctgaaaccactggtgaaactgcccatcggcatcaacatcacccggtttcagacactgctggccctgcacagatcctacctgacaccaggcgactcctctagcggatggaccgcaggagctgccgcctactatgtgggctatctgcagccccggaccttcctgctgaagtacaacgagaatggcaccatcacagacgcagtggattgcgccctggaccccctgtctgagacaaagtgtacactgaagagctttaccgtggagaagggcatctatcagacaagcaatttcagggtgcagcctaccgagtccatcgtgcgctttcccaatatcacaaacctgtgcccttttggcgaggtgttcaacgccaccagattcgccagcgtgtacgcctggaatcggaagagaatctccaactgcgtggccgactattctgtgctgtacaactccgcctctttcagcacctttaagtgctatggcgtgtctcccacaaagctgaatgatctgtgctttaccaacgtgtacgccgatagcttcgtgatcaggggagacgaagtgagacagatcgcaccaggacagacaggaaagatcgcagactacaattataagctgcctgacgatttcaccggctgcgtgatcgcctggaactccaacaatctggattctaaagtgggcggcaactacaattatctgtacaggctgtttcgcaagtccaatctgaagccattcgagcgggacatctccacagagatctaccaggccggctctaccccctgcaatggcgtggagggctttaactgttatttccctctgcagtcttacggcttccagccaacaaacggcgtgggctatcagccctacagagtggtggtgctgtcctttgagctgctgcacgcaccagcaacagtgtgcggcccaaagaagtctaccaatctggtgaagaacaagtgcgtgaacttcaacttcaacggactgaccggcacaggcgtgctgaccgagagcaataagaagttcctgccttttcagcagttcggcagggacatcgcagataccacagacgccgtgcgcgaccctcagaccctggagatcctggacatcacaccatgcagcttcggcggcgtgtccgtgatcacaccaggcaccaatacatccaaccaggtggccgtgctgtatcaggacgtgaattgtaccgaggtgcccgtggcaatccacgcagatcagctgacccctacatggcgggtgtactctaccggcagcaacgtgttccagacaagagccggatgcctgatcggagcagagcacgtgaacaatagctatgagtgcgacatccctatcggcgccggcatctgtgccagctaccagacccagacaaactccccatctggagcaggctccgtggccagccagtccatcatcgcctataccatgagcctgggcgccgagaacagcgtggcctactccaacaattctatcgccatccctaccaacttcacaatcagcgtgaccacagagatcctgccagtgtctatgaccaagacaagcgtggactgcacaatgtatatctgtggcgatagcaccgagtgctccaacctgctgctgcagtacggctccttttgtacccagctgaatagagccctgacaggcatcgccgtggagcaggataagaacacacaggaggtgttcgcccaggtgaagcagatctacaagaccccacccatcaaggactttggcggcttcaacttcagccagatcctgcctgatccaagcaagccctccaagaggtcttttatcgaggacctgctgttcaacaaggtgaccctggccgatgccggcttcatcaagcagtatggagattgcctgggagacatcgcagcccgcgacctgatctgtgcccagaagtttaatggcctgaccgtgctgcctccactgctgacagatgagatgatcgcccagtacacatctgccctgctggccggcaccatcacaagcggatggaccttcggcgcaggagccgccctgcagatcccttttgccatgcagatggcctataggttcaacggcatcggcgtgacccagaatgtgctgtacgagaaccagaagctgatcgccaatcagtttaacagcgccatcggcaagatccaggactctctgtcctctacagccagcgccctgggcaagctgcaggatgtggtgaatcagaacgcccaggccctgaataccctggtgaagcagctgagctccaacttcggcgccatctctagcgtgctgaatgacatcctgagccggctggacccccctgaggcagaggtgcagatcgacaggctgatcacaggccgcctgcagagcctgcagacctacgtgacacagcagctgatcagggcagcagagatcagagcctccgccaatctggccgccaccaagatgagcgagtgcgtgctgggacagtccaagagggtggacttttgtggcaagggctatcacctgatgtctttcccacagagcgcccctcacggcgtggtgtttctgcacgtgacctacgtgccagcccaggagaagaacttcaccacagcaccagccatctgccacgatggaaaggcacactttcctagggagggcgtgttcgtgtctaacggcacccactggtttgtgacacagcgcaatttctacgagccacagatcatcaccacagacaatacattcgtgagcggcaactgtgatgtggtgatcggcatcgtgaacaataccgtgtatgatccactgcagcccgagctggactcctttaaggaggagctggataagtacttcaagaatcacacctctcccgacgtggatctgggcgacatctccggcatcaatgcctctgtggtgaacatccagaaggagatcgaccggctgaacgaggtggccaagaatctgaacgagagcctgatcgatctgcaggagctgggcaagtatgagcagtacatcaagggctctggcagagagaacctgtatttccagggaggaggaggcagcggatacatccctgaggcaccaagggacggacaggcctacgtgcgcaaggatggcgagtgggtgctgctgtccacctttctgggccatcatcaccaccaccaccaccactga

SEQ ID NO: 1223 - DNA, 3846 bp, Artificial Sequence
  Description of Artificial Sequence: Synthetic polynucleotide
atgggcatcctgccaagcccaggaatgcccgccctgctgtctctggtgagcctgctgtccgtgctgctgatgggatgcgtggcagagacaggcacacagtgcgtgaacctgaccacaaggacccagctgccccctgcctataccaattctttcacacggggcgtgtactatcccgacaagatttttagaagctccgtgctgcacctcacacaggatctgtttctgcctttcttttctaacgtgacctggttccacgccatccacgtgtccggcaccaatggcacaaagcggttcgacaatcccgtgctgccttttaacgatggcgtgtacttcgccgcaaccgagaagtccaacatcatcagaggctggatctttggcaccacactggactctaagacacagagcctgctgatcgtgaacaatgccaccaacgtggtgatcaaggtgtgcgagttccagttttgtaatgatccattcctgggcgtgtactatcacaagaacaataagtcctggatggagtctgagtttcgcgtgtattctagcgccaacaattgcacatttgagtacgtgagccagcccttcctgatggacctggagggcaagcagggcaatttcaagaacctgagggagttcgtgtttaagaatatcgatggctacttcaagatctacagcaagcacaccccaatcaacctggtgcgcgacctgccacagggattctccgccctgaaaccactggtgaaactgcccatcggcatcaacatcacccggtttcagacactgctggccctgcacagatcctacctgacaccaggcgactcctctagcggatggaccgcaggagctgccgcctactatgtgggctatctgcagccccggaccttcctgctgaagtacaacgagaatggcaccatcacagacgcagtggattgcgccctggaccccctgtctgagacaaagtgtacactgaagagctttaccgtggagaagggcatctatcagacaagcaatttcagggtgcagcctaccgagtccatcgtgcgctttcccaatatcacaaacctgtgcccttttggcgaggtgttcaacgccaccagattcgccagcgtgtacgcctggaatcggaagagaatctccaactgcgtggccgactattctgtgctgtacaactccgcctctttcagcacctttaagtgctatggcgtgtctcccacaaagctgaatgatctgtgctttaccaacgtgtacgccgatagcttcgtgatcaggggagacgaagtgagacagatcgcaccaggacagacaggaaagatcgcagactacaattataagctgcctgacgatttcaccggctgcgtgatcgcctggaactccaacaatctggattctaaagtgggcggcaactacaattatctgtacaggctgtttcgcaagtccaatctgaagccattcgagcgggacatctccacagagatctaccaggccggctctaccccctgcaatggcgtggagggctttaactgttatttccctctgcagtcttacggcttccagccaacaaacggcgtgggctatcagccctacagagtggtggtgctgtcctttgagctgctgcacgcaccagcaacagtgtgcggcccaaagaagtctaccaatctggtgaagaacaagtgcgtgaacttcaacttcaacggactgaccggcacaggcgtgctgaccgagagcaataagaagttcctgccttttcagcagttcggcagggacatctcggataccacagacgccgtgcgcgaccctcagaccctggagatcctggacatcacaccatgcagcttcggcggcgtgtccgtgatcacaccaggcaccaatacatccaaccaggtggccgtgctgtatcaggacgtgaattgtaccgatgtgcccgtggcaatccacgcagatcagctgacccctacatggcgggtgtactctaccggcagcaacgtgttccagacacaagccggatgcctgatcggagcagagcacgtgaacaatagctatgagtgcgacatccctatcggcgccggcatctgtgccagctaccagacccagacaaactccccatctggagcaggctccgtggccagccagtccatcatcgcctataccatgagcctgggcgccgagaacagcgtggcctactccaacaattctatcgccatccctaccaacttcacaatcagcgtgaccacagagatcctgccagtgtctatgaccaagacaagcgtggactgcacaatgtatatctgtggcgatagcaccgagtgctccaacctgctgctgcagtacggctccttttgtacccagctgaatagagccctgacaggcatcgccgtggagcaggataagaacacacaggaggtgttcgcccaggtgaagcagatctacaagaccccacccatcaaggactttggcggcttcaacttcagccagatcctgcctgatccaagcaagccctccaagaggtcttttatcgaggacctgctgttcaacaaggtgaccctggccgatgccggcttcatcaagcagtatggagattgcctgggagacatcgcagcccgcgacctgatctgtgcccagaagtttaatggcctgaccgtgctgcctccactgctgacagatgagatgatcgccgcgtacacagctgccctgctggccggcaccgctacagctggatggaccttcggcgcaggagccgccctgcagatcccttttgccatgcagatggcctataggttcaacggcatcggcgtgacccagaatgtgctgtacgagaaccagaagctgatcgccaatcagtttaacagcgccatcggcaagatccaggactctctgtcctctacagccagcgccctgggcaagctgcaggatgtggtgaatcagaacgcccaggccctgaataccctggtgaagcagctgagctccaacttcggcgccatctctagcgtgctgaatgacatcctgagccggctggacccccctgaggcagaggtgcagatcgacaggctgatcacaggccgcctgcagagcctgcagacctacgtgacacagcagctgatcagggcagcagagatcagagcctccgccaatctggccgccaccaagatgagcgagtgcgtgctgggacagtccaagagggtggacttttgtggcaagggctatcacctgatgtctttcccacagagcgcccctcacggcgtggtgtttctgcacgtgacctacgtgccagcccaggagaagaacttcaccacagcaccagccatctgccacgatggaaaggcacactttcctagggagggcgtgttcgtgtctaacggcacccactggtttgtgacacagcgcaatttctacgagccacagatcatcaccacagacaatacattcgtgagcggcaactgtgatgtggtgatcggcatcgtgaacaataccgtgtatgatccactgcagcccgagctggactcctttaaggaggagctggataagtacttcaagaatcacacctctcccgacgtggatctgggcgacatctccggcatcaatgcctctgtggtgaacatccagaaggagatcgaccggctgaacgaggtggccaagaatctgaacgagagcctgatcgatctgcaggagctgggcaagtatgagcagtacatcaagggctctggcagagagaacctgtatttccagggaggaggaggcagcggatacatccctgaggcaccaagggacggacaggcctacgtgcgcaaggatggcgagtgggtgctgctgtccacctttctgggccatcatcaccaccaccaccaccactga

SEQ ID NO: 1224 - DNA, 3846 bp, Artificial Sequence
  Description of Artificial Sequence: Synthetic polynucleotide
atgggcatcctgccaagcccaggaatgcccgccctgctgtctctggtgagcctgctgtccgtgctgctgatgggatgcgtggcagagacaggcacacagtgcgtgaacctgaccacaaggacccagctgccccctgcctataccaattctttcacacggggcgtgtactatcccgacaaggtgtttagaagctccgtgctgcactccacacaggatctgtttctgcctttcttttctaacgtgacctggttccacgccatccacgtgtccggcaccaatggcacaaagcggttcgacaatcccgtgctgccttttaacgatggcgtgtacttcgccagcaccgagaagtccaacatcatcagaggctggatctttggcaccacactggactctaagacacagagcctgctgatcgtgaacaatgccaccaacgtggtgatcaaggtgtgcgagttccagttttgtaatgatccattcctgggcgtgtactatcacaagaacaataagtcctggatggagtctgagtttcgcgtgtattctagcgccaacaattgcacatttgagtacgtgagccagcccttcctgatggacctggagggcaagcagggcaatttcaagaacctgagggagttcgtgtttaagaatatcgatggctacttcaagatctacagcaagcacaccccaatcaacctggtgcgcgacctgccacagggattctccgccctggagccactggtggatctgcccatcggcatcaacatcacccggtttcagacactgctggccctgcacagatcctacctgacaccaggcgactcctctagcggatggaccgcaggagctgccgcctactatgtgggctatctgcagccccggaccttcctgctgaagtacaacgagaatggcaccatcacagacgcagtggattgcgccctggaccccctgtctgagacaaagtgtacactgaagagctttaccgtggagaagggcatctatcagacaagcaatttcagggtgcagcctaccgagtccatcgtgcgctttcccaatatcacaaacctgtgcccttttggcgaggtgttcaacgccaccagattcgccagcgtgtacgcctggaatcggaagagaatctccaactgcgtggccgactattctgtgctgtacaactccgcctctttcagcacctttaagtgctatggcgtgtctcccacaaagctgaatgatctgtgctttaccaacgtgtacgccgatagcttcgtgatcaggggagacgaagtgagacagatcgcaccaggacagacaggaaagatcgcagactacaattataagctgcctgacgatttcaccggctgcgtgatcgcctggaactccaacaatctggattctaaagtgggcggcaactacaattatctgtacaggctgtttcgcaagtccaatctgaagccattcgagcgggacatctccacagagatctaccaggccggctctaccccctgcaatggcgtggagggctttaactgttatttccctctgcagtcttacggcttccagccaacaaacggcgtgggctatcagccctacagagtggtggtgctgtcctttgagctgctgcacgcaccagcaacagtgtgcggcccaaagaagtctaccaatctggtgaagaacaagtgcgtgaacttcaacttcaacggactgaccggcacaggcgtgctgaccgagagcaataagaagttcctgccttttcagcagttcggcagggacatcgcagataccacagacgccgtgcgcgaccctcagaccctggagatcctggacatcacaccatgcagcttcggcggcgtgtccgtgatcacaccaggcaccaatacatccaaccaggtggccgtgctgtatcaggacgtgaattgtaccgaggtgcccgtggcaatccacgcagatcagctgacccctacatggcgggtgtactctaccggcagcaacgtgttccagacaagagccggatgcctgatcggagcagagcacgtgaacaatagctatgagtgcgacatccctatcggcgccggcatctgtgccagctaccagacccagacaaactccccatctggagcaggctccgtggccagccagtccatcatcgcctataccatgagcctgggcgccgagaacagcgtggcctactccaacaattctatcgccatccctaccaacttcacaatcagcgtgaccacagagatcctgccagtgtctatgaccaagacaagcgtggactgcacaatgtatatctgtggcgatagcaccgagtgctccaacctgctgctgcagtacggctccttttgtacccagctgaatagagccctgacaggcatcgccgtggagcaggataagaacacacaggaggtgttcgcccaggtgaagcagatctacaagaccccacccatcaaggactttggcggcttcaacttcagccagatcctgcctgatccaagcaagccctccaagaggtcttttatcgaggacctgctgttcaacaaggtgaccctggccgatgccggcttcatcaagcagtatggagattgcctgggagacatcgcagcccgcgacctgatctgtgcccagaagtttaatggcctgaccgtgctgcctccactgctgacagatgagatgatcgcccagtacacatctgccctgctggccggcaccatcacaagcggatggaccttcggcgcaggagccgccctgcagatcccttttgccatgcagatggcctataggttcaacggcatcggcgtgacccagaatgtgctgtacgagaaccagaagctgatcgccaatcagtttaacagcgccatcggcaagatccaggactctctgtcctctacagccagcgccctgggcaagctgcaggatgtggtgaatcagaacgcccaggccctgaataccctggtgaagcagctgagctccaacttcggcgccatctctagcgtgctgaatgacatctatagccggctggacccccctgaggcagaggtgcagatcgacaggctgatcacaggccgcctgcagagcctgcagacctacgtgacacagcagctgatcagggcagcagagatcagagcctccgccaatctggccgccaccaagatgagcgagtgcgtgctgggacagtccaagagggtggacttttgtggcaagggctatcacctgatgtctttcccacagagcgcccctcacggcgtggtgtttctgcacgtgacctacgtgccagcccaggagaagaacttcaccacagcaccagccatctgccacgatggaaaggcacactttcctagggagggcgtgttcgtgtctaacggcacccactggtttgtgacacagcgcaatttctacgagccacagatcatcaccacagacaatacattcgtgagcggcaactgtgatgtggtgatcggcatcgtgaacaataccgtgtatgatccactgcagcccgagctggactcctttaaggaggagctggataagtacttcaagaatcacacctctcccgacgtggatctgggcgacatctccggcatcaatgcctctgtggtgaacatccagaaggagatcgaccggctgaacgaggtggccaagaatctgaacgagagcctgatcgatctgcaggagctgggcaagtatgagcagtacatcaagggctctggcagagagaacctgtatttccagggaggaggaggcagcggatacatccctgaggcaccaagggacggacaggcctacgtgcgcaaggatggcgagtgggtgctgctgtccacctttctgggccatcatcaccaccaccaccaccactga

SEQ ID NO: 1225 - DNA, 3846 bp, Artificial Sequence
  Description of Artificial Sequence: Synthetic polynucleotide
atgggcatcctgccaagcccaggaatgcccgccctgctgtctctggtgagcctgctgtccgtgctgctgatgggatgcgtggcagagacaggcacacagtgcgtgaacctgaccacaaggacccagctgccccctgcctataccaattctttcacacggggcgtgtactatcccgacaaggtgtttagaagctccgtgctgcactccacacaggatctgtttctgcctttcttttctaacgtgacctggttccacgccatccacgtgtccggcaccaatggcacaaagcggttcgacaatcccgtgctgccttttaacgatggcgtgtacttcgccagcaccgagaagtccaacatcatcagaggctggatctttggcaccacactggactctaagacacagagcctgctgatcgtgaacaatgccaccaacgtggtgatcaaggtgtgcgagttccagttttgtaatgatccattcctgggcgtgtactatcacaagaacaataagtcctggatggagtctgagtttcgcgtgtattctagcgccaacaattgcacatttgagtacgtgagccagcccttcctgatggacctggagggcaagcagggcaatttcaagaacctgagggagttcgtgtttaagaatatcgatggctacttcaagatctacagcaagcacaccccaatcaacctggtgcgcgacctgccacagggattctccgccctggagccactggtggatctgcccatcggcatcaacatcacccggtttcagacattcctggccctgcacagatcctacctgacaccaggcgactcctctagcggatggaccgcaggagctgccgcctactatgtgggctatctgcagccccggaccttcctgctgaagtacaacgagaatggcaccatcacagacgcagtggattgcgccctggaccccctgtctgagacaaagtgtacactgaagagctttaccgtggagaagggcatctatcagacaagcaatttcagggtgcagcctaccgagtccatcgtgcgctttcccaatatcacaaacctgtgcccttttggcgaggtgttcaacgccaccagattcgccagcgtgtacgcctggaatcggaagagaatctccaactgcgtggccgactattctgtgctgtacaactccgcctctttcagcacctttaagtgctatggcgtgtctcccacaaagctgaatgatctgtgctttaccaacgtgtacgccgatagcttcgtgatcaggggagacgaagtgagacagatcgcaccaggacagacaggaaagatcgcagactacaattataagctgcctgacgatttcaccggctgcgtgatcgcctggaactccaacaatctggattctaaagtgggcggcaactacaattatctgtacaggctgtttcgcaagtccaatctgaagccattcgagcgggacatctccacagagatctaccaggccggctctaccccctgcaatggcgtggagggctttaactgttatttccctctgcagtcttacggcttccagccaacaaacggcgtgggctatcagccctacagagtggtggtgctgtcctttgagctgctgcacgcaccagcaacagtgtgcggcccaaagaagtctaccaatctggtgaagaacaagtgcgtgaacttcaacttcaacggactgaccggcacaggcgtgctgaccgagagcaataagaagttcctgccttttcagcagttcggcagggacatcgcagataccacagacgccgtgcgcgaccctcagaccctggagatcctggacatcacaccatgcagcttcggcggcgtgtccgtgatcacaccaggcaccaatacatccaaccaggtggccgtgctgtatcaggacgtgaattgtaccgaggtgcccgtggcaatccacgcagatcagctgacccctacatggcgggtgtactctaccggcagcaacgtgttccagacaagagccggatgcctgatcggagcagagcacgtgaacaatagctatgagtgcgacatccctatcggcgccggcatctgtgccagctaccagacccagacaaactccccatctggagcaggctccgtggccagccagtccatcatcgcctataccatgagcctgggcgccgagaacagcgtggcctactccaacaattctatcgccatccctaccaacttcacaatcagcgtgaccacagagatcctgccagtgtctatgaccaagacaagcgtggactgcacaatgtatatctgtggcgatagcaccgagtgctccaacctgctgctgcagtacggctccttttgtacccagctgaatagagccctgacaggcatcgccgtggagcaggataagaacacacaggaggtgttcgcccaggtgaagcagatctacaagaccccacccatcaaggactttggcggcttcaacttcagccagatcctgcctgatccaagcaagccctccaagaggtcttttatcgaggacctgctgttcaacaaggtgaccctggccgatgccggcttcatcaagcagtatggagattgcctgggagacatcgcagcccgcgacctgatctgtgcccagaagtttaatggcctgaccgtgctgcctccactgctgacagatgagatgatcgcccagtacacatctgccctgctggccggcaccatcacaagcggatggaccttcggcgcaggagccgccctgcagatcccttttgccatgcagatggcctataggttcaacggcatcggcgtgacccagaatgtgctgtacgagaaccagaagctgatcgccaatcagtttaacagcgccatcggcaagatccaggactctctgtcctctacagccagcgccctgggcaagctgcaggatgtggtgaatcagaacgcccaggccctgaataccctggtgaagcagctgagctccaacttcggcgccatctctagcgtgctgaatgacatcctgagccggctggacccccctgaggcagaggtgcagatcgacaggctgatcacaggccgcctgcagagcctgcagacctacgtgacacagcagctgatcagggcagcagagatcagagcctccgccaatctggccgccaccaagatgagcgagtgcgtgctgggacagtccaagagggtggacttttgtggcaagggctatcacctgatgtctttcccacagagcgcccctcacggcgtggtgtttctgcacgtgacctacgtgccagcccaggagaagaacttcaccacagcaccagccatctgccacgatggaaaggcacactttcctagggagggcgtgttcgtgtctaacggcacccactggtttgtgacacagcgcaatttctacgagccacagatcatcaccacagacaatacattcgtgagcggcaactgtgatgtggtgatcggcatcgtgaacaataccgtgtatgatccactgcagcccgagctggactcctttaaggaggagctggataagtacttcaagaatcacacctctcccgacgtggatctgggcgacatctccggcatcaatgcctctgtggtgaacatccagaaggagatcgaccggctgaacgaggtggccaagaatctgaacgagagcctgatcgatctgcaggagctgggcaagtatgagcagtacatcaagggctctggcagagagaacctgtatttccagggaggaggaggcagcggatacatccctgaggcaccaagggacggacaggcctacgtgcgcaaggatggcgagtgggtgctgctgtccacctttctgggccatcatcaccaccaccaccaccactga

SEQ ID NO: 1226 - DNA, 3846 bp, Artificial Sequence
  Description of Artificial Sequence: Synthetic polynucleotide
atgggcatcctgccaagcccaggaatgcccgccctgctgtctctggtgagcctgctgtccgtgctgctgatgggatgcgtggcagagacaggcacacagtgcgtgaacctgaccacaaggacccagctgccccctgcctataccaattctttcacacggggcgtgtactatcccgacaaggtgtttagaagctccgtgctgcactccacacaggatctgtttctgcctttcttttctaacgtgacctggttccacgccatccacgtgtccggcaccaatggcacaaagcggttcgacaatcccgtgctgccttttaacgatggcgtgtacttcgccagcaccgagaagtccaacatcatcagaggctggatctttggcaccacactggactctaagacacagagcctgctgatcgtgaacaatgccaccaacgtggtgatcaaggtgtgcgagttccagttttgtaatgatccattcctgggcgtgtactatcacaagaacaataagtcctggatggagtctgagtttcgcgtgtattctagcgccaacaattgcacatttgagtacgtgagccagcccttcctgatggacctggagggcaagcagggcaatttcaagaacctgagggagttcgtgtttaagaatatcgatggctacttcaagatctacagcaagcacaccccaatcaacctggtgcgcgacctgccacagggattctccgccctggagccactggtggatctgcccatcggcatcaacatcacccggtttcagacactgctggccctgcacagatcctacctgacaccaggcgactcctctagcggatggaccgcaggagctgccgcctactatgtgggctatctgcagccccggaccttcctgctgaagtacaacgagaatggcaccatcacagacgcagtggattgcgccctggaccccctgtctgagacaaagtgtacactgaagagctttaccgtggagaagggcatctatcagacaagcaatttcagggtgcagcctaccgagtccatcgtgcgctttcccaatatcacaaacctgtgcccttttggcgaggtgttcaacgccaccagattcgccagcgtgtacgcctggaatcggaagagaatctccaactgcgtggccgactattctgtgctgtacaactccgcctctttcagcacctttaagtgctatggcgtgtctcccacaaagctgaatgatctgtgctttaccaacgtgtacgccgatagcttcgtgatcaggggagacgaagtgagacagatcgcaccaggacagacaggaaagatcgcagactacaattataagctgcctgacgatttcaccggctgcgtgatcgcctggaactccaacaatctggattctaaagtgggcggcaactacaattatctgtacaggctgtttcgcaagtccaatctgaagccattcgagcgggacatctccacagagatctaccaggccggctctaccccctgcaatggcgtggagggctttaactgttatttccctctgcagtcttacggcttccagccaacaaacggcgtgggctatcagccctacagagtggtggtgctgtcctttgagctgctgcacgcaccagcaacagtgtgcggcccaaagaagtctaccaatctggtgaagaacaagtgcgtgaacttcaacttcaacggactgaccggcacaggcgtgctgaccgagagcaataagaagttcctgccttttcagcagttcggcagggacatcgcagataccacagacgccgtgcgcgaccctcagaccctggagatcctggacatcacaccatgcagcttcggcggcgtgtccgtgatcacaccaggcaccaatacatccaaccaggtggccgtgctgtatcaggacgtgaattgtaccgaggtgcccgtggcaatccacgcagatcagctgacccctacatggcgggtgtactctaccggcagcaacgtgttccagacaagagccggatgcctgatcggagcagagcacgtgaacaatagctatgagtgcgacatccctatcggcgccggcatctgtgccagctaccagacccagacaaactccccatctggagcaggctccgtggccagccagtccatcatcgcctataccatgagcctgggcgccgagaacagcgtggcctactccaacaattctatcgccatccctaccaacttcacaatcagcgtgaccacagagatcctgccagtgtctatgaccaagacaagcgtggactgcacaatgtatatctgtggcgatagcaccgagtgctccaacctgctgctgcagtacggctccttttgtacccagctgaatagagccctgacaggcatcgccgtggagcaggataagaacacacaggaggtgttcgcccaggtgaagcagatctacaagaccccacccatcaaggactttggcggcttcaacttcagccagatcctgcctgatccaagcaagccctccaagaggtcttttatcgaggacctgctgttcaacaaggtgaccctggccgatgccggcttcatcaagcagtatggagattgcctgggagacatcgcagcccgcgacctgatctgtgcccagaagtttaatggcctgaccgtgctgcctccactgctgacagatgagatgatcgcccagtacacatctgccctgctggccggcaccatcacaagcggatggaccttcggcgcaggagccgccctggtaatcccttttgccatgcagatggcctataggttcaacggcatcggcgtgacccagaatgtgctgtacgagaaccagaagctgatcgccaatcagtttaacagcgccatcggcaagatccaggactctctgtcctctacagccagcgccctgggcaagctgcaggatgtggtgaatcagaacgcccaggccctgaataccctggtgaagcagctgagctccaacttcggcgccatctctagcgtgctgaatgacatcctgagccggctggacccccctgaggcagaggtgcagatcgacaggctgatcacaggccgcctgcagagcctgcagacctacgtgacacagcagctgatcagggcagcagagatcagagcctccgccaatctggccgccaccaagatgagcgagtgcgtgctgggacagtccaagagggtggacttttgtggcaagggctatcacctgatgtctttcccacagagcgcccctcacggcgtggtgtttctgcacgtgacctacgtgccagcccaggagaagaacttcaccacagcaccagccatctgccacgatggaaaggcacactttcctagggagggcgtgttcgtgtctaacggcacccactggtttgtgacacagcgcaatttctacgagccacagatcatcaccacagacaatacattcgtgagcggcaactgtgatgtggtgatcggcatcgtgaacaataccgtgtatgatccactgcagcccgagctggactcctttaaggaggagctggataagtacttcaagaatcacacctctcccgacgtggatctgggcgacatctccggcatcaatgcctctgtggtgaacatccagaaggagatcgaccggctgaacgaggtggccaagaatctgaacgagagcctgatcgatctgcaggagctgggcaagtatgagcagtacatcaagggctctggcagagagaacctgtatttccagggaggaggaggcagcggatacatccctgaggcaccaagggacggacaggcctacgtgcgcaaggatggcgagtgggtgctgctgtccacctttctgggccatcatcaccaccaccaccaccactga

SEQ ID NO: 1227 - DNA, 3846 bp, Artificial Sequence
  Description of Artificial Sequence: Synthetic polynucleotide
atgggcatcctgccaagcccaggaatgcccgccctgctgtctctggtgagcctgctgtccgtgctgctgatgggatgcgtggcagagacaggcacacagtgcgtgaacctgaccacaaggacccagctgccccctgcctataccaattctttcacacggggcgtgtactatcccgacaaggtgtttagaagctccgtgctgcactccacacaggatctgtttctgcctttcttttctaacgtgacctggttccacgccatccacgtgtccggcaccaatggcacaaagcggttcgacaatcccgtgctgccttttaacgatggcgtgtacttcgccagcaccgagaagtccaacatcatcagaggctggatctttggcaccacactggactctaagacacagagcctgctgatcgtgaacaatgccaccaacgtggtgatcaaggtgtgcgagttccagttttgtaatgatccattcctgggcgtgtactatcacaagaacaataagtcctggatggagtctgagtttcgcgtgtattctagcgccaacaattgcacatttgagtacgtgagccagcccttcctgatggacctggagggcaagcagggcaatttcaagaacctgagggagttcgtgtttaagaatatcgatggctacttcaagatctacagcaagcacaccccaatcaacctggtgcgcgacctgccacagggattctccgccctggagccactggtggatctgcccatcggcatcaacatcacccggtttcagacactgctggccctgcacagatcctacctgacaccaggcgactcctctagcggatggaccgcaggagctgccgcctactatgtgggctatctgcagccccggaccttcctgctgaagtacaacgagaatggcaccatcacagacgcagtggattgcgccctggaccccctgtctgagacaaagtgtacactgaagagctttaccgtggagaagggcatctatcagacaagcaatttcagggtgcagcctaccgagtccatcgtgcgctttcccaatatcacaaacctgtgcccttttggcgaggtgttcaacgccaccagattcgccagcgtgtacgcctggaatcggaagagaatctccaactgcgtggccgactattctgtgctgtacaactccgcctctttcagcacctttaagtgctatggcgtgtctcccacaaagctgaatgatctgtgctttaccaacgtgtacgccgatagcttcgtgatcaggggagacgaagtgagacagatcgcaccaggacagacaggaaagatcgcagactacaattataagctgcctgacgatttcaccggctgcgtgatcgcctggaactccaacaatctggattctaaagtgggcggcaactacaattatctgtacaggctgtttcgcaagtccaatctgaagccattcgagcgggacatctccacagagatctaccaggccggctctaccccctgcaatggcgtggagggctttaactgttatttccctctgcagtcttacggcttccagccaacaaacggcgtgggctatcagccctacagagtggtggtgctgtcctttgagctgctgcacgcaccagcaacagtgtgcggcccaaagaagtctaccaatctggtgaagaacaagtgcgtgaacttcaacttcaacggactgaccggcacaggcgtgctgaccgagagcaataagaagttcctgccttttcagcagttcggcagggacatcgcagataccacagacgccgtgcgcgaccctcagaccctggagatcctggacatcacaccatgcagcttcggcggcgtgtccgtgatcacaccaggcaccaatacatccaaccaggtggccgtgctgtatcaggacgtgaattgtaccgaggtgcccgtggcaatccacgcagatcagctgacccctacatggcgggtgtactctaccggcagcaacgtgttccagacaagagccggatgcctgatcggagcagagcacgtgaacaatagctatgagtgcgacatccctatcggcgccggcatctgtgccagctaccagacccagacaaactccccatctggagcaggctccgtggccagccagtccatcatcgcctataccatgagcctgggcgccgagaacagcgtggcctactccaacaattctatcgccatccctaccaacttcacaatcagcgtgaccacagagatcctgccagtgtctatgaccaagacaagcgtggactgcacaatgtatatctgtggcgatagcaccgagtgctccaacctgctgctgcagtacggctccttttgtacccagctgaatagagccctgacaggcatcgccgtggagcaggataagaacacacaggaggtgttcgcccaggtgaagcagatctacaagaccccacccatcaaggactttggcggcttcaacttcagccagatcctgcctgatccaagcaagccctccaagaggtcttttatcgaggacctgctgttcaacaaggtgaccctggccgatgccggcttcatcaagcagtatggagattgcctgggagacatcgcagcccgcgacctgatctgtgcccagaagtttaatggcctgaccgtgctgcctccactgctgacagatgagatgatcgcccagtacacatctgccctgctggccggcaccatcacaagcggatggaccttcggcgcaggagccgccctgcagatcccttttgccatgcagatggcctataggttcaacggcatcggcgtgacccagaatgtgctgtacgagaaccagaagctgatcgccaatcagtttaacagcgccatcggcaagatccaggactctctgtcctctacagccaatgccctgggcaagctgcaggatgtggtgaatcagaacgcccaggccctgaataccctggtgaagcagctgagctccaacttcggcgccatctctagcgtgctgaatgacatcctgagccggctggacccccctgaggcagaggtgcagatcgacaggctgatcacaggccgcctgcagagcctgcagacctacgtgacacagcagctgatcagggcagcagagatcagagcctccgccaatctggccgccaccaagatgagcgagtgcgtgctgggacagtccaagagggtggacttttgtggcaagggctatcacctgatgtctttcccacagagcgcccctcacggcgtggtgtttctgcacgtgacctacgtgccagcccaggagaagaacttcaccacagcaccagccatctgccacgatggaaaggcacactttcctagggagggcgtgttcgtgtctaacggcacccactggtttgtgacacagcgcaatttctacgagccacagatcatcaccacagacaatacattcgtgagcggcaactgtgatgtggtgatcggcatcgtgaacaataccgtgtatgatccactgcagcccgagctggactcctttaaggaggagctggataagtacttcaagaatcacacctctcccgacgtggatctgggcgacatctccggcatcaatgcctctgtggtgaacatccagaaggagatcgaccggctgaacgaggtggccaagaatctgaacgagagcctgatcgatctgcaggagctgggcaagtatgagcagtacatcaagggctctggcagagagaacctgtatttccagggaggaggaggcagcggatacatccctgaggcaccaagggacggacaggcctacgtgcgcaaggatggcgagtgggtgctgctgtccacctttctgggccatcatcaccaccaccaccaccactga

SEQ ID NO: 1228 - DNA, 3846 bp, Artificial Sequence
  Description of Artificial Sequence: Synthetic polynucleotide
atgggcatcctgccaagcccaggaatgcccgccctgctgtctctggtgagcctgctgtccgtgctgctgatgggatgcgtggcagagacaggcacacagtgcgtgaacctgaccacaaggacccagctgccccctgcctataccaattctttcacacggggcgtgtactatcccgacaaggtgtttagaagctccgtgctgcactccacacaggatctgtttctgcctttcttttctaacgtgacctggttccacgccatccacgtgtccggcaccaatggcacaaagcggttcgacaatcccgtgctgccttttaacgatggcgtgtacttcgccagcaccgagaagtccaacatcatcagaggctggatctttggcaccacactggactctaagacacagagcctgctgatcgtgaacaatgccaccaacgtggtgatcaaggtgtgcgagttccagttttgtaatgatccattcctgggcgtgtactatcacaagaacaataagtcctggatggagtctgagtttcgcgtgtattctagcgccaacaattgcacatttgagtacgtgagccagcccttcctgatggacctgaatggcaagcagggcaatttcaagaacctgagggagttcgtgtttaagaatatcgatggctacttcaagatctacagcaagcacaccccaatcaacctggtgcgcgacctgccacagggattctccgccctggagccactggtggatctgcccatcggcatcaacatcacccggtttcagacactgctggccctgcacagatcctacctgacaccaggcgactcctctagcggatggaccgcaggagctgccgcctactatgtgggctatctgcagccccggaccttcctgctgaagtacaacgagaatggcaccatcacagacgcagtggattgcgccctggaccccctgtctgagacaaagtgtacactgaagagctttaccgtggagaagggcatctatcagacaagcaatttcagggtgcagcctaccgagtccatcgtgcgctttcccaatatcacaaacctgtgcccttttggcgaggtgttcaacgccaccagattcgccagcgtgtacgcctggaatcggaagagaatctccaactgcgtggccgactattctgtgctgtacaactccgcctctttcagcacctttaagtgctatggcgtgtctcccacaaagctgaatgatctgtgctttaccaacgtgtacgccgatagcttcgtgatcaggggagacgaagtgagacagatcgcaccaggacagacaggaaagatcgcagactacaattataagctgcctgacgatttcaccggctgcgtgatcgcctggaactccaacaatctggattctaaagtgggcggcaactacaattatctgtacaggctgtttcgcaagtccaatctgaagccattcgagcgggacatctccacagagatctaccaggccggctctaccccctgcaatggcgtggagggctttaactgttatttccctctgcagtcttacggcttccagccaacaaacggcgtgggctatcagccctacagagtggtggtgctgtcctttgagctgctgcacgcaccagcaacagtgtgcggcccaaagaagtctaccaatctggtgaagaacaagtgcgtgaacttcaacttcaacggactgaccggcacaggcgtgctgaccgagagcaataagaagttcctgccttttcagcagttcggcagggacatcgcagataccacagacgccgtgcgcgaccctcagaccctggagatcctggacatcacaccatgcagcttcggcggcgtgtccgtgatcacaccaggcaccaatacatccaaccaggtggccgtgctgtatcaggacgtgaattgtaccgaggtgcccgtggcaatccacgcagatcagctgacccctacatggcgggtgtactctaccggcagcaacgtgttccagacaagagccggatgcctgatcggagcagagcacgtgaacaatagctatgagtgcgacatccctatcggcgccggcatctgtgccagctaccagacccagacaaactccccatctggagcaggctccgtggccagccagtccatcatcgcctataccatgagcctgggcgccgagaacagcgtggcctactccaacaattctatcgccatccctaccaacttcacaatcagcgtgaccacagagatcctgccagtgtctatgaccaagacaagcgtggactgcacaatgtatatctgtggcgatagcaccgagtgctccaacctgctgctgcagtacggctccttttgtacccagctgaatagagccctgacaggcatcgccgtggagcaggataagaacacacaggaggtgttcgcccaggtgaagcagatctacaagaccccacccatcaaggactttggcggcttcaacttcagccagatcctgcctgatccaagcaagccctccaagaggtcttttatcgaggacctgctgttcaacaaggtgaccctggccgatgccggcttcatcaagcagtatggagattgcctgggagacatcgcagcccgcgacctgatctgtgcccagaagtttaatggcctgaccgtgctgcctccactgctgacagatgagatgatcgcccagtacacatctgccctgctggccggcaccatcacaagcggatggaccttcggcgcaggagccgccctgcagatcccttttgccatgcagatggcctataggttcaacggcatcggcgtgacccagaatgtgctgtacgagaaccagaagctgatcgccaatcagtttaacagcgccatcggcaagatccaggactctctgtcctctacagccagcgccctgggcaagctgcaggatgtggtgaatcagaacgcccaggccctgaataccctggtgaagcagctgagctccaacttcggcgccatctctagcgtgctgaatgacatcctgagccggctggacccccctgaggcagaggtgcagatcgacaggctgatcacaggccgcctgcagagcctgcagacctacgtgacacagcagctgatcagggcagcagagatcagagcctccgccaatctggccgccaccaagatgagcgagtgcgtgctgggacagtccaagagggtggacttttgtggcaagggctatcacctgatgtctttcccacagagcgcccctcacggcgtggtgtttctgcacgtgacctacgtgccagcccaggagaagaacttcaccacagcaccagccatctgccacgatggaaaggcacactttcctagggagggcgtgttcgtgtctaacggcacccactggtttgtgacacagcgcaatttctacgagccacagatcatcaccacagacaatacattcgtgagcggcaactgtgatgtggtgatcggcatcgtgaacaataccgtgtatgatccactgcagcccgagctggactcctttaaggaggagctggataagtacttcaagaatcacacctctcccgacgtggatctgggcgacatctccggcatcaatgcctctgtggtgaacatccagaaggagatcgaccggctgaacgaggtggccaagaatctgaacgagagcctgatcgatctgcaggagctgggcaagtatgagcagtacatcaagggctctggcagagagaacctgtatttccagggaggaggaggcagcggatacatccctgaggcaccaagggacggacaggcctacgtgcgcaaggatggcgagtgggtgctgctgtccacctttctgggccatcatcaccaccaccaccaccactga

SEQ ID NO: 1229 - DNA, 3846 bp, Artificial Sequence
  Description of Artificial Sequence: Synthetic polynucleotide
atgggcatcctgccaagcccaggaatgcccgccctgctgtctctggtgagcctgctgtccgtgctgctgatgggatgcgtggcagagacaggcacacagtgcgtgaacctgaccacaaggacccagctgccccctgcctataccaattctttcacacggggcgtgtactatcccgacaaggtgtttagaagctccgtgctgcactccacacaggatctgtttctgcctttcttttctaacgtgacctggttccacgccatccacgtgtccggcaccaatggcacaaagcggttcgacaatcccgtgctgccttttaacgatggcgtgtacttcgccagcaccgagaagtccaacatcatcagaggctggatctttggcaccacactggactctaagacacagagcctgctgatcgtgaacaatgccaccaacgtggtgatcaaggtgtgcgagttccagttttgtaatgatccattcctgggcgtgtactatcacaagaacaataagtcctggatggagtctgagtttcgcgtgtattctagcgccaacaattgcacatttgagtacgtgagccagcccttcctgatggacctggagggcaagcagggcaatttcaagaacctgagggagttcgtgtttaagaatatcgatggctacttcaagatctacagcaagcacaccccaatcaacctggtgcgcgacctgccacagggattctccgccctggagccactggtggatctgcccatcggcatcaacatcacccggtttcagacactgctggccctgcacagatcctacctgacaccaggcgactcctctagcggatggaccgcaggagctgccgcctactatgtgggctatctgcagccccggaccttcctgctgaagtacaacgagaatggcaccatcacagacgcagtggattgcgccctggaccccctgtctgagacaaagtgtacactgaagagctttaccgtggagaagggcatctatcagacaagcaatttcagggtgcagcctaccgagtccatcgtgcgctttcccaatatcacaaacctgtgcccttttggcgaggtgttcaacgccaccagattcgccagcgtgtacgcctggaatcggaagagaatctccaactgcgtggccgactattctgtgctgtacaactccgcctctttcagcacctttaagtgctatggcgtgtctcccacaaagctgaatgatctgtgctttaccaacgtgtacgccgatagcttcgtgatcaggggagacgaagtgagacagatcgcaccaggacagacaggaaagatcgcagactacaattataagctgcctgacgatttcaccggctgcgtgatcgcctggaactccaacaatctggattctaaagtgggcggcaactacaattatctgtacaggctgtttcgcaagtccaatctgaagccattcgagcgggacatctccacagagatctaccaggccggctctaccccctgcaatggcgtggagggctttaactgttatttccctctgcagtcttacggcttccagccaacaaacggcgtgggctatcagccctacagagtggtggtgctgtcctttgagctgctgcacgcaccagcaacagtgtgcggcccaaagaagtctaccaatctggtgaagaacaagtgcgtgaacttcaacttcaacggactgaccggcacaggcgtgctgaccgagagcaataagaagttcctgccttttcagcagttcggcagggacatcgcagataccacagacgccgtgcgcgaccctcagaccctggagatcctggacatcacaccatgcagcttcggcggcgtgtccgtgatcacaccaggcaccaatacatccaacgaagtggccgtgctgtatcaggacgtgaattgtaccgaggtgcccgtggcaatccacgcagatcagctgacccctacatggcgggtgtactctaccggcagcaacgtgttccagacaagagccggatgcctgatcggagcagagcacgtgaacaatagctatgagtgcgacatccctatcggcgccggcatctgtgccagctaccagacccagacaaactccccatctggagcaggctccgtggccagccagtccatcatcgcctataccatgagcctgggcgccgagaacagcgtggcctactccaacaattctatcgccatccctaccaacttcacaatcagcgtgaccacagagatcctgccagtgtctatgaccaagacaagcgtggactgcacaatgtatatctgtggcgatagcaccgagtgctccaacctgctgctgcagtacggctccttttgtacccagctgaatagagccctgacaggcatcgccgtggagcaggataagaacacacaggaggtgttcgcccaggtgaagcagatctacaagaccccacccatcaaggactttggcggcttcaacttcagccagatcctgcctgatccaagcaagccctccaagaggtcttttatcgaggacctgctgttcaacaaggtgaccctggccgatgccggcttcatcaagcagtatggagattgcctgggagacatcgcagcccgcgacctgatctgtgcccagaagtttaatggcctgaccgtgctgcctccactgctgacagatgagatgatcgcccagtacacatctgccctgctggccggcaccatcacaagcggatggaccttcggcgcaggagccgccctgcagatcccttttgccatgcagatggcctataggttcaacggcatcggcgtgacccagaatgtgctgtacgagaaccagaagctgatcgccaatcagtttaacagcgccatcggcaagatccaggactctctgtcctctacagccagcgccctgggcaagctgcaggatgtggtgaatcagaacgcccaggccctgaataccctggtgaagcagctgagctccaacttcggcgccatctctagcgtgctgaatgacatcctgagccggctggacccccctgaggcagaggtgcagatcgacaggctgatcacaggccgcctgcagagcctgcagacctacgtgacacagcagctgatcagggcagcagagatcagagcctccgccaatctggccgccaccaagatgagcgagtgcgtgctgggacagtccaagagggtggacttttgtggcaagggctatcacctgatgtctttcccacagagcgcccctcacggcgtggtgtttctgcacgtgacctacgtgccagcccaggagaagaacttcaccacagcaccagccatctgccacgatggaaaggcacactttcctagggagggcgtgttcgtgtctaacggcacccactggtttgtgacacagcgcaatttctacgagccacagatcatcaccacagacaatacattcgtgagcggcaactgtgatgtggtgatcggcatcgtgaacaataccgtgtatgatccactgcagcccgagctggactcctttaaggaggagctggataagtacttcaagaatcacacctctcccgacgtggatctgggcgacatctccggcatcaatgcctctgtggtgaacatccagaaggagatcgaccggctgaacgaggtggccaagaatctgaacgagagcctgatcgatctgcaggagctgggcaagtatgagcagtacatcaagggctctggcagagagaacctgtatttccagggaggaggaggcagcggatacatccctgaggcaccaagggacggacaggcctacgtgcgcaaggatggcgagtgggtgctgctgtccacctttctgggccatcatcaccaccaccaccaccactga

SEQ ID NO: 1230 - DNA, 3846 bp, Artificial Sequence
  Description of Artificial Sequence: Synthetic polynucleotide
atgggcatcctgccaagcccaggaatgcccgccctgctgtctctggtgagcctgctgtccgtgctgctgatgggatgcgtggcagagacaggcacacagtgcgtgaacctgaccacaaggacccagctgccccctgcctataccaattctttcacacggggcgtgtactatcccgacaaggtgtttagaagctccgtgctgcactccacacaggatctgtttctgcctttcttttctaacgtgacctggttccacgccatccacgtgtccggcaccaatggcacaaagcggttcgacaatcccgtgctgccttttaacgatggcgtgtacttcgccagcaccgagaagtccaacatcatcagaggctggatctttggcaccacactggactctaagacacagagcctgctgatcgtgaacaatgccaccaacgtggtgatcaaggtgtgcgagttccagttttgtaatgatccattcctgggcgtgtactatcacaagaacaataagtcctggatggagtctgagtttcgcgtgtattctagcgccaacaattgcacatttgagtacgtgagccagcccttcctgatggacctggagggcaagcagggcaatttcaagaacctgagggagttcgtgtttaagaatatcgatggctacttcaagatctacagcaagcacaccccaatcaacctggtgcgcgacctgccacagggattctccgccctggagccactggtggatctgcccatcggcatcaacatcacccggtttcagacactgctggccctgcacagatcctacctgacaccaggcgactcctctagcggatggaccgcaggagctgccgcctactatgtgggctatctgcagccccggaccttcctgctgaagtacaacgagaatggcaccatcacagacgcagtggattgctcgctggaccccctgtctgagacaaagtgtaaactgaagagctttaccgtggagaagggcatctatcagacaagcaatttcagggtgcagcctaccgagtccatcgtgcgctttcccaatatcacaaacctgtgcccttttggcgaggtgttcaacgccaccagattcgccagcgtgtacgcctggaatcggaagagaatctccaactgcgtggccgactattctgtgctgtacaactccgcctctttcagcacctttaagtgctatggcgtgtctcccacaaagctgaatgatctgtgctttaccaacgtgtacgccgatagcttcgtgatcaggggagacgaagtgagacagatcgcaccaggacagacaggaaagatcgcagactacaattataagctgcctgacgatttcaccggctgcgtgatcgcctggaactccaacaatctggattctaaagtgggcggcaactacaattatctgtacaggctgtttcgcaagtccaatctgaagccattcgagcgggacatctccacagagatctaccaggccggctctaccccctgcaatggcgtggagggctttaactgttatttccctctgcagtcttacggcttccagccaacaaacggcgtgggctatcagccctacagagtggtggtgctgtcctttgagctgctgcacgcaccagcaacagtgtgcggcccaaagaagtctaccaatctggtgaagaacaagtgcgtgaacttcaacttcaacggactgaccggcacaggcgtgctgaccgagagcaataagaagttcctgccttttcagcagttcggcagggacatcgcagataccacagacgccgtgcgcgaccctcagaccctggagatcctggacatcacaccatgcagcttcggcggcgtgtccgtgatcacaccaggcaccaatacatccaaccaggtggccgtgctgtatcaggacgtgaattgtaccgaggtgcccgaagcaatccacagtaatcagctgcgccctacatggcgggtgtactctaccggcagcaacgtgttccagacaagagccggatgcctgatcggagcagagcacgtgaacaatagctatgagtgcgacatccctatcggcaacggcatctgtgccagctaccagacccagacaaactccccatctggatcaggctccgtgtcaagccagtccatcatcgcctataccatgagcctgggcgccgagaacagcgtggcctactccaacaattctatcgccatccctaccaacttcacaatcagcgtgaccacagagatcctgccagtgtctatgaccaagacaagcgtggactgcacaatgtatatctgtggcgatagcaccgagtgctccaacctgctgctgcagtacggctccttttgtacccagctgaatagagccctgacaggcatcgccgtggagcaggataagaacacacaggaggtgttcgcccaggtgaagcagatctacaagaccccacccatcaaggactttggcggcttcaacttcagccagatcctgcctgatccaagcaagccctccaagaggtcttttatcgaggacctgctgttcaacaaggtgaccctggccgatgccggcttcatcaagcagtatggagattgcctgggagacatcgcagcccgcgacctgatctgtgcccagaagtttaatggcctgaccgtgctgcctccactgctgacagatgagatgatcgcccagtacacatctgccctgctggccggcaccatcacaagcggatggaccttcggcgcaggagccgccctgcagatcccttttgccatgcagatggcctataggttcaacggcatcggcgtgacccagaatgtgctgtacgagaaccagaagctgatcgccaatcagtttaacagcgccatcggcaagatccaggactctctgtcctctacagccagcgccctgggcaagctgcaggatgtggtgaatcagaacgcccaggccctgaataccctggtgaagcagctgagctccaacttcggcgccatctctagcgtgctgaatgacatcctgagccggctggacccccctgaggcagaggtgcagatcgacaggctgatcacaggccgcctgcagagcctgcagacctacgtgacacagcagctgatcagggcagcagagatcagagcctccgccaatctggccgccaccaagatgagcgagtgcgtgctgggacagtccaagagggtggacttttgtggcaagggctatcacctgatgtctttcccacagagcgcccctcacggcgtggtgtttctgcacgtgacctacgtgccagcccaggagaagaacttcaccacagcaccagccatctgccacgatggaaaggcacactttcctagggagggcgtgttcgtgtctaacggcacccactggtttgtgacacagcgcaatttctacgagccacagatcatcaccacagacaatacattcgtgagcggcaactgtgatgtggtgatcggcatcgtgaacaataccgtgtatgatccactgcagcccgagctggactcctttaaggaggagctggataagtacttcaagaatcacacctctcccgacgtggatctgggcgacatctccggcatcaatgcctctgtggtgaacatccagaaggagatcgaccggctgaacgaggtggccaagaatctgaacgagagcctgatcgatctgcaggagctgggcaagtatgagcagtacatcaagggctctggcagagagaacctgtatttccagggaggaggaggcagcggatacatccctgaggcaccaagggacggacaggcctacgtgcgcaaggatggcgagtgggtgctgctgtccacctttctgggccatcatcaccaccaccaccaccactga

SEQ ID NO: 1231 - DNA, 3846 bp, Artificial Sequence
  Description of Artificial Sequence: Synthetic polynucleotide
atgggcatcctgccaagcccaggaatgcccgccctgctgtctctggtgagcctgctgtccgtgctgctgatgggatgcgtggcagagacaggcacacagtgcgtgaacctgaccacaaggacccagctgccccctgcctataccaattctttcacacggggcgtgtactatcccgacaaggtgtttagaagctccgtgctgcactccacacaggatctgtttctgcctttcttttctaacgtgacctggttccacgccatccacgtgtccggcaccaatggcacaaagcggttcgacaatcccgtgctgccttttaacgatggcgtgtacttcgccagcaccgagaagtccaacatcatcagaggctggatctttggcaccacactggactctaagacacagagcctgctgatcgtgaacaatgccaccaacgtggtgatcaaggtgtgcgagttccagttttgtaatgatccattcctgggcgtgtactatcacaagaacaataagtcctggatggagtctgagtttcgcgtgtattctagcgccaacaattgcacatttgagtacgtgagccagcccttcgaaatggacctggagggcaagcagggcaatttcaagaacctgagggagttcgtgtttaagaatatcgatggctacttcaagatctacagcaagcacaccccaatcaacctggtgcgcgacctgccacagggattctccgccctggagccactggtggatctgcccatcggcatcaacatcacccggtttcagacactgctggccctgcacagatcctacctgacaccaggcgactcctctagcggatggaccgcaggagctgccgcctactatgtgggctatctgcagccccggaccttcctgctgaagtacaacgagaatggcaccatcacagacgcagtggattgcgccctggaccccctgtctgagacaaagtgtacactgaagagctttaccgtggagaagggcatctatcagacaagcaatttcagggtgcagcctaccgagtccatcgtgcgctttcccaatatcacaaacctgtgcccttttggcgaggtgttcaacgccaccagattcgccagcgtgtacgcctggaatcggaagagaatctccaactgcgtggccgactattctgtgctgtacaactccgcctctttcagcacctttaagtgctatggcgtgtctcccacaaagctgaatgatctgtgctttaccaacgtgtacgccgatagcttcgtgatcaggggagacgaagtgagacagatcgcaccaggacagacaggaaagatcgcagactacaattataagctgcctgacgatttcaccggctgcgtgatcgcctggaactccaacaatctggattctaaagtgggcggcaactacaattatctgtacaggctgtttcgcaagtccaatctgaagccattcgagcgggacatctccacagagatctaccaggccggctctaccccctgcaatggcgtggagggctttaactgttatttccctctgcagtcttacggcttccagccaacaaacggcgtgggctatcagccctacagagtggtggtgctgtcctttgagctgctgcacgcaccagcaacagtgtgcggcccaaagaagtctaccaatctggtgaagaacaagtgcgtgaacttcaacttcaacggactgaccggcacaggcgtgctgaccgagagcaataagaagttcctgccttttcagcagttcggcagggacatcgcagataccacagacgccgtgcgcgaccctcagaccctggagatcctggacatcacaccatgcagcttcggcggcgtgtccgtgatcacaccaggcaccaatacatccaaccaggtggccgtgctgtatcaggacgtgaattgtaccgaggtgcccgtggcaatccacgcagatcagctgacccctacatggcgggtgtactctaccggcagcaacgtgttccagacaagagccggatgcctgatcggagcagagcacgtgaacaatagctatgagtgcgacatccctatcggcgccggcatctgtgccagctaccagacccagacaaactccccatctggagcaggctccgtggccagccagtccatcatcgcctataccatgagcctgggcgccgagaacagcgtggcctactccaacaattctatcgccatccctaccaacttcacaatcagcgtgaccacagagatcctgccagtgtctatgaccaagacaagcgtggactgcacaatgtatatctgtggcgatagcaccgagtgctccaacctgctgctgcagtacggctccttttgtacccagctgaatagagccctgacaggcatcgccgtggagcaggataagaacacacaggaggtgttcgcccaggtgaagcagatctacaagaccccacccatcaaggactttggcggcttcaacttcagccagatcctgcctgatccaagcaagccctccaagaggtcttttatcgaggacctgctgttcaacaaggtgaccctggccgatgccggcttcatcaagcagtatggagattgcctgggagacatcgcagcccgcgacctgatctgtgcccagaagtttaatggcctgaccgtgctgcctccactgctgacagatgagatgatcgcccagtacacatctgccctgctggccggcaccatcacaagcggatggaccttcggcgcaggagccgccctgcagatcccttttgccatgcagatggcctataggttcaacggcatcggcgtgacccagaatgtgctgtacgagaaccagaagctgatcgccaatcagtttaacagcgccatcggcaagatccaggactctctgtcctctacagccagcgccctgggcaagctgcaggatgtggtgaatcagaacgcccaggccctgaataccctggtgaagcagctgagctccaacttcggcgccatctctagcgtgctgaatgacatcctgagccggctggacccccctgaggcagaggtgcagatcgacaggctgatcacaggccgcctgcagagcctgcagacctacgtgacacagcagctgatcagggcagcagagatcagagcctccgccaatctggccgccaccaagatgagcgagtgcgtgctgggacagtccaagagggtggacttttgtggcaagggctatcacctgatgtctttcccacagagcgcccctcacggcgtggtgtttctgcacgtgacctacgtgccagcccaggagaagaacttcaccacagcaccagccatctgccacgatggaaaggcacactttcctagggagggcgtgttcgtgtctaacggcacccactggtttgtgacacagcgcaatttctacgagccacagatcatcaccacagacaatacattcgtgagcggcaactgtgatgtggtgatcggcatcgtgaacaataccgtgtatgatccactgcagcccgagctggactcctttaaggaggagctggataagtacttcaagaatcacacctctcccgacgtggatctgggcgacatctccggcatcaatgcctctgtggtgaacatccagaaggagatcgaccggctgaacgaggtggccaagaatctgaacgagagcctgatcgatctgcaggagctgggcaagtatgagcagtacatcaagggctctggcagagagaacctgtatttccagggaggaggaggcagcggatacatccctgaggcaccaagggacggacaggcctacgtgcgcaaggatggcgagtgggtgctgctgtccacctttctgggccatcatcaccaccaccaccaccactga

SEQ ID NO: 1232 - DNA, 3846 bp, Artificial Sequence
  Description of Artificial Sequence: Synthetic polynucleotide
atgggcatcctgccaagcccaggaatgcccgccctgctgtctctggtgagcctgctgtccgtgctgctgatgggatgcgtggcagagacaggcacacagtgcgtgaacctgaccacaaggacccagctgccccctgcctataccaattctttcacacggggcgtgtactatcccgacaaggtgtttagaagcgatgtgctgcactccacacaggatctgtttctgcctttcttttctaacgtgacctggttccacgccatccacgtgtccggcaccaatggcacaaagcggttcgacaatcccgtgctgccttttaacgatggcgtgtacttcgccagcaccgagaagtccaacatcatcagaggctggatctttggcaccacactggactctaagacacagagcctgctgatcgtgaacaatgccaccaacgtggtgatcaaggtgtgcgagttccagttttgtgacaatccattcctgggcgtgtactatcacaagaacaataagtcctggatggagaaagagtttcgcgtgtattctagcgccaacaattgcacatttgagtacgtgagccagcccttcctgatggacctgggtggcaagcagggcaatttcaagtggctgagggagttcgtgtttaagaatatcgatggctacttcaagatctacagcaagcacaccccaatcaacctggtgcgcgacctgccacagggattctccgccctggagccactgatggatctgcccatcggcatcaacatcacccggtttcagacactgctggccctgcacagatcctacctgacaccaggcgactcctctagcggatggaccgcaggagctgccgcctactatgtgggctatctgcagccccggaccttcctgctgaagtacaacgagaatggcaccatcacagacgcagtggattgcgcctatgaccccctgtctgagacaaagtgtacactgaagagctttaccgtggagaagggcatctatcagacaagcaatttcagggtgcagcctaccgagtccatcgtgcgctttcccaatatcacaaacctgtgcccttttggcgaggtgttcaacgccaccagattcgccagcgtgtacgcctggaatcggaagagaatctccaactgcgtggccgactattctgtgctgtacaactccgcctctttcagcacctttaagtgctatggcgtgtctcccacaaagctgaatgatctgtgctttaccaacgtgtacgccgatagcttcgtgatcaggggagacgaagtgagacagatcgcaccaggacagacaggaaagatcgcagactacaattataagctgcctgacgatttcaccggctgcgtgatcgcctggaactccaacaatctggattctaaagtgggcggcaactacaattatctgtacaggctgtttcgcaagtccaatctgaagccattcgagcgggacatctccacagagatctaccaggccggctctaccccctgcaatggcgtggagggctttaactgttatttccctctgcagtcttacggcttccagccaacaaacggcgtgggctatcagccctacagagtggtggtgctgtcctttgagctgctgcacgcaccagcaacagtgtgcggcccaaagaagtctaccaatctggtgaagaacaagtgcgtgaacttcaacttcaacggactgaccggcacaggcgtgctgaccgagagcaataagaagttcctgccttttcagcagttcggcagggacatcgcagataacacagacgccgtgcgcgaccctcagaccctggagatcctggacatcacaccatgcagcttcggcggcgtgtccgtgatcacaccaggcaccaatacatccaaccaggtggccgtgctgtatcaggacgtgaattgtaccgaggtgcccaatgcaatccacgcagatcagctgacccctacatggcgggtgtactctaccggcagcaacgtgttccagacaagagccggatgcctgatcggagcagagcacgtgaacaatagctatgagtgcgacatccctatcggcgccggcatctgtgccagctaccagacccagacaaactccccatctggagcaggctccgtggccagccagtccatcatcgcctataccatgagcctgggcgccgagaacagcgtggcctactccaacaattctatcgccatccctaccaacttcacaatcagcgtgaccacagagatcctgccagtgtctatgaccaagacaagcgtggactgcacaatgtatatctgtggcgatagcaccgagtgctccaacctgctgctgcagtacggctccttttgtacccagctgaatagagccctgcaaggcatcgcccgtgagcaggataagaacacacaggaggtgttcgcccaggtgaagcagatctacaagaccccacccatcaaggactttggcggcttcaacttcagccagatcctgcctgatccaagcaagccctccaagaggtcttttatcgaggacctgctgttcaacaaggtgaccctggccgatgccggcttcatcaagcagtatggagattgcctgggagacatcgcagcccgcgacctgatctgtgcccagaagtttaatggcctgaccgtgctgcctccactgctgacagatgagatgatcgcccagtacacatctgccctgctggccggcaccatcacaagcggatggaccttcggcgcaggagccgccctgcagatcccttttgccatgcagatggcctataggttcaacggcatcggcgtgacccagaatgtgctgtacgagaaccagaagctgatcgccaatcagtttaacaaagccatcggcaagatccaggactctctgtcctctacagccagcgccctgggcaagctgcaggatgtggtgaatcagaacgcccaggccctgaataccctggtgaagcagctgagctccaacttcggcgccatctctagcgtgctgaatgacatcctgagccggctggacccccctgaggcagaggtgcagatcgacaggctgatcacaggccgcctgcagagcctgcagacctacgtgacacagcagctgatcagggcagcagagatcagagcctccgccaatctggccgccaccaagatgagcgagtgcgtgctgggacagtccaagagggtggacttttgtggcaagggctatcacctgatgtctttcccacagagcgcccctcacggcgtggtgtttctgcacgtgacctacgtgccagcccaggagaagaacttcaccacagcaccagccatctgccacgatggaaaggcattttttcctagggagggcgtgttcgtgtctaacggcacccaatggtttgtgacacagcgcaatttctacgagccacagatcatcaccacagacaatacattcgtgagcggcaactgtgatgtggtgatcggcatcgtgaacaataccgtgtatgatccactgcagcccgagctggactcctttaaggaggagctggataagtacttcaagaatcacacctctcccgacgtggatctgggcgacatctccggcatcaatgcctctgtggtgaacatccagaaggagatcgaccggctgaacgaggtggccaagaatctgaacgagagcctgatcgatctgcaggagctgggcaagtatgagcagtacatcaagggctctggcagagagaacctgtatttccagggaggaggaggcagcggatacatccctgaggcaccaagggacggacaggcctacgtgcgcaaggatggcgagtgggtgctgctgtccacctttctgggccatcatcaccaccaccaccaccactga

SEQ ID NO: 1233 - DNA, 3846 bp, Artificial Sequence
  Description of Artificial Sequence: Synthetic polynucleotide
atgggcatcctgccaagcccaggaatgcccgccctgctgtctctggtgagcctgctgtccgtgctgctgatgggatgcgtggcagagacaggcacacagtgcgtgaacctgaccacaaggacccagctgccccctgcctataccaattctttcacacggggcgtgtactatcccgacgatgtgtttagaagctccgtgctgcactccacacaggatctgtttctgcctttcttttctaacgtgacctggttccacgccatccacgtgtccggcaccaatggcacaaagcggttcgacaatcccgtgctgccttttaacgatggcgtgtacttcgccagcaccgagaagtccaacatcatcagaggctggatctttggcaccacactggactctaagacacagagcctgctgatcgtgaacaatgccaccaacgtggtgatcaaggtgtgcgagttccagttttgtaatgatccattcctgggcgtgtactatcacaagaacaataagtcctggatggagtctgagtttcgcgtgtattctagcgccaacaattgcacatttgagtacgtgagccagcccttcctgatggacctggagggcaagcagggcaatttcaagaacctgagggagttcgtgtttaagaatatcgatggctacttcaagatctacagcaagcacaccccaatcaacctggtgcgcgacctgccacagggattctccgccctggagccactggtggatctgcccatcggcatcaacatcacccggtttcagacactgctggccctgcacagatcctacctgacaccaggcgactcctctagcggatggaccgcaggagctgccgcctactatgtgggctatctgcagccccggaccttcctgctgaagtacaacgagaatggcaccatcacagacgcagtggattgcgccctggaccccctgtctgagacaaagtgtacactgaagagctttaccgtggagaagggcatctatcagacaagcaatttcagggtgcagcctaccgagtccatcgtgcgctttcccaatatcacaaacctgtgcccttttggcgaggtgttcaacgccaccagattcgccagcgtgtacgcctggaatcggaagagaatctccaactgcgtggccgactattctgtgctgtacaactccgcctctttcagcacctttaagtgctatggcgtgtctcccacaaagctgaatgatctgtgctttaccaacgtgtacgccgatagcttcgtgatcaggggagacgaagtgagacagatcgcaccaggacagacaggaaagatcgcagactacaattataagctgcctgacgatttcaccggctgcgtgatcgcctggaactccaacaatctggattctaaagtgggcggcaactacaattatctgtacaggctgtttcgcaagtccaatctgaagccattcgagcgggacatctccacagagatctaccaggccggctctaccccctgcaatggcgtggagggctttaactgttatttccctctgcagtcttacggcttccagccaacaaacggcgtgggctatcagccctacagagtggtggtgctgtcctttgagctgctgcacgcaccagcaacagtgtgcggcccaaagaagtctaccaatctggtgaagaacaagtgcgtgaacttcaacttcaacggactgaccggcacaggcgtgctgaccgagagcaataagaagttcctgccttttcagcagttcggcagggacatcgcagataccacagacgccgtgcgcgaccctcagaccctggagatcctggacatcacaccatgcagcttcggcggcgtgtccgtgatcacaccaggcaccaatacatccaaccaggtggccgtgctgtatcaggacgtgaattgtaccgaggtgcccgtggcaatccacgcagatcagctgacccctacatggcgggtgtactctaccggcagcaacgtgttccagacaagagccggatgcctgatcggagcagagcacgtgaacaatagctatgagtgcgacatccctatcggcgccggcatctgtgccagctaccagacccagacaaactccccatctggagcaggctccgtggccagccagtccatcatcgcctataccatgagcctgggcgccgagaacagcgtggcctactccaacaattctatcgccatccctaccaacttcacaatcagcgtgaccacagagatcctgccagtgtctatgaccaagacaagcgtggactgcacaatgtatatctgtggcgatagcaccgagtgctccaacctgctgctgcagtacggctccttttgtacccagctgaatagagccctgacaggcatcgccgtggagcaggataagaacacacaggaggtgttcgcccaggtgaagcagatctacaagaccccacccatcaaggactttggcggcttcaacttcagccagatcctgcctgatccaagcaagccctccaagaggtcttttatcgaggacctgctgttcaacaaggtgaccctggccgatgccggcttcatcaagcagtatggagattgcctgggagacatcgcagcccgcgacctgatctgtgcccagaagtttaatggcctgaccgtgctgcctccactgctgacagatgagatgatcgcccagtacacatctgccctgctggccggcaccatcacaagcggatggaccttcggcgcaggagccgccctgcagatcccttttgccatgcagatggcctataggttcaacggcatcggcgtgacccagaatgtgctgtacgagaaccagaagctgatcgccaatcagtttaacagcgccatcggcaagatccaggactctctgtcctctacagccagcgccctgggcaagctgcaggatgtggtgaatcagaacgcccaggccctgaataccctggtgaagcagctgagctccaacttcggcgccatctctagcgtgctgaatgacatcctgagccggctggacccccctgaggcagaggtgcagatcgacaggctgatcacaggccgcctgcagagcctgcagacctacgtgacacagcagctgatcagggcagcagagatcagagcctccgccaatctggccgccaccaagatgagcgagtgcgtgctgggacagtccaagagggtggacttttgtggcaagggctatcacctgatgtctttcccacagagcgcccctcacggcgtggtgtttctgcacgtgacctacgtgccagcccaggagaagaacttcaccacagcaccagccatctgccacgatggaaaggcacactttcctagggagggcgtgttcgtgtctaacggcacccactggtttgtgacacagcgcaatttctacgagccacagatcatcaccacagacaatacattcgtgagcggcaactgtgatgtggtgatcggcatcgtgaacaataccgtgtatgatccactgcagcccgagctggactcctttaaggaggagctggataagtacttcaagaatcacacctctcccgacgtggatctgggcgacatctccggcatcaatgcctctgtggtgaacatccagaaggagatcgaccggctgaacgaggtggccaagaatctgaacgagagcctgatcgatctgcaggagctgggcaagtatgagcagtacatcaagggctctggcagagagaacctgtatttccagggaggaggaggcagcggatacatccctgaggcaccaagggacggacaggcctacgtgcgcaaggatggcgagtgggtgctgctgtccacctttctgggccatcatcaccaccaccaccaccactga

SEQ ID NO: 1234 - DNA, 3846 bp, Artificial Sequence
  Description of Artificial Sequence: Synthetic polynucleotide
atgggcatcctgccaagcccaggaatgcccgccctgctgtctctggtgagcctgctgtccgtgctgctgatgggatgcgtggcagagacaggcacacagtgcgtgaacctgaccacaaggacccagctgccccctgcctataccaattctttcacacggggcgtgtactatcccgacaagatatttagaagctccgtgctgcaccttacacaggatctgtttctgcctttcttttctaacgtgacctggttccacgccatccacgtgtccggcaccaatggcacaaagcggttcgacaatcccgtgctgccttttaacgatggcgtgtacttcgccgcaaccgagaagtccaacatcatcagaggctggatctttggcaccacactggactctaagacacagagcctgctgatcgtgaacaatgccaccaacgtggtgatcaaggtgtgcgagttccagttttgtaatgatccattcctgggcgtgtactatcacaagaacaataagtcctggatggagtctgagtttcgcgtgtattctagcgccaacaattgcacatttgagtacgtgagccagcccttcctgatggacctggagggcaagcagggcaatttcaagaacctgagggagttcgtgtttaagaatatcgatggctacttcaagatctacagcaagtataccccaatcaacctggtgcgcgacctgccacagggattctccgccctggagccactggtgaaactgcccatcggcatcaacatcacccggtttcagacactgctggccctgcacagatcctacctgacaccaggcgactcctctagcggatggaccgcaggagctgccgcctactatgtgggctatctgcagccccggaccttcctgctgaagtacaacgagaatggcaccatcacagacgcagtggattgcgccctggaccccctgtctgagacaaagtgtacactgaagagctttaccgtggagaagggcatctatcagacaagcaatttcagggtgcagcctaccgagtccatcgtgcgctttcccaatatcacaaacctgtgcccttttggcgaggtgttcaacgccaccagattcgccagcgtgtacgcctggaatcggaagagaatctccaactgcgtggccgactattctgtgctgtacaactccgcctctttcagcacctttaagtgctatggcgtgtctcccacaaagctgaatgatctgtgctttaccaacgtgtacgccgatagcttcgtgatcaggggagacgaagtgagacagatcgcaccaggacagacaggaaagatcgcagactacaattataagctgcctgacgatttcaccggctgcgtgatcgcctggaactccaacaatctggattctaaagtgggcggcaactacaattatctgtacaggctgtttcgcaagtccaatctgaagccattcgagcgggacatctccacagagatctaccaggccggctctaccccctgcaatggcgtggagggctttaactgttatttccctctgcagtcttacggcttccagccaacaaacggcgtgggctatcagccctacagagtggtggtgctgtcctttgagctgctgcacgcaccagcaacagtgtgcggcccaaagaagtctaccaatctggtgaagaacaagtgcgtgaacttcaacttcaacggactgaccggcacaggcgtgctgaccgagagcaataagaagttcctgccttttcagcagttcggcagggacatctcagataccacagacgccgtgcgcgaccctcagaccctggagatcctggacatcacaccatgcagcttcggcggcgtgtccgtgatcacaccaggcaccaatacatccaaccaggtggccgtgctgtatcaggacgtgaattgtaccgatgtgcccgtggcaatccacgcagatcagctgacccctacatggcgggtgtactctaccggcagcaacgtgttccagacacaagccggatgcctgatcggagcagagcacgtgaacaatagctatgagtgcgacatccctatcggcgccggcatctgtgccagctaccagacccagacaaactccccatctggagcaggctccgtggccagccagtccatcatcgcctataccatgagcctgggcgccgagaacagcgtggcctactccaacaattctatcgccatccctaccaacttcacaatcagcgtgaccacagagatcctgccagtgtctatgaccaagacaagcgtggactgcacaatgtatatctgtggcgatagcaccgagtgctccaacctgctgctgcagtacggctccttttgtacccagctgaatagagccctgacaggcatcgccgtggagcaggataagaacacacaggaggtgttcgcccaggtgaagcagatctacaagaccccacccatcaaggactttggcggcttcaacttcagccagatcctgcctgatccaagcaagccctccaagaggtcttttatcgaggacctgctgttcaacaaggtgaccctggccgatgccggcttcatcaagcagtatggagattgcctgggagacatcgcagcccgcgacctgatctgtgcccagaagtttaatggcctgaccgtgctgcctccactgctgacagatgagatgatcgcccagtacacagctgccctgctggccggcaccgcaacagctggatggaccttcggcgcaggagccgccctgcagatcccttttgccatgcagatggcctataggttcaacggcatcggcgtgacccagaatgtgctgtacgagaaccagaagctgatcgccaatcagtttaacagcgccatcggcaagatccaggactctctgtcctctacagccagcgccctgggcaagctgcaggatgtggtgaatcagaacgcccaggccctgaataccctggtgaagcagctgagctccaacttcggcgccatctctagcgtgctgaatgacatcctgagccggctggacccccctgaggcagaggtgcagatcgacaggctgatcacaggccgcctgcagagcctgcagacctacgtgacacagcagctgatcagggcagcagagatcagagcctccgccaatctggccgccaccaagatgagcgagtgcgtgctgggacagtccaagagggtggacttttgtggcaagggctatcacctgatgtctttcccacagagcgcccctcacggcgtggtgtttctgcacgtgacctacgtgccagcccaggagaagaacttcaccacagcaccagccatctgccacgatggaaaggcacactttcctagggagggcgtgttcgtgtctaacggcacccactggtttgtgacacagcgcaatttctacgagccacagatcatcaccacagacaatacattcgtgagcggcaactgtgatgtggtgatcggcatcgtgaacaataccgtgtatgatccactgcagcccgagctggactcctttaaggaggagctggataagtacttcaagaatcacacctctcccgacgtggatctgggcgacatctccggcatcaatgcctctgtggtgaacatccagaaggagatcgaccggctgaacgaggtggccaagaatctgaacgagagcctgatcgatctgcaggagctgggcaagtatgagcagtacatcaagggctctggcagagagaacctgtatttccagggaggaggaggcagcggatacatccctgaggcaccaagggacggacaggcctacgtgcgcaaggatggcgagtgggtgctgctgtccacctttctgggccatcatcaccaccaccaccaccactga

SEQ ID NO: 1235 - DNA, 3846 bp, Artificial Sequence
  Description of Artificial Sequence: Synthetic polynucleotide
atgggcatcctgccaagcccaggaatgcccgccctgctgtctctggtgagcctgctgtccgtgctgctgatgggatgcgtggcagagacaggcacacagtgcgtgaacctgaccacaaggacccagctgccccctgcctataccaattctttcacacggggcgtgtactatcccgacaaggtgtttagaagctccgtgctgcactccacacaggatctgtttctgcctttcttttctaacgtgacctggttccacgccatccacgtgtccggcaccaatggcacaaagcggttcgacaatcccgtgctgccttttaacgatggcgtgtacttcgccagcaccgagaagtccaacatcatcagaggctggatctttggcaccacactggactctaagacacagagcctgctgatcgtgaacaatgccaccaacgtggtgatcaaggtgtgcgagttccagttttgtaatgatccattcctgggcgtgtactatcacaagaacaataagtcctggatggagtctgagtttcgcgtgtattctagcgccaacaattgcacatttgagtacgtgagccagcccttcctgatggacctggagggcaagcagggcaatttcaagaacctgagggagttcgtgtttaagaatatcgatggctacttcaagatctacagcaagcacaccccaatcaacctggtgcgcgacctgccacagggattctccgccctggagccactggtggatctgcccatcggcatcaacatcacccggtttcagacactgctggccctgcacagatcctacctgacaccaggcgactcctctagcggatggaccgcaggagctgccgcctactatgtgggctatctgcagccccggaccttcctgctgaagtacaacgagaatggcaccatcacagacgcagtggattgcgccctggaccccctgtctgagacaaagtgtacactgaagagctttaccgtggagaagggcatctatcagacaagcaatttcagggtgcagcctaccgagtccatcgtgcgctttcccaatatcacaaacctgtgcccttttggcgaggtgttcaacgccaccagattcgccagcgtgtacgcctggaatcggaagagaatctccaactgcgtggccgactattctgtgctgtacaactccgcctctttcagcacctttaagtgctatggcgtgtctcccacaaagctgaatgatctgtgctttaccaacgtgtacgccgatagcttcgtgatcaggggagacgaagtgagacagatcgcaccaggacagacaggaaagatcgcagactacaattataagctgcctgacgatttcaccggctgcgtgatcgcctggaactccaacaatctggattctaaagtgggcggcaactacaattatctgtacaggctgtttcgcaagtccaatctgaagccattcgagcgggacatctccacagagatctaccaggccggctctaccccctgcaatggcgtggagggctttaactgttatttccctctgcagtcttacggcttccagccaacaaacggcgtgggctatcagccctacagagtggtggtgctgtcctttgagctgctgcacgcaccagcaacagtgtgcggcccaaagaagtctaccaatctggtgaagaacaagtgcgtgaacttcaacttcaacggactgaccggcacaggcgtgctgaccgagagcaataagaagttcctgccttttcagcagttcggcagggacatcgcagataccacagacgccgtgcgcgaccctcagaccctggagatcctggacatcacaccatgcagcttcggcggcgtgtccgtgatcacaccaggcaccaatacatccaaccaggtggccgtgctgtatcaggacgtgaattgtaccgaggtgcccgtggcaatccacgcagatcagctgacccctacatggcgggtgtactctaccggcagcaacgtgttccagacaagagccggatgcctgatcggagcagagcacgtgaacaatagctatgagtgcgacatccctatcggcgccggcatctgtgccagctaccagacccagacaaactccccatctggagcaggctccgtggccagccagtccatcatcgcctataccatgagcctgggcgccgagaacagcgtggcctactccaacaattctatcgccatccctaccaacttcacaatcagcgtgaccacagagatcctgccagtgtctatgaccaagacaagcgtggactgcacaatgtatatctgtggcgatagcaccgagtgctccaacctgctgctgcagtacggctccttttgtacccagctgaatagagccctgacaggcatcgccgtggagcaggataagaacacacaggaggtgttcgcccaggtgaagcagatctacaagaccccacccatcaaggactttggcggcttcaacttcagccagatcctgcctgatccaagcaagccctccaagaggtcttttatcgaggacctgctgttcaacaaggtgaccctggccgatgccggcttcatcaagcagtatggagattgcctgggagacatcgcagcccgcgacctgatctgtgcccagaagtttaatggcctgaccgtgctgcctccactgctgacagatgagatgatcgcccagtacacatctgccctgctggccggcaccatcacaagcggatggaccttcggcgcaggagccgccctgcagatcccttttgccatgcagatggcctataggttcaacggcatcggcgtgacccagaatgtgctgtacgagaaccagaagctgatcgccaatcagtttaacagcgccatcggcaagatccaggactctctgtcctctacagccagcgccctgggcaagctgcaggatgtggtgaatcagaacgcccaggccctgaataccctggtgaagcagctgagctccaacttcggcgccatctctagcgtgctgaatgacatcctgagccggctggacccccctgaggcagaggtgcagatcgacaggctgatcacaggccgcctgcagagcctgcagacctacgtgacacagcagctgatcagggcagcagagatcagagcctccgccaatctggccgccaccaagatgagcgagtgcgtgctgggacagtccaagagggtggacttttgtggcaagggctatcacctgatgtctttcccacagagcgcccctcacggcgtggtgtttctgcacgtgacctacgtgccagcccaggagaagaacttcaccacagcaccagccatctgccacgatggaaaggcattttttcctagggagggcgtgttcgtgtctaacggcacccactggtttgtgacacagcgcaatttctacgagccacagatcatcaccacagacaatacattcgtgagcggcaactgtgatgtggtgatcggcatcgtgaacaataccgtgtatgatccactgcagcccgagctggactcctttaaggaggagctggataagtacttcaagaatcacacctctcccgacgtggatctgggcgacatctccggcatcaatgcctctgtggtgaacatccagaaggagatcgaccggctgaacgaggtggccaagaatctgaacgagagcctgatcgatctgcaggagctgggcaagtatgagcagtacatcaagggctctggcagagagaacctgtatttccagggaggaggaggcagcggatacatccctgaggcaccaagggacggacaggcctacgtgcgcaaggatggcgagtgggtgctgctgtccacctttctgggccatcatcaccaccaccaccaccactga

SEQ ID NO: 1236 - DNA, 3846 bp, Artificial Sequence
  Description of Artificial Sequence: Synthetic polynucleotide
atgggcatcctgccaagcccaggaatgcccgccctgctgtctctggtgagcctgctgtccgtgctgctgatgggatgcgtggcagagacaggcacacagtgcgtgaacctgaccacaaggacccagctgccccctgcctataccaattctttcacacggggcgtgtactatcccgacaaggtgtttagaagctccgtgctgcactccacacaggatctgtttctgcctttcttttctaacgtgacctggttccacgccatccacgtgtccggcaccaatggcacaaagcggttcgacaatcccgtgctgccttttaacgatggcgtgtacttcgccagcaccgagaagtccaacatcatcagaggctggatctttggcaccacactggactctaagacacagagcctgctgatcgtgaacaatgccaccaacgtggtgatcaaggtgtgcgagttccagttttgtaatgatccattcctgggcgtgtactatcacaagaacaataagtcctggatggagtctgagtttcgcgtgtattctagcgccaacaattgcacatttgagtacgtgagccagcccttcctgatggacctggagggcaagcagggcaatttcaagaacctgagggagttcgtgtttaagaatatcgatggctacttcaagatctacagcaagcacaccccaatcaacctggtgcgcgacctgccacagggattctccgccctggagccactggtggatctgcccatcggcatcaacatcacccggtttcagacactgctggccctgcacagatcctacctgacaccaggcgactcctctagcggatggaccgcaggagctgccgcctactatgtgggctatctgcagccccggaccttcctgctgaagtacaacgagaatggcaccatcacagacgcagtggattgcgccctggaccccctgtctgagacaaagtgtacactgaagagctttaccgtggagaagggcatctatcagacaagcaatttcagggtgcagcctaccgagtccatcgtgcgctttcccaatatcacaaacctgtgcccttttggcgaggtgttcaacgccaccagattcgccagcgtgtacgcctggaatcggaagagaatctccaactgcgtggccgactattctgtgctgtacaactccgcctctttcagcacctttaagtgctatggcgtgtctcccacaaagctgaatgatctgtgctttaccaacgtgtacgccgatagcttcgtgatcaggggagacgaagtgagacagatcgcaccaggacagacaggaaagatcgcagactacaattataagctgcctgacgatttcaccggctgcgtgatcgcctggaactccaacaatctggattctaaagtgggcggcaactacaattatctgtacaggctgtttcgcaagtccaatctgaagccattcgagcgggacatctccacagagatctaccaggccggctctaccccctgcaatggcgtggagggctttaactgttatttccctctgcagtcttacggcttccagccaacaaacggcgtgggctatcagccctacagagtggtggtgctgtcctttgagctgctgcacgcaccagcaacagtgtgcggcccaaagaagtctaccaatctggtgaagaacaagtgcgtgaacttcaacttcaacggactgaccggcacaggcgtgctgaccgagagcaataagaagttcctgccttttcagcagttcggcagggacatcgcagataccacagacgccgtgcgcgaccctcagaccctggagatcctggacatcacaccatgcagcttcggcggcgtgtccgtgatcacaccaggcaccaatacatccaaccaggtggccgtgctgtatcaggacgtgaattgtaccgaggtgcccgtggatatccacgcagatcagctgacccctacatggcgggtgtactctaccggcagcaacgtgttccagacaagagccggatgcctgatcggagcagagcacgtgaacaatagctatgagtgcgacatccctatcggcgccggcatctgtgccagctaccagacccagacaaactccccatctggagcaggctccgtggccagccagtccatcatcgcctataccatgagcctgggcgccgagaacagcgtggcctactccaacaattctatcgccatccctaccaacttcacaatcagcgtgaccacagagatcctgccagtgtctatgaccaagacaagcgtggactgcacaatgtatatctgtggcgatagcaccgagtgctccaacctgctgctgcagtacggctccttttgtacccagctgaatagagccctgacaggcatcgccgtggagcaggataagaacacacaggaggtgttcgcccaggtgaagcagatctacaagaccccacccatcaaggactttggcggcttcaacttcagccagatcctgcctgatccaagcaagccctccaagaggtcttttatcgaggacctgctgttcaacaaggtgaccctggccgatgccggcttcatcaagcagtatggagattgcctgggagacatcgcagcccgcgacctgatctgtgcccagaagtttaatggcctgaccgtgctgcctccactgctgacagatgagatgatcgcccagtacacatctgccctgctggccggcaccatcacaagcggatggaccttcggcgcaggagccgccctgcagatcccttttgccatgcagatggcctataggttcaacggcatcggcgtgacccagaatgtgctgtacgagaaccagaagctgatcgccaatcagtttaacagcgccatcggcaagatccaggactctctgtcctctacagccagcgccctgggcaagctgcaggatgtggtgaatcagaacgcccaggccctgaataccctggtgaagcagctgagctccaacttcggcgccatctctagcgtgctgaatgacatcctgagccggctggacccccctgaggcagaggtgcagatcgacaggctgatcacaggccgcctgcagagcctgcagacctacgtgacacagcagctgatcagggcagcagagatcagagcctccgccaatctggccgccaccaagatgagcgagtgcgtgctgggacagtccaagagggtggacttttgtggcaagggctatcacctgatgtctttcccacagagcgcccctcacggcgtggtgtttctgcacgtgacctacgtgccagcccaggagaagaacttcaccacagcaccagccatctgccacgatggaaaggcacactttcctagggagggcgtgttcgtgtctaacggcacccactggtttgtgacacagcgcaatttctacgagccacagatcatcaccacagacaatacattcgtgagcggcaactgtgatgtggtgatcggcatcgtgaacaataccgtgtatgatccactgcagcccgagctggactcctttaaggaggagctggataagtacttcaagaatcacacctctcccgacgtggatctgggcgacatctccggcatcaatgcctctgtggtgaacatccagaaggagatcgaccggctgaacgaggtggccaagaatctgaacgagagcctgatcgatctgcaggagctgggcaagtatgagcagtacatcaagggctctggcagagagaacctgtatttccagggaggaggaggcagcggatacatccctgaggcaccaagggacggacaggcctacgtgcgcaaggatggcgagtgggtgctgctgtccacctttctgggccatcatcaccaccaccaccaccactga

SEQ ID NO: 1237 - DNA, 3846 bp, Artificial Sequence
  Description of Artificial Sequence: Synthetic polynucleotide
atgggcatcctgccaagcccaggaatgcccgccctgctgtctctggtgagcctgctgtccgtgctgctgatgggatgcgtggcagagacaggcacacagtgcgtgaacctgaccacaaggacccagctgccccctgcctataccaattctttcacacggggcgtgtactatcccgacaaggtgtttagaagctccgtgctgcactccacacaggatctgtttctgcctttcttttctaacgtgacctggttccacgccatccacgtgtccggcaccaatggcacaaagcggttcgacaatcccgtgctgccttttaacgatggcgtgtacttcgccagcaccgagaagtccaacatcatcagaggctggatctttggcaccacactggactctaagacacagagcctgctgatcgtgaacaatgccaccaacgtggtgatcaaggtgtgcgagttccagttttgtaatgatccattcctgggcgtgtactatcacaagaacaataagtcctggatggagtctgagtttcgcgtgtattctagcgccaacaattgcacatttgagtacgtgagccagcccttcctgatggacctggagggcaagcagggcaatttcaagaacctgagggagttcgtgtttaagaatatcgatggctacttcaagatctacagcaagcacaccccaatcaacctggtgcgcgacctgccacagggattctccgccctggagccactggtggatctgcccatcggcatcaacatcacccggtttcagacactgctggccctgcacagatcctacctgacaccaggcgactcctctagcggatggaccgcaggagctgccgcctactatgtgggctatctgcagccccggaccttcctgctgaagtacaacgagaatggcaccatcacagacgcagtggattgcgccctggaccccctgtctgagacaaagtgtacactgaagagctttaccgtggagaagggcatctatcagacaagcaatttcagggtgcagcctaccgagtccatcgtgcgctttcccaatatcacaaacctgtgcccttttggcgaggtgttcaacgccaccagattcgccagcgtgtacgcctggaatcggaagagaatctccaactgcgtggccgactattctgtgctgtacaactccgcctctttcagcacctttaagtgctatggcgtgtctcccacaaagctgaatgatctgtgctttaccaacgtgtacgccgatagcttcgtgatcaggggagacgaagtgagacagatcgcaccaggacagacaggaaagatcgcagactacaattataagctgcctgacgatttcaccggctgcgtgatcgcctggaactccaacaatctggattctaaagtgggcggcaactacaattatctgtacaggctgtttcgcaagtccaatctgaagccattcgagcgggacatctccacagagatctaccaggccggctctaccccctgcaatggcgtggagggctttaactgttatttccctctgcagtcttacggcttccagccaacaaacggcgtgggctatcagccctacagagtggtggtgctgtcctttgagctgctgcacgcaccagcaacagtgtgcggcccaaagaagtctaccaatctggtgaagaacaagtgcgtgaacttcaacttcaacggactgaccggcacaggcgtgctgaccgagagcaataagaagttcctgccttttcagcagttcggcagggacatcgcagataccacagacgccgtgcgcgaccctcagaccctggagatcctggacatcacaccatgcagcttcggcggcgtgtccgtgatcacaccaggcaccaatacatccaaccaggtggccgtgctgtatcaggacgtgaattgtaccgaggtgcccgtggcaatccacgcagatcagctgacccctacatggcgggtgtactctaccggcagcaacgtgttccagacaagagccggatgcctgatcggagcagagcacgtgaacaatagctatgagtgcgacatccctatcggcgccggcatctgtgccagctaccagacccagacaaactccccatctggagcaggctccgtggccagccagtccatcatcgcctataccatgagcctgggcgccgagaacagcgtggcctactccaacaattctatcgccatccctaccaacttcacaatcagcgtgaccacagagatcctgccagtgtctatgaccaagacaagcgtggactgcacaatgtatatctgtggcgatagcaccgagtgctccaacctgctgctgcagtacggctccttttgtacccagctgaatagagccctgacaggcatcgccgtggagcaggataagaacacacaggaggtgttcgcccaggtgaagcagatctacaagaccccacccatcaaggactttggcggcttcaacttcagccagatcctgcctgatccaagcaagccctccaagaggtcttttatcgaggacctgctgttcaacaaggtgaccctggccgatgccggcttcatcaagcagtatggagattgcctgggagacatcgcagcccgcgacctgatctgtgcccagaagtttaatggcctgaccgtgctgcctccactgctgacagatgagatgatcgcccagtacacatctgccctgctggccggcaccatcacaagcggatggaccttcggcgcaggagccgccctgcagatcccttttgccatgcagatggcctataggttcaacggcatcggcgtgacccagaatgtgctgtacgagaaccagaagctgatcgccaatcagtttaacagcgccatcggcaagatccaggactctctgtcctctacagccagcgccctgggcaagctgcaggatgtggtgaatcagaacgcccaggccctgaataccctggtgaagcagctgagctccaacttcggcgccatctctagcgtgctgaatgacatcctgagccggctggacccccctgaggcagaggtgcagatcgacaggctgatcacaggccgcctgcagagcctgcagacctacgtgacacagcagctgatcagggcagcagagatcagagcctccgccaatctggccgccaccaagatgagcgagtgcgtgctgggacagtccaagagggtggacttttgtggcaagggctatcacctgatgtctttcccacagagcgcccctcacggcgtggtgtttctgcacgtgacctacgtgccagcccaggagaagaacttcaccacagcaccagccatctgccacgatggaaaggcatattttcctagggagggcgtgttcgtgtctaacggcacccactggtttgtgacacagcgcaatttctacgagccacagatcatcaccacagacaatacattcgtgagcggcaactgtgatgtggtgatcggcatcgtgaacaataccgtgtatgatccactgcagcccgagctggactcctttaaggaggagctggataagtacttcaagaatcacacctctcccgacgtggatctgggcgacatctccggcatcaatgcctctgtggtgaacatccagaaggagatcgaccggctgaacgaggtggccaagaatctgaacgagagcctgatcgatctgcaggagctgggcaagtatgagcagtacatcaagggctctggcagagagaacctgtatttccagggaggaggaggcagcggatacatccctgaggcaccaagggacggacaggcctacgtgcgcaaggatggcgagtgggtgctgctgtccacctttctgggccatcatcaccaccaccaccaccactga

SEQ ID NO: 1238 - DNA, 3846 bp, Artificial Sequence
  Description of Artificial Sequence: Synthetic polynucleotide
atgggcatcctgccaagcccaggaatgcccgccctgctgtctctggtgagcctgctgtccgtgctgctgatgggatgcgtggcagagacaggcacacagtgcgtgaacctgaccacaaggacccagctgccccctgcctataccaattctttcacacggggcgtgtactatcccgacaaggtgtttagaagctccgtgctgcactccacacaggatctgtttctgcctttcttttctaacgtgacctggttccacgccatccacgtgtccggcaccaatggcacaaagcggttcgacaatcccgtgctgccttttaacgatggcgtgtacttcgccagcaccgagaagtccaacatcatcagaggctggatctttggcaccacactggactctaagacacagagcctgctgatcgtgaacaatgccaccaacgtggtgatcaaggtgtgcgagttccagttttgtaatgatccattcctgggcgtgtactatcacaagaacaataagtcctggatggagtctgagtttcgcgtgtattctagcgccaacaattgcacatttgagtacgtgagccagcccttcctgatggacctggagggcaagcagggcaatttcaagaacctgagggagttcgtgtttaagaatatcgatggctacttcaagatctacagcaagcacaccccaatcaacctggtgcgcgacctgccacagggattctccgccctggagccactggtggatctgcccatcggcatcaacatcacccggtttcagacactgctggccctgcacagatcctacctgacaccaggcgactcctctagcggatggaccgcaggagctgccgcctactatgtgggctatctgcagccccggaccttcctgctgaagtacaacgagaatggcaccatcacagacgcagtggattgcgccctggaccccctgtctgagacaaagtgtacactgaagagctttaccgtggagaagggcatctatcagacaagcaatttcagggtgcagcctaccgagtccatcgtgcgctttcccaatatcacaaacctgtgcccttttggcgaggtgttcaacgccaccagattcgccagcgtgtacgcctggaatcggaagagaatctccaactgcgtggccgactattctgtgctgtacaactccgcctctttcagcacctttaagtgctatggcgtgtctcccacaaagctgaatgatctgtgctttaccaacgtgtacgccgatagcttcgtgatcaggggagacgaagtgagacagatcgcaccaggacagacaggaaagatcgcagactacaattataagctgcctgacgatttcaccggctgcgtgatcgcctggaactccaacaatctggattctaaagtgggcggcaactacaattatctgtacaggctgtttcgcaagtccaatctgaagccattcgagcgggacatctccacagagatctaccaggccggctctaccccctgcaatggcgtggagggctttaactgttatttccctctgcagtcttacggcttccagccaacaaacggcgtgggctatcagccctacagagtggtggtgctgtcctttgagctgctgcacgcaccagcaacagtgtgcggcccaaagaagtctaccaatctggtgaagaacaagtgcgtgaacttcaacttcaacggactgaccggcacaggcgtgctgaccgagagcaataagaagttcctgccttttcagcagttcggcagggacatcgcagataccacagacgccgtgcgcgaccctcagaccctggagatcctggacatcacaccatgcagcttcggcggcgtgtccgtgatcacaccaggcaccaatacatccaaccaggtggccgtgctgtatcaggacgtgaattgtaccgaggtgcccgtggcaatccacgcagatcagctgacccctacatggcgggtgtactctaccggcagcaacgtgttccagacaagagccggatgcctgatcggagcagagcacgtgaacaatagctatgagtgcgacatccctatcggcgccggcatctgtgccagctaccagacccagacaaactccccatctggagcaggctccgtggccagccagtccatcatcgcctataccatgagcctgggcgccgagaacagcgtggcctactccaacaattctatcgccatccctaccaacttcacaatcagcgtgaccacagagatcctgccagtgtctatgaccaagacaagcgtggactgcacaatgtatatctgtggcgatagcaccgagtgctccaacctgctgctgcagtacggctccttttgtacccagctgaatagagccctgacaggcatcgccgtggagcaggataagaacacacaggaggtgttcgcccaggtgaagcagatctacaagaccccacccatcaaggactttggcggcttcaacttcagccagatcctgcctgatccaagcaagccctccaagaggtcttttatcgaggacctgctgttcaacaaggtgaccctggccgatgccggcttcatcaagcagtatggagattgcctgggagatcaagcagcccgcgacctgatctgtgcccagaagtttaatggcctgaccgtgctgcctccactgctgacagatgagatgatcgcccagtacacatctgccctgctggccggcaccatcacaagcggatggaccttcggcgcaggagccgccctgcagatcccttttgccatgcagatggcctataggttcaacggcatcggcgtgacccagaatgtgctgtacgagaaccagaagctgatcgccaatcagtttaacagcgccatcggcaagatccaggactctctgtcctctacagccagcgccctgggcaagctgcaggatgtggtgaatcagaacgcccaggccctgaataccctggtgaagcagctgagctccaacttcggcgccatctctagcgtgctgaatgacatcctgagccggctggacccccctgaggcagaggtgcagatcgacaggctgatcacaggccgcctgcagagcctgcagacctacgtgacacagcagctgatcagggcagcagagatcagagcctccgccaatctggccgccaccaagatgagcgagtgcgtgctgggacagtccaagagggtggacttttgtggcaagggctatcacctgatgtctttcccacagagcgcccctcacggcgtggtgtttctgcacgtgacctacgtgccagcccaggagaagaacttcaccacagcaccagccatctgccacgatggaaaggcacactttcctagggagggcgtgttcgtgtctaacggcacccactggtttgtgacacagcgcaatttctacgagccacagatcatcaccacagacaatacattcgtgagcggcaactgtgatgtggtgatcggcatcgtgaacaataccgtgtatgatccactgcagcccgagctggactcctttaaggaggagctggataagtacttcaagaatcacacctctcccgacgtggatctgggcgacatctccggcatcaatgcctctgtggtgaacatccagaaggagatcgaccggctgaacgaggtggccaagaatctgaacgagagcctgatcgatctgcaggagctgggcaagtatgagcagtacatcaagggctctggcagagagaacctgtatttccagggaggaggaggcagcggatacatccctgaggcaccaagggacggacaggcctacgtgcgcaaggatggcgagtgggtgctgctgtccacctttctgggccatcatcaccaccaccaccaccactga

SEQ ID NO: 1239 - DNA, 3846 bp, Artificial Sequence
  Description of Artificial Sequence: Synthetic polynucleotide
atgggcatcctgccaagcccaggaatgcccgccctgctgtctctggtgagcctgctgtccgtgctgctgatgggatgcgtggcagagacaggcacacagtgcgtgaacctgaccacaaggacccagctgccccctgcctataccaattctttcacacggggcgtgtactatcccgacaaggtgtttagaagctccgtgctgcactccacacaggatctgtttctgcctttcttttctaacgtgacctggttccacgccatccacgtgtccggcaccaatggcacaaagcggttcgacaatcccgtgctgccttttaacgatggcgtgtacttcgccagcaccgagaagtccaacatcatcagaggctggatctttggcaccacactggactctaagacacagagcctgctgatcgtgaacaatgccaccaacgtggtgatcaaggtgtgcgagttccagttttgtaatgatccattcctgggcgtgtactatcacaagaacaataagtcctggatggagtctgagtttcgcgtgtattctagcgccaacaattgcacatttgagtacgtgagccagcccttcctgatggacctggagggcaagcagggcaatttcaagaacctgagggagttcgtgtttaagaatatcgatggctacttcaagatctacagcaagcacaccccaatcaacctggtgcgcgacctgccacagggattctccgccctggagccactggtggatctgcccatcggcatcaacatcacccggtttcagacactgctggccctgcacagatcctacctgacaccaggcgactcctctagcggatggaccgcaggagctgccgcctactatgtgggctatctgcagccccggaccttcctgctgaagtacaacgagaatggcaccatcacagacgcagtggattgcgccctggaccccctgtctgagacaaagtgtacactgaagagctttaccgtggagaagggcatctatcagacaagcaatttcagggtgcagcctaccgagtccatcgtgcgctttcccaatatcacaaacctgtgcccttttggcgaggtgttcaacgccaccagattcgccagcgtgtacgcctggaatcggaagagaatctccaactgcgtggccgactattctgtgctgtacaactccgcctctttcagcacctttaagtgctatggcgtgtctcccacaaagctgaatgatctgtgctttaccaacgtgtacgccgatagcttcgtgatcaggggagacgaagtgagacagatcgcaccaggacagacaggaaagatcgcagactacaattataagctgcctgacgatttcaccggctgcgtgatcgcctggaactccaacaatctggattctaaagtgggcggcaactacaattatctgtacaggctgtttcgcaagtccaatctgaagccattcgagcgggacatctccacagagatctaccaggccggctctaccccctgcaatggcgtggagggctttaactgttatttccctctgcagtcttacggcttccagccaacaaacggcgtgggctatcagccctacagagtggtggtgctgtcctttgagctgctgcacgcaccagcaacagtgtgcggcccaaagaagtctaccaatctggtgaagaacaagtgcgtgaacttcaacttcaacggactgaccggcacaggcgtgctgaccgagagcaataagaagttcctgccttttcagcagttcggcagggacatcgcagataccacagacgccgtgcgcgaccctcagaccctggagatcctggacatcacaccatgcagcttcggcggcgtgtccgtgatcacaccaggcaccaatacatccaaccaggtggccgtgctgtatcaggacgtgaattgtaccgatgtgcccgtggcaatccacgcagatcagctgacccctacatggcgggtgtactctaccggcagcaacgtgttccagacaagagccggatgcctgatcggagcagagcacgtgaacaatagctatgagtgcgacatccctatcggcgccggcatctgtgccagctaccagacccagacaaactccccatctggagcaggctccgtggccagccagtccatcatcgcctataccatgagcctgggcgccgagaacagcgtggcctactccaacaattctatcgccatccctaccaacttcacaatcagcgtgaccacagagatcctgccagtgtctatgaccaagacaagcgtggactgcacaatgtatatctgtggcgatagcaccgagtgctccaacctgctgctgcagtacggctccttttgtacccagctgaatagagccctgacaggcatcgccgtggagcaggataagaacacacaggaggtgttcgcccaggtgaagcagatctacaagaccccacccatcaaggactttggcggcttcaacttcagccagatcctgcctgatccaagcaagccctccaagaggtcttttatcgaggacctgctgttcaacaaggtgaccctggccgatgccggcttcatcaagcagtatggagattgcctgggagacatcgcagcccgcgacctgatctgtgcccagaagtttaatggcctgaccgtgctgcctccactgctgacagatgagatgatcgcccagtacacatctgccctgctggccggcaccatcacaagcggatggaccttcggcgcaggagccgccctgcagatcccttttgccatgcagatggcctataggttcaacggcatcggcgtgacccagaatgtgctgtacgagaaccagaagctgatcgccaatcagtttaacagcgccatcggcaagatccaggactctctgtcctctacagccagcgccctgggcaagctgcaggatgtggtgaatcagaacgcccaggccctgaataccctggtgaagcagctgagctccaacttcggcgccatctctagcgtgctgaatgacatcctgagccggctggacccccctgaggcagaggtgcagatcgacaggctgatcacaggccgcctgcagagcctgcagacctacgtgacacagcagctgatcagggcagcagagatcagagcctccgccaatctggccgccaccaagatgagcgagtgcgtgctgggacagtccaagagggtggacttttgtggcaagggctatcacctgatgtctttcccacagagcgcccctcacggcgtggtgtttctgcacgtgacctacgtgccagcccaggagaagaacttcaccacagcaccagccatctgccacgatggaaaggcacactttcctagggagggcgtgttcgtgtctaacggcacccactggtttgtgacacagcgcaatttctacgagccacagatcatcaccacagacaatacattcgtgagcggcaactgtgatgtggtgatcggcatcgtgaacaataccgtgtatgatccactgcagcccgagctggactcctttaaggaggagctggataagtacttcaagaatcacacctctcccgacgtggatctgggcgacatctccggcatcaatgcctctgtggtgaacatccagaaggagatcgaccggctgaacgaggtggccaagaatctgaacgagagcctgatcgatctgcaggagctgggcaagtatgagcagtacatcaagggctctggcagagagaacctgtatttccagggaggaggaggcagcggatacatccctgaggcaccaagggacggacaggcctacgtgcgcaaggatggcgagtgggtgctgctgtccacctttctgggccatcatcaccaccaccaccaccactga

SEQ ID NO: 1240 - DNA, 3846 bp, Artificial Sequence
  Description of Artificial Sequence: Synthetic polynucleotide
atgggcatcctgccaagcccaggaatgcccgccctgctgtctctggtgagcctgctgtccgtgctgctgatgggatgcgtggcagagacaggcacacagtgcgtgaacctgaccacaaggacccagctgccccctgcctataccaattctttcacacggggcgtgtactatcccgacaaggtgtttagaagctccgtgctgcactccacacaggatctgtttctgcctttcttttctaacgtgacctggttccacgccatccacgtgtccggcaccaatggcacaaagcggttcgacaatcccgtgctgccttttaacgatggcgtgtacttcgccagcaccgagaagtccaacatcatcagaggctggatctttggcaccacactggactctaagacacagagcctgctgatcgtgaacaatgccaccaacgtggtgatcaaggtgtgcgagttccagttttgtaatgatccattcctgggcgtgtactatcacaagaacaataagtcctggatggagtctgagtttcgcgtgtattctagcgccaacaattgcacatttgagtacgtgagccagcccttcctgatggacctggagggcaagcagggcaatttcaagaacctgagggagttcgtgtttaagaatatcgatggctacttcaagatctacagcaagcacaccccaatcaacctggtgcgcgacctgccacagggattctccgccctggagccactggtggatctgcccatcggcatcaacatcacccggtttcagacactgctggccctgcacagatcctacctgacaccaggcgactcctctagcggatggaccgcaggagctgccgcctactatgtgggctatctgcagccccggaccttcctgctgaagtacaacgagaatggcaccatcacagacgcagtggattgcgccctggaccccctgtctgagacaaagtgtacactgaagagctttaccgtggagaagggcatctatcagacaagcaatttcagggtgcagcctaccgagtccatcgtgcgctttcccaatatcacaaacctgtgcccttttggcgaggtgttcaacgccaccagattcgccagcgtgtacgcctggaatcggaagagaatctccaactgcgtggccgactattctgtgctgtacaactccgcctctttcagcacctttaagtgctatggcgtgtctcccacaaagctgaatgatctgtgctttaccaacgtgtacgccgatagcttcgtgatcaggggagacgaagtgagacagatcgcaccaggacagacaggaaagatcgcagactacaattataagctgcctgacgatttcaccggctgcgtgatcgcctggaactccaacaatctggattctaaagtgggcggcaactacaattatctgtacaggctgtttcgcaagtccaatctgaagccattcgagcgggacatctccacagagatctaccaggccggctctaccccctgcaatggcgtggagggctttaactgttatttccctctgcagtcttacggcttccagccaacaaacggcgtgggctatcagccctacagagtggtggtgctgtcctttgagctgctgcacgcaccagcaacagtgtgcggcccaaagaagtctaccaatctggtgaagaacaagtgcgtgaacttcaacttcaacggactgaccggcacaggcgtgctgaccgagagcaataagaagttcctgccttttcagcagttcggcagggacatcgcagataccacagacgccgtgcgcgaccctcagaccctggagatcctggacatcacaccatgcagcttcggcggcgtgtccgtgatcacaccaggcaccaatacatccaaccaggtggccgtgctgtatcaggacgtgaattgtaccgaggtgcccgtggcaatccacgcagatcagctgacccctacatggcgggtgtactctaccggcagcaacgtgttccagacaagagccggatgcctgatcggagcagagcacgtgaacaatagctatgagtgcgacatccctatcggcgccggcatctgtgccagctaccagacccagacaaactccccatctggagcaggctccgtggccagccagtccatcatcgcctataccatgagcctgggcgccgagaacagcgtggcctactccaacaattctatcgccatccctaccaacttcacaatcagcgtgaccacagagatcctgccagtgtctatgaccaagacaagcgtggactgcacaatgtatatctgtggcgatagcaccgagtgctccaacctgctgctgcagtacggctccttttgtacccagctgaatagagccctgacaggcatcgccgtggagcaggataagaacacacaggaggtgttcgcccaggtgaagcagatctacaagaccccacccatcaaggactttggcggcttcaacttcagccagatcctgcctgatccaagcaagccctccaagaggtcttttatcgaggacctgctgttcaacaaggtgaccctggccgatctaggcttcatcaagcagtatggagattgcctgggagacatcgcagcccgcgacctgatctgtgcccagaagtttaatggcctgaccgtgctgcctccactgctgacagatgagatgatcgcccagtacacatctgccctgctggccggcaccatcacaagcggatggaccttcggcgcaggagccgccctgcagatcccttttgccatgcagatggcctataggttcaacggcatcggcgtgacccagaatgtgctgtacgagaaccagaagctgatcgccaatcagtttaacagcgccatcggcaagatccaggactctctgtcctctacagccagcgccctgggcaagctgcaggatgtggtgaatcagaacgcccaggccctgaataccctggtgaagcagctgagctccaacttcggcgccatctctagcgtgctgaatgacatcctgagccggctggacccccctgaggcagaggtgcagatcgacaggctgatcacaggccgcctgcagagcctgcagacctacgtgacacagcagctgatcagggcagcagagatcagagcctccgccaatctggccgccaccaagatgagcgagtgcgtgctgggacagtccaagagggtggacttttgtggcaagggctatcacctgatgtctttcccacagagcgcccctcacggcgtggtgtttctgcacgtgacctacgtgccagcccaggagaagaacttcaccacagcaccagccatctgccacgatggaaaggcacactttcctagggagggcgtgttcgtgtctaacggcacccactggtttgtgacacagcgcaatttctacgagccacagatcatcaccacagacaatacattcgtgagcggcaactgtgatgtggtgatcggcatcgtgaacaataccgtgtatgatccactgcagcccgagctggactcctttaaggaggagctggataagtacttcaagaatcacacctctcccgacgtggatctgggcgacatctccggcatcaatgcctctgtggtgaacatccagaaggagatcgaccggctgaacgaggtggccaagaatctgaacgagagcctgatcgatctgcaggagctgggcaagtatgagcagtacatcaagggctctggcagagagaacctgtatttccagggaggaggaggcagcggatacatccctgaggcaccaagggacggacaggcctacgtgcgcaaggatggcgagtgggtgctgctgtccacctttctgggccatcatcaccaccaccaccaccactga

SEQ ID NO: 1241 - DNA, 3846 bp, Artificial Sequence
  Description of Artificial Sequence: Synthetic polynucleotide
atgggcatcctgccaagcccaggaatgcccgccctgctgtctctggtgagcctgctgtccgtgctgctgatgggatgcgtggcagagacaggcacacagtgcgtgaacctgaccacaaggacccagctgccccctgcctataccaattctttcacacggggcgtgtactatcccgacaaggtgtttagaagctccgtgctgcactccacacaggatctgtttctgcctttcttttctaacgtgacctggttccacgccatccacgtgtccggcaccaatggcacaaagcggttcgacaatcccgtgctgccttttaacgatggcgtgtacttcgccagcaccgagaagtccaacatcatcagaggctggatctttggcaccacactggactctaagacacagagcctgctgatcgtgaacaatgccaccaacgtggtgatccgagtgtgcgagttccagttttgtgaaaatccattcctgggcgtgtactatcacaagaacaataagtcctggcgcgaggaagagtttcgctggtattctagcgccaacaattgcacatttgagtacgtgagccagcccttcctgatggacctggagggcaagcagggcaatttcaagaacctgagggagttcgtgtttaagaatatcgatggctacttcaagatctacagcaagcacaccccaatcaacctggtgcgcgacctgccacagggattctccgccctggagccactgatggatctgcccatcggcatcaacatcacccattttcagacactgctggccctgcacagatcctacctgacaccaggcgactcctctagcggatggaccgcaggagctgccgcctactatgtgggctatctgcagccccggaccttcctgctgaagtacaacgagaatggcaccatcacagacgcagtggattgcgccctggaccccctgtctgagacaaagtgtacactgaagagctttaccgtggagaagggcatctatcagacaagcaatttcagggtgcagcctaccgagtccatcgtgcgctttcccaatatcacaaacctgtgcccttttggcgaggtgttcaacgccaccagattcgccagcgtgtacgcctggaatcggaagagaatctccaactgcgtggccgactattctgtgctgtacaactccgcctctttcagcacctttaagtgctatggcgtgtctcccacaaagctgaatgatctgtgctttaccaacgtgtacgccgatagcttcgtgatcaggggagacgaagtgagacagatcgcaccaggacagacaggaaagatcgcagactacaattataagctgcctgacgatttcaccggctgcgtgatcgcctggaactccaacaatctggattctaaagtgggcggcaactacaattatctgtacaggctgtttcgcaagtccaatctgaagccattcgagcgggacatctccacagagatctaccaggccggctctaccccctgcaatggcgtggagggctttaactgttatttccctctgcagtcttacggcttccagccaacaaacggcgtgggctatcagccctacagagtggtggtgctgtcctttgagctgctgcacgcaccagcaacagtgtgcggcccaaagaagtctaccaatctggtgaagaacaagtgcgtgaacttcaacttcaacggactgaccggcacaggcgtgctgaccgagagcaataagaagttcctgccttttcagcagttcggcagggacatcgcagataccacagacgccgtgcgcgaccctcagaccctggagatcctggacatcacaccatgcagcttcggcggcgtgtccgtgatcacaccaggcaccaatacatccaaccaggtggccgtgctgtatcaggacgtgaattgtaccgaggtgcccgtggcaatccacgcagatcagctgacccctacatggcgggtgtactctaccggcagcaacgtgttccagacaagagccggatgcctgatcggagcagagcacgtgaacaatagctatgagtgcgacatccctatcggcgccggcatctgtgccagctaccagacccagacaaactccccatctggagcaggctccgtggccagccagtccatcatcgcctataccatgagcctgggcgccgagaacagcgtggcctactccaacaattctatcgccatccctaccaacttcacaatcagcgtgaccacagagatcctgccagtgtctatgaccaagacaagcgtggactgcacaatgtatatctgtggcgatagcaccgagtgctccaacctgctgctgcagtacggctccttttgtacccagctgaatagagccctgacaggcatcgccgtggagcaggataagaacacacaggaggtgttcgcccaggtgaagcagatctacaagaccccacccatcaaggactttggcggcttcaacttcagccagatcctgcctgatccaagcaagccctccaagaggtcttttatcgaggacctgctgttcaacaaggtgaccctggccgatgccggcttcatcaagcagtatggagattgcctgggagacatcgcagcccgcgacctgatctgtgcccagaagtttaatggcctgaccgtgctgcctccactgctgacagatgagatgatcgcccagtacacatctgccctgctggccggcaccatcacaagcggatggaccttcggcgcaggagccgccctgcagatcccttttgccatgcagatggcctataggttcaacggcatcggcgtgacccagaatgtgctgtacgagaaccagaagctgatcgccaatcagtttaacagcgccatcggcaagatccaggactctctgtcctctacagccagcgccctgggcaagctgcaggatgtggtgaatcagaacgcccaggccctgaataccctggtgaagcagctgagctccaacttcggcgccatctctagcgtgctgaatgacatcctgagccggctggacccccctgaggcagaggtgcagatcgacaggctgatcacaggccgcctgcagagcctgcagacctacgtgacacagcagctgatcagggcagcagagatcagagcctccgccaatctggccgccaccaagatgagcgagtgcgtgctgggacagtccaagagggtggacttttgtggcaagggctatcacctgatgtctttcccacagagcgcccctcacggcgtggtgtttctgcacgtgacctacgtgccagcccaggagaagaacttcaccacagcaccagccatctgccacgatggaaaggcacactttcctagggagggcgtgttcgtgtctaacggcacccactggtttgtgacacagcgcaatttctacgagccacagatcatcaccacagacaatacattcgtgagcggcaactgtgatgtggtgatcggcatcgtgaacaataccgtgtatgatccactgcagcccgagctggactcctttaaggaggagctggataagtacttcaagaatcacacctctcccgacgtggatctgggcgacatctccggcatcaatgcctctgtggtgaacatccagaaggagatcgaccggctgaacgaggtggccaagaatctgaacgagagcctgatcgatctgcaggagctgggcaagtatgagcagtacatcaagggctctggcagagagaacctgtatttccagggaggaggaggcagcggatacatccctgaggcaccaagggacggacaggcctacgtgcgcaaggatggcgagtgggtgctgctgtccacctttctgggccatcatcaccaccaccaccaccactga

SEQ ID NO: 1242 - DNA, 3846 bp, Artificial Sequence
  Description of Artificial Sequence: Synthetic polynucleotide
atgggcatcctgccaagcccaggaatgcccgccctgctgtctctggtgagcctgctgtccgtgctgctgatgggatgcgtggcagagacaggcacacagtgcgtgaacctgaccacaaggacccagctgccccctgcctataccaattctttcacacggggcgtgtactatcccgacaaggtgtttagaagctccgtgctgcactccacacaggatctgtttctgcctttcttttctaacgtgacctggttccacgccatccacgtgtccggcaccaatggcacaaagcggttcgacaatcccgtgctgccttttaacgatggcgtgtacttcgccgctattgagaagtccaacatcatcagaggctggatctttggcaccacactggactctaagacacagagcctgctgatcgtgaacaatgccaccaacgtggtgatcaaggtgtgcgagttccagttttgtaatgatccattcctgggcgtgtactatcacaagaacaataagtcctggatggagtctgagtttcgcgtgtattctagcgccaacaattgcacatttgagtacgtgagccagcccttcctgatggacctggagggcaagcagggcaatttcaagaacctgagggagttcgtgtttaagaatatcgatggctacttcaagatctacagcaagcacaccccaatcaacctggtgcgcgacctgccacagggattctccgccctggagccactggtggatctgcccatcggcatcaacatcacccggtttcagacactgctggccctgcacagatcctacctgacaccaggcgactcctctagcggatggaccgcaggagctgccgcctactatgtgggctatctgcagccccggaccttcctgctgaagtacaacgagaatggcaccatcacagacgcagtggattgcgccctggaccccctgtctgagacaaagtgtacactgaagagctttaccgtggagaagggcatctatcagacaagcaatttcagggtgcagcctaccgagtccatcgtgcgctttcccaatatcacaaacctgtgcccttttggcgaggtgttcaacgccaccagattcgccagcgtgtacgcctggaatcggaagagaatctccaactgcgtggccgactattctgtgctgtacaactccgcctctttcagcacctttaagtgctatggcgtgtctcccacaaagctgaatgatctgtgctttaccaacgtgtacgccgatagcttcgtgatcaggggagacgaagtgagacagatcgcaccaggacagacaggaaagatcgcagactacaattataagctgcctgacgatttcaccggctgcgtgatcgcctggaactccaacaatctggattctaaagtgggcggcaactacaattatctgtacaggctgtttcgcaagtccaatctgaagccattcgagcgggacatctccacagagatctaccaggccggctctaccccctgcaatggcgtggagggctttaactgttatttccctctgcagtcttacggcttccagccaacaaacggcgtgggctatcagccctacagagtggtggtgctgtcctttgagctgctgcacgcaccagcaacagtgtgcggcccaaagaagtctaccaatctggtgaagaacaagtgcgtgaacttcaacttcaacggactgaccggcacaggcgtgctgaccgagagcaataagaagttcctgccttttcagcagttcggcagggacatctcggataccacagacgccgtgcgcgaccctcagaccctggagatcctggacatcacaccatgcagcttcggcggcgtgtccgtggtcacaccaggcaccaatacatccaaccaggtggccgtgctgtatcaggacgtgaattgtaccgaggtgcccgtggcaatccacgcagatcagctgacccctacatggcgggtgtactctaccggcagcaacgtgttccagacaagagccggatgcctgatcggagcagagcacgtgaacaatagctatgagtgcgacatccctatcggcgccggcatctgtgccagctaccagacccagacaaactccccatctggagcaggctccgtggccagccagtccatcatcgcctataccatgagcctgggcgccgagaacagcgtggcctactccaacaattctatcgccatccctaccaacttcacaatcagcgtgaccacagagatcctgccagtgtctatgaccaagacaagcgtggactgcacaatgtatatctgtggcgatagcaccgagtgctccaacctgctgctgcagtacggctccttttgtacccagctgaatagagccctgacaggcatcgccgtggaggaagataagaacacacaggaggtgttcgcccaggtgaagcagatctacaagaccccacccatcaaggactttggcggcttcaacttcagccagatcctgcctgatccaagcaagccctccaagaggtcttttatcgaggacctgctgttcaacaaggtgaccctggccgatgccggcttcatcaagcagtatggagattgcctgggagacatcgcagcccgcgacctgatctgtgcccagaagtttaatggcctgaccgtgctgcctccactgctgacagatgagatgatcgcccagtacacatcttcactgctggccggcaccatcacagcgggatggaccttcggcgcaggagccgccctgcagatcccttttgccatgcagatggcctataggttcaacggcatcggcgtgacccagaatgtgctgtacgagaaccagaagctgatcgccaatcagtttaacagcgccatcggcaagatccaggactctctgtcctctacagccagcgccctgggcaagctgcaggatgtggtgaatcagaacgcccaggccctgaataccctggtgaagcagctgagctccaacttcggcgccatctctagcgtgctgaatgacatcctgagccggctggacccccctgaggcagaggtgcagatcgacaggctgatcacaggccgcctgcagagcctgcagacctacgtgacacagcagctgatcagggcagcagagatcagagcctccgccaatctggccgccaccaagatgagcgagtgcgtgaaaggacagtccaagagggtggacttttgtggcaagggctatcacctgatgtctttcccacagagcgcccctcacggcgtggtgtttctgcacgtgacctacgtgccagcccaggagaagaacttcaccacagcaccagccatctgccacgatggaaaggcacactttcctagggagggcgtgttcgtgtctaacggcacccactggtttgtgacacagcgcaatttctacgagccacagatcatcaccacagacaatacattcgtgagcggcaactgtgatgtggtgatcggcatcgtgaacaataccgtgtatgatccactgcagcccgagctggactcctttaaggaggagctggataagtacttcaagaatcacacctctcccgacgtggatctgggcgacatctccggcatcaatgcctctgtggtgaacatccagaaggagatcgaccggctgaacgaggtggccaagaatctgaacgagagcctgatcgatctgcaggagctgggcaagtatgagcagtacatcaagggctctggcagagagaacctgtatttccagggaggaggaggcagcggatacatccctgaggcaccaagggacggacaggcctacgtgcgcaaggatggcgagtgggtgctgctgtccacctttctgggccatcatcaccaccaccaccaccactga

SEQ ID NO: 1243 - DNA, 3846 bp, Artificial Sequence
  Description of Artificial Sequence: Synthetic polynucleotide
atgggcatcctgccaagcccaggaatgcccgccctgctgtctctggtgagcctgctgtccgtgctgctgatgggatgcgtggcagagacaggcacacagtgcgtgaacctgaccacaaggacccagctgccccctgcctataccaattctttcacacggggcgtgtactatcccgacaaggtgtttagaagctccgtgctgcactccacacaggatctgtttctgcctttcttttctaacgtgacctggttccacgccatccacgtgtccggcaccaatggcacaaagcggttcgacaatcccgtgctgccttttaacgatggcgtgtacttcgccagcaccgagaagtccaacatcatcagaggctggatctttggcaccacactggactctaagacacagagcctgctgatcgtgaacaatgccaccaacgtggtgatcaaggtgtgcgagttccagttttgtaaagatccattcctgggcgtgtactatcacaagaacaataagtcctggatggagtctgagtttcgcgtgtattctagcgccaacaattgcacatttgagtacgtgagccagcccttcctgatggacctggagggcaagcagggcaatttcaagaacctgagggagttcgtgtttaagaatatcgatggctacttcaagatctacagcaagcacaccccaatcaacctggtgcgcgacctgccacagggattctccgccctggagccactggtggatctgcccatcggcatcaacatcacccggtttcagacactgctggccctgcacagatcctacctgacaccaggcgactcctctagcggatggaccgcaggagctgccgcctactatgtgggctatctgcagccccggaccttcctgctgaagtacaacgagaatggcaccatcacagacgcagtggattgcgccctggaccccctgtctgagacaaagtgtacactgaagagctttaccgtggagaagggcatctatcagacaagcaatttcagggtgcagcctaccgagtccatcgtgcgctttcccaatatcacaaacctgtgcccttttggcgaggtgttcaacgccaccagattcgccagcgtgtacgcctggaatcggaagagaatctccaactgcgtggccgactattctgtgctgtacaactccgcctctttcagcacctttaagtgctatggcgtgtctcccacaaagctgaatgatctgtgctttaccaacgtgtacgccgatagcttcgtgatcaggggagacgaagtgagacagatcgcaccaggacagacaggaaagatcgcagactacaattataagctgcctgacgatttcaccggctgcgtgatcgcctggaactccaacaatctggattctaaagtgggcggcaactacaattatctgtacaggctgtttcgcaagtccaatctgaagccattcgagcgggacatctccacagagatctaccaggccggctctaccccctgcaatggcgtggagggctttaactgttatttccctctgcagtcttacggcttccagccaacaaacggcgtgggctatcagccctacagagtggtggtgctgtcctttgagctgctgcacgcaccagcaacagtgtgcggcccaaagaagtctaccaatctggtgaagaacaagtgcgtgaacttcaacttcaacggactgaccggcacaggcgtgctgaccgagagcaataagaagttcctgccttttcagcagttcggcagggacatcgcagataccacagacgccgtgcgcgaccctcagaccctggagatcctggacatcacaccatgcagcttcggcggcgtgtccgtgatcacaccaggcaccaatacatccaaccaggtggccgtgctgtatcaggacgtgaattgtaccgaggtgcccgtggcaatccacgcagatcagctgacccctacatggcgggtgtactctaccggcagcaacgtgttccagacaagagccggatgcctgatcggagcagagcacgtgaacaatagctatgagtgcgacatccctatcggcgccggcatctgtgccagctaccagacccagacaaactccccatctggagcaggctccgtggccagccagtccatcatcgcctataccatgagcctgggcgccgagaacagcgtggcctactccaacaattctatcgccatccctaccaacttcacaatcagcgtgaccacagagatcctgccagtgtctatgaccaagacaagcgtggactgcacaatgtatatctgtggcgatagcaccgagtgctccaacctgctgctgcagtacggctccttttgtacccagctgaatagagccctgacaggcatcgccgtggagcaggataagaacacacaggaggtgttcgcccaggtgaagcagatctacaagaccccacccatcaaggactttggcggcttcaacttcagccagatcctgcctgatccaagcaagccctccaagaggtcttttatcgaggacctgctgttcaacaaggtgaccctggccgatgccggcttcatcaagcagtatggagattgcctgggagacatcgcagcccgcgacctgatctgtgcccagaagtttaatggcctgaccgtgctgcctccactgctgacagatgagatgatcgcccagtacacatctgccctgctggccggcaccatcacaagcggatggaccttcggcgcaggagccgccctgcagatcccttttgccatgcagatggcctataggttcaacggcatcggcgtgacccagaatgtgctgtacgagaaccagaagctgatcgccaatcagtttaacagcgccatcggcaagatccaggactctctgtcctctacagccagcgccctgggcaagctgcaggatgtggtgaatcagaacgcccaggccctgaataccctggtgaagcagctgagctccaacttcggcgccatctctagcgtgctgaatgacatcctgagccggctggacccccctgaggcagaggtgcagatcgacaggctgatcacaggccgcctgcagagcctgcagacctacgtgacacagcagctgatcagggcagcagagatcagagcctccgccaatctggccgccaccaagatgagcgagtgcgtgctgggacagtccaagagggtggacttttgtggcaagggctatcacctgatgtctttcccacagagcgcccctcacggcgtggtgtttctgcacgtgacctacgtgccagcccaggagaagaacttcaccacagcaccagccatctgccacgatggaaaggcacactttcctagggagggcgtgttcgtgtctaacggcacccactggtttgtgacacagcgcaatttctacgagccacagatcatcaccacagacaatacattcgtgagcggcaactgtgatgtggtgatcggcatcgtgaacaataccgtgtatgatccactgcagcccgagctggactcctttaaggaggagctggataagtacttcaagaatcacacctctcccgacgtggatctgggcgacatctccggcatcaatgcctctgtggtgaacatccagaaggagatcgaccggctgaacgaggtggccaagaatctgaacgagagcctgatcgatctgcaggagctgggcaagtatgagcagtacatcaagggctctggcagagagaacctgtatttccagggaggaggaggcagcggatacatccctgaggcaccaagggacggacaggcctacgtgcgcaaggatggcgagtgggtgctgctgtccacctttctgggccatcatcaccaccaccaccaccactga

SEQ ID NO: 1244 - DNA, 3846 bp, Artificial Sequence
  Description of Artificial Sequence: Synthetic polynucleotide
atgggcatcctgccaagcccaggaatgcccgccctgctgtctctggtgagcctgctgtccgtgctgctgatgggatgcgtggcagagacaggcacacagtgcgtgaacctgaccacaaggacccagctgccccctgcctataccaattctttcacacggggcgtgtactatcccgacaaggtgtttagaagctccgtgctgcactccacacaggatctgtttctgcctttcttttctaacgtgacctggttccacgccatccacgtgtccggcaccaatggcacaaagcggttcgacaatcccgtgctgccttttaacgatggcgtgtacttcgccagcaccgagaagtccaacatcatcagaggctggatctttggcaccacactggactctaagacacagagcctgctgatcgtgaacaatgccaccaacgtggtgatcaaggtgtgcgagttccagttttgtaatgatccattcctgggcgtgtactatcacaagaacaataagtcctggatggagtctgagtttcgcgtgtattctagcgccaacaattgcacatttgagtacgtgagccagcccttcctgatggacctggagggcaagcagggcaatttcaagaacctgagggagttcgtgtttaagaatatcgatggctacttcaagatctacagcaagcacaccccaatcaacctggtgcgcgacctgccacagggattctccgccctggagccactggtggatctgcccatcggcatcaacatcacccggtttcagacactgctggccctgcacagatcctacctgacaccaggcgactcctctagcggatggaccgcaggagctgccgcctactatgtgggctatctgcagccccggaccttcctgctgaagtacaacgagaatggcaccatcacagacgcagtggattgcgccctggaccccctgtctgagacaaagtgtacactgaagagctttaccgtggagaagggcatctatcagacaagcaatttcagggtgcagcctaccgagtccatcgtgcgctttcccaatatcacaaacctgtgcccttttggcgaggtgttcaacgccaccagattcgccagcgtgtacgcctggaatcggaagagaatctccaactgcgtggccgactattctgtgctgtacaactccgcctctttcagcacctttaagtgctatggcgtgtctcccacaaagctgaatgatctgtgctttaccaacgtgtacgccgatagcttcgtgatcaggggagacgaagtgagacagatcgcaccaggacagacaggaaagatcgcagactacaattataagctgcctgacgatttcaccggctgcgtgatcgcctggaactccaacaatctggattctaaagtgggcggcaactacaattatctgtacaggctgtttcgcaagtccaatctgaagccattcgagcgggacatctccacagagatctaccaggccggctctaccccctgcaatggcgtggagggctttaactgttatttccctctgcagtcttacggcttccagccaacaaacggcgtgggctatcagccctacagagtggtggtgctgtcctttgagctgctgcacgcaccagcaacagtgtgcggcccaaagaagtctaccaatctggtgaagaacaagtgcgtgaacttcaacttcaacggactgaccggcacaggcgtgctgaccgagagcaataagaagttcctgccttttcagcagttcggcagggacatcgcagataccacagacgccgtgcgcgaccctcagaccctggagatcctggacatcacaccatgcagcttcggcggcgtgtccgtgatcacaccaggcaccaatacatccaaccaggtggccgtgctgtatcaggacgtgaattgtaccgaggtgcccgtggcaatccacgcagatcagctgacccctacatggcgggtgtactctaccggcagcaacgtgttccagacaagagccggatgcctgatcggagcagagcacgtgaacaatagctatgagtgcgacatccctatcggcgccggcatctgtgccagctaccagacccagacaaactccccatctggagcaggctccgtggccagccagtccatcatcgcctataccatgagcctgggcgccgagaacagcgtggcctactccaacaattctatcgccatccctaccaacttcacaatcagcgtgaccacagagatcctgccagtgtctatgaccaagacaagcgtggactgcacaatgtatatctgtggcgatagcaccgagtgctccaacctgctgctgcagtacggctccttttgtacccagctgaatagagccctgacaggcatcgccgtggagcaggataagaacacacaggaggtgttcgcccaggtgaagcagatctacaagaccccacccatcaaggactttggcggcttcaacttcagccagatcctgcctgatccaagcaagccctccaagaggtcttttatcgaggacctgctgttcaacaaggtgaccctggccgatgccggcttcatcaagcagtatggagattgcctgggagacatcgcagcccgcgacctgatctgtgcccagaagtttaatggcctgaccgtgctgcctccactgctgacagatgagatgatcgcccagtacacatctgccctgctggccggcaccatcacaagcggatggaccttcggcgcaggagccgccctgcagatcccttttgccatgcagatggcctataggttcaacggcatcggcgtgacccagaatgtgctgtacgagaaccagaagctgatcgccaatcagtttaacagcgccatcggcaagatccaggactctctgtcctctacagccagcgccctgggcaagctgcaggatgtggtgaatcagaacgcccaggccctgaataccctggtgaagcagctgagctccaacttcggcgccatctctagcgtgctgaatgacatcctgagccggctggacccccctgaggcagaggtgcagatcgacaggctgatcacaggccgcctgcagagcctgcagacctacgtgacacagcagctgatcagggcagcagagatcagagcctccgccaatctggccgccaccaagatgagcgagtgcgtgctgggacagtccaagagggtggacttttgtggcaatggctatcacctgatgtctttcccacagagcgcccctcacggcgtggtgtttctgcacgtgacctacgtgccagcccaggagaagaacttcaccacagcaccagccatctgccacgatggaaaggcacactttcctagggagggcgtgttcgtgtctaacggcacccactggtttgtgacacagcgcaatttctacgagccacagatcatcaccacagacaatacattcgtgagcggcaactgtgatgtggtgatcggcatcgtgaacaataccgtgtatgatccactgcagcccgagctggactcctttaaggaggagctggataagtacttcaagaatcacacctctcccgacgtggatctgggcgacatctccggcatcaatgcctctgtggtgaacatccagaaggagatcgaccggctgaacgaggtggccaagaatctgaacgagagcctgatcgatctgcaggagctgggcaagtatgagcagtacatcaagggctctggcagagagaacctgtatttccagggaggaggaggcagcggatacatccctgaggcaccaagggacggacaggcctacgtgcgcaaggatggcgagtgggtgctgctgtccacctttctgggccatcatcaccaccaccaccaccactga

SEQ ID NO: 1245 - DNA, 3846 bp, Artificial Sequence
  Description of Artificial Sequence: Synthetic polynucleotide
atgggcatcctgccaagcccaggaatgcccgccctgctgtctctggtgagcctgctgtccgtgctgctgatgggatgcgtggcagagacaggcacacagtgcgtgaacctgaccacaaggacccagctgccccctgcctataccaattctttcacacggggcgtgtactatcccgacaaggtgtttagaagctccgtgctgcactccacacaggatctgtttctgcctttcttttctaacgtgacctggttccacgccatccacgtgtccggcaccaatggcacaaagcggttcgacaatcccgtgctgccttttaacgatggcgtgtacttcgccagcaccgagaagtccaacatcatcagaggctggatctttggcaccacactggactctaagacacagagcctgctgatcgtgaacaatgccaccaacgtggtgatcaaggtgtgcgagttccagttttgtaatgatccattcctgggcgtgtactatcacaagaacaataagtcctggatggagtctgagtttcgcgtgtattctagcgccaacaattgcacatttgagtacgtgagccagcccttcctgatggacctggagggcaagcagggcaatttcaagaacctgagggagttcgtgtttaagaatatcgatggctacttcaagatctacagcaagcacaccccaatcaacctggtgcgcgacctgccacagggattctccgccctggagccactggtggatctgcccatcggcatcaacatcacccggtttcagacactgctggccctgcacagatcctacctgacaccaggcgactcctctagcggatggaccgcaggagctgccgcctactatgtgggctatctgcagccccggaccttcctgctgaagtacaacgagaatggcaccatcacagacgcagtggattgcgccctggaccccctgtctgagacaaagtgtacactgaagagctttaccgtggagaagggcatctatcagacaagcaatttcagggtgcagcctaccgagtccatcgtgcgctttcccaatatcacaaacctgtgcccttttggcgaggtgttcaacgccaccagattcgccagcgtgtacgcctggaatcggaagagaatctccaactgcgtggccgactattctgtgctgtacaactccgcctctttcagcacctttaagtgctatggcgtgtctcccacaaagctgaatgatctgtgctttaccaacgtgtacgccgatagcttcgtgatcaggggagacgaagtgagacagatcgcaccaggacagacaggaaagatcgcagactacaattataagctgcctgacgatttcaccggctgcgtgatcgcctggaactccaacaatctggattctaaagtgggcggcaactacaattatctgtacaggctgtttcgcaagtccaatctgaagccattcgagcgggacatctccacagagatctaccaggccggctctaccccctgcaatggcgtggagggctttaactgttatttccctctgcagtcttacggcttccagccaacaaacggcgtgggctatcagccctacagagtggtggtgctgtcctttgagctgctgcacgcaccagcaacagtgtgcggcccaaagaagtctaccaatctggtgaagaacaagtgcgtgaacttcaacttcaacggactgaccggcacaggcgtgctgaccgagagcaataagaagttcctgccttttcagcagttcggcagggacatcgcagataccacagacgccgtgcgcgaccctcagaccctggagatcctggacatcacaccatgcagcttcggcggcgtgtccgtgatcacaccaggcaccaatacatccaaccaggtggccgtgctgtatcaggacgtgaattgtaccgaggtgcccgtggcaatccacgcagatcagctgacccctacatggcgggtgtactctaccggcagcaacgtgttccagacaagagccggatgcctgatcggagcagagcacgtgaacaatagctatgagtgcgacatccctatcggcgccggcatctgtgccagctaccagacccagacaaactccccatctggagcaggctccgtggccagccagtccatcatcgcctataccatgagcctgggcgccgagaacagcgtggcctactccaacaattctatcgccatccctaccaacttcacaatcagcgtgaccacagagatcctgccagtgtctatgaccaagacaagcgtggactgcacaatgtatatctgtggcgatagcaccgagtgctccaacctgctgctgcagtacggctccttttgtacccagctgaatagagccctgacaggcatcgccgtggagcaggataagaacacacaggaggtgttcgcccaggtgaagcagatctacaagaccccacccatcaaggactttggcggcttcaacttcagccagatcctgcctgatccaagcaagccctccaagaggtcttttatcgaggacctgctgttcaacaaggtgaccctggccgatgccggcttcatcaagcagtatggagattgcctgggagacatcgcagcccgcgacctgatctgtgcccagaagtttaatggcctgaccgtgctgcctccactgctgacagatgagatgatcgcccagtacacatctgccctgctggccggcaccatcacaagcggatggaccttcggcgcaggagccgccctgcagatcccttttgccatgcagatggcctataggttcaacggcatcggcgtgacccagaatgtgctgtacgagaaccagaagctgatcgccaatcagtttaacagcgccatcggcaagatccaggactctctgtcctctacagccagcgccctgggcaagctgcaggatgtggtgaatcagaacgcccaggccctgaataccctggtgaagcagctgagctccaacttcggcgccatctctagcgtgctgaatgacatcctgagccggctggacccccctgaggcagaggtgcagatcgacaggctgatcacaggccgcctgcagagcctgcagacctacgtgacacagcagctgatcagggcagcagagatcagagcctccgccaatctggccgccaccaagatgagcgagtgcgtgctgggacagtccaatagggtggacttttgtggcaagggctatcacctgatgtctttcccacagagcgcccctcacggcgtggtgtttctgcacgtgacctacgtgccagcccaggagaagaacttcaccacagcaccagccatctgccacgatggaaaggcacactttcctagggagggcgtgttcgtgtctaacggcacccactggtttgtgacacagcgcaatttctacgagccacagatcatcaccacagacaatacattcgtgagcggcaactgtgatgtggtgatcggcatcgtgaacaataccgtgtatgatccactgcagcccgagctggactcctttaaggaggagctggataagtacttcaagaatcacacctctcccgacgtggatctgggcgacatctccggcatcaatgcctctgtggtgaacatccagaaggagatcgaccggctgaacgaggtggccaagaatctgaacgagagcctgatcgatctgcaggagctgggcaagtatgagcagtacatcaagggctctggcagagagaacctgtatttccagggaggaggaggcagcggatacatccctgaggcaccaagggacggacaggcctacgtgcgcaaggatggcgagtgggtgctgctgtccacctttctgggccatcatcaccaccaccaccaccactga

SEQ ID NO: 1246 - DNA, 3846 bp, Artificial Sequence
  Description of Artificial Sequence: Synthetic polynucleotide
atgggcatcctgccaagcccaggaatgcccgccctgctgtctctggtgagcctgctgtccgtgctgctgatgggatgcgtggcagagacaggcacacagtgcgtgaacctgaccacaaggacccagctgccccctgcctataccaattctttcacacggggcgtgtactatcccgacaaggtgtttagaagctccgtgctgcactccacacaggatctgtttctgcctttcttttctaacgtgacctggttccacgccatccacgtgtccggcaccaatggcacaaagcggttcgacaatcccgtgctgccttttaacgatggcgtgtacttcgccagcaccgagaagtccaacatcatcagaggctggatctttggcaccacactggactctaagacacagagcctgctgatcgtgaacaatgccaccaacgtggtgatcaaggtgtgcgagttccagttttgtaatgatccattcctgggcgtgtactatcacaagaacaataagtcctggatggagtctgagtttcgcgtgtattctagcgccaacaattgcacatttgagtacgtgagccagcccttcctgatggacctggagggcaagcagggcaatttcaagaacctgagggagttcgtgtttaagaatatcgatggctacttcaagatctacagcaagcacaccccaatcaacctggtgcgcgacctgccacagggattctccgccctggagccactggtggatctgcccatcggcatcaacatcacccggtttcagacactgctggccctgcacagatcctacctgacaccaggcgactcctctagcggatggaccgcaggagctgccgcctactatgtgggctatctgcagccccggaccttcctgctgaagtacaacgagaatggcaccatcacagacgcagtggattgcgccctggaccccctgtctgagacaaagtgtacactgaagagctttaccgtggagaagggcatctatcagacaagcaatttcagggtgcagcctaccgagtccatcgtgcgctttcccaatatcacaaacctgtgcccttttggcgaggtgttcaacgccaccagattcgccagcgtgtacgcctggaatcggaagagaatctccaactgcgtggccgactattctgtgctgtacaactccgcctctttcagcacctttaagtgctatggcgtgtctcccacaaagctgaatgatctgtgctttaccaacgtgtacgccgatagcttcgtgatcaggggagacgaagtgagacagatcgcaccaggacagacaggaaagatcgcagactacaattataagctgcctgacgatttcaccggctgcgtgatcgcctggaactccaacaatctggattctaaagtgggcggcaactacaattatctgtacaggctgtttcgcaagtccaatctgaagccattcgagcgggacatctccacagagatctaccaggccggctctaccccctgcaatggcgtggagggctttaactgttatttccctctgcagtcttacggcttccagccaacaaacggcgtgggctatcagccctacagagtggtggtgctgtcctttgagctgctgcacgcaccagcaacagtgtgcggcccaaagaagtctaccaatctggtgaagaacaagtgcgtgaacttcaacttcaacggactgaccggcacaggcgtgctgaccgagagcaataagaagttcctgccttttcagcagttcggcagggacatcgcagataccacagacgccgtgcgcgaccctcagaccctggagatcctggacatcacaccatgcagcttcggcggcgtgtccgtgatcacaccaggcaccaatacatccaaccaggtggccgtgctgtatcaggacgtgaattgtaccgaggtgcccgtggcaatccacgcagatcagctgacccctacatggcgggtgtactctaccggcagcaacgtgttccagacaagagccggatgcctgatcggagcagagcacgtgaacaatagctatgagtgcgacatccctatcggcgccggcatctgtgccagctaccagacccagacaaactccccatctggagcaggctccgtggccagccagtccatcatcgcctataccatgagcctgggcgccgagaacagcgtggcctactccaacaattctatcgccatccctaccaacttcacaatcagcgtgaccacagagatcctgccagtgtctatgaccaagacaagcgtggactgcacaatgtatatctgtggcgatagcaccgagtgctccaacctgctgctgcagtacggctccttttgtacccagctgaatagagccctgacaggcatcgccgtggagcaggataagaacacacaggaggtgttcgcccaggtgaagcagatctacaagaccccacccatcaaggactttggcggcttcaacttcagccagatcctgcctgatccaagcaagccctccaagaggtcttttatcgaggacctgctgttcaacaaggtgaccctggccgatgccggcttcatcaagcagtatggagattgcctgggagacatcgcagcccgcgacctgatctgtgcccagaagtttaatggcctgaccgtgctgcctccactgctgacagatgagatgatcgcccagtacacatctgccctgctggccggcaccatcacaagcggatggaccttcggcgcaggagccgccctgcagatcccttttgccatgcagatggcctataggttcaacggcatcggcgtgacccagaatgtgctgtacgagaaccagaagctgatcgccaatcagtttaacagcgccatcggcaagatccaggactctctgtcctctacagccagcgccctgggcaagctgcaggatgtggtgaatcagaacgcccaggccctgaataccctggtgaagcagctgagctccaacttcggcgccatctctagcgtgctgaatgacatcctgagccggctggacccccctgaggcagaggtgcagatcgacaggctgatcacaggccgcctgcagagcctgcagacctacgtgacacagcagctgatcagggcagcagagatcagagcctccgccaatctggccgccaccaagatgagcgagtgcgtgctgggacagtccaagagggtggacttttgtggcaagggctatcacctgatgtctttcccacagagcgcccctcacggcgtggtgtttctgcacgtgacctacgtgccagcccaggagaagaacttcaccacagcaccagccatctgccacgatggaaaggcacactttcctagggagggcgtgttcgtgtctaacggcacccactggtttgtgacacagcgcaatttctacgagccacagatcatcaccacagacaatacattcgtgagcggcaactgtgatgtggtgtttggcatcgtgaacaataccgtgtatgatccactgcagcccgagctggactcctttaaggaggagctggataagtacttcaagaatcacacctctcccgacgtggatctgggcgacatctccggcatcaatgcctctgtggtgaacatccagaaggagatcgaccggctgaacgaggtggccaagaatctgaacgagagcctgatcgatctgcaggagctgggcaagtatgagcagtacatcaagggctctggcagagagaacctgtatttccagggaggaggaggcagcggatacatccctgaggcaccaagggacggacaggcctacgtgcgcaaggatggcgagtgggtgctgctgtccacctttctgggccatcatcaccaccaccaccaccactga

SEQ ID NO: 1247 - DNA, 3846 bp, Artificial Sequence
  Description of Artificial Sequence: Synthetic polynucleotide
atgggcatcctgccaagcccaggaatgcccgccctgctgtctctggtgagcctgctgtccgtgctgctgatgggatgcgtggcagagacaggcacacagtgcgtgaacctgaccacaaggacccagctgccccctgcctataccaattctttcacacggggcgtgtactatcccgacaaggtgtttagaagctccgtgctgcactccacacaggatctgtttctgcctttcttttctaacgtgacctggttccacgccatccacgtgtccggcaccaatggcacaaagcggttcgacaatcccgtgctgccttttaacgatggcgtgtacttcgccagcaccgagaagtccaacatcatcagaggctggatctttggcaccacactggactctaagacacagagcctgctgatcgtgaacaatgccaccaacgtggtgatcaaggtgtgcgagttccagttttgtaatgatccattcctgggcgtgtactatcacaagaacaataagtcctggatggagtctgagtttcgcgtgtattctagcgccaacaattgcacatttgagtacgtgagccagcccttcctgatggacctggagggcaagcagggcaatttcaagaacctgagggagttcgtgtttaagaatatcgatggctacttcaagatctacagcaagcacaccccaatcaacctggtgcgcgacctgccacagggattctccgccctggagccactggtggatctgcccatcggcatcaacatcacccggtttcagacactgctggccctgcacagatcctacctgacaccaggcgactcctctagcggatggaccgcaggagctgccgcctactatgtgggctatctgcagccccggaccttcctgctgaagtacaacgagaatggcaccatcacagacgcagtggattgcgccctggaccccctgtctgagacaaagtgtacactgaagagctttaccgtggagaagggcatctatcagacaagcaatttcagggtgcagcctaccgagtccatcgtgcgctttcccaatatcacaaacctgtgcccttttggcgaggtgttcaacgccaccagattcgccagcgtgtacgcctggaatcggaagagaatctccaactgcgtggccgactattctgtgctgtacaactccgcctctttcagcacctttaagtgctatggcgtgtctcccacaaagctgaatgatctgtgctttaccaacgtgtacgccgatagcttcgtgatcaggggagacgaagtgagacagatcgcaccaggacagacaggaaagatcgcagactacaattataagctgcctgacgatttcaccggctgcgtgatcgcctggaactccaacaatctggattctaaagtgggcggcaactacaattatctgtacaggctgtttcgcaagtccaatctgaagccattcgagcgggacatctccacagagatctaccaggccggctctaccccctgcaatggcgtggagggctttaactgttatttccctctgcagtcttacggcttccagccaacaaacggcgtgggctatcagccctacagagtggtggtgctgtcctttgagctgctgcacgcaccagcaacagtgtgcggcccaaagaagtctaccaatctggtgaagaacaagtgcgtgaacttcaacttcaacggactgaccggcacaggcgtgctgaccgagagcaataagaagttcctgccttttcagcagttcggcagggacatcgcagataccacagacgccgtgcgcgaccctcagaccctggagatcctggacatcacaccatgcagcttcggcggcgtgtccgtgatcacaccaggcaccaatacatccaaccaggtggccgtgctgtatcaggacgtgaattgtaccgaggtgcccgtggcaatccacgcagatcagctgacccctacatggcgggtgtactctaccggcagcaacgtgttccagacaagagccggatgcctgatcggagcagagcacgtgaacaatagctatgagtgcgacatccctatcggcgccggcatctgtgccagctaccagacccagacaaactccccatctggagcaggctccgtggccagccagtccatcatcgcctataccatgagcctgggcgccgagaacagcgtggcctactccaacaattctatcgccatccctaccaacttcacaatcagcgtgaccacagagatcctgccagtgtctatggcgaagacaagcgtggactgcacaatgtatatctgtggcgatagcaccgagtgctccaacctgctgctgcagtacggctccttttgtacccagctgaatagagccctgacaggcatcgccgtggagcaggataagaacacacaggaggtgttcgcccaggtgaagcagatctacaagaccccacccatcaaggactttggcggcttcaacttcagccagatcctgcctgatccaagcaagccctccaagaggtcttttatcgaggacctgctgttcaacaaggtgaccctggccgatgccggcttcatcaagcagtatggagattgcctgggagacatcgcagcccgcgacctgatctgtgcccagaagtttaatggcctgaccgtgctgcctccactgctgacagatgagatgatcgcccagtacacatctgccctgctggccggcaccatcacaagcggatggaccttcggcgcaggagccgccctgcagatcccttttgccatgcagatggcctataggttcaacggcatcggcgtgacccagaatgtgctgtacgagaaccagaagctgatcgccaatcagtttaacagcgccatcggcaagatccaggactctctgtcctctacagccagcgccctgggcaagctgcaggatgtggtgaatcagaacgcccaggccctgaataccctggtgaagcagctgagctccaacttcggcgccatctctagcgtgctgaatgacatcctgagccggctggacccccctgaggcagaggtgcagatcgacaggctgatcacaggccgcctgcagagcctgcagacctacgtgacacagcagctgatcagggcagcagagatcagagcctccgccaatctggccgccaccaagatgagcgagtgcgtgctgggacagtccaagagggtggacttttgtggcaagggctatcacctgatgtctttcccacagagcgcccctcacggcgtggtgtttctgcacgtgacctacgtgccagcccaggagaagaacttcaccacagcaccagccatctgccacgatggaaaggcacactttcctagggagggcgtgttcgtgtctaacggcacccactggtttgtgacacagcgcaatttctacgagccacagatcatcaccacagacaatacattcgtgagcggcaactgtgatgtggtgatcggcatcgtgaacaataccgtgtatgatccactgcagcccgagctggactcctttaaggaggagctggataagtacttcaagaatcacacctctcccgacgtggatctgggcgacatctccggcatcaatgcctctgtggtgaacatccagaaggagatcgaccggctgaacgaggtggccaagaatctgaacgagagcctgatcgatctgcaggagctgggcaagtatgagcagtacatcaagggctctggcagagagaacctgtatttccagggaggaggaggcagcggatacatccctgaggcaccaagggacggacaggcctacgtgcgcaaggatggcgagtgggtgctgctgtccacctttctgggccatcatcaccaccaccaccaccactga

SEQ ID NO: 1248 - DNA, 3846 bp, Artificial Sequence
  Description of Artificial Sequence: Synthetic polynucleotide
atgggcatcctgccaagcccaggaatgcccgccctgctgtctctggtgagcctgctgtccgtgctgctgatgggatgcgtggcagagacaggcacacagtgcgtgaacctgaccacaaggacccagctgccccctgcctataccaattctttcacacggggcgtgtactatcccgacaaggtgtttagaagctccgtgctgcactccacacaggatctgtttctgcctttcttttctaacgtgacctggttccacgccatccacgtgtccggcaccaatggcacaaagcggttcgacaatcccgtgctgccttttaacgatggcgtgtacttcgccagcaccgagaagtccaacatcatcagaggctggatctttggcaccacactggactctaagacacagagcctgctgatcgtgaacaatgccaccaacgtggtgatcaaggtgtgcgagttccagttttgtaatgatccattcctgggcgtgtactatcacaagaacaataagtcctggatggagtctgagtttcgcgtgtattctagcgccaacaattgcacatttgagtacgtgagccagcccttcctgatggacctggagggcaagcagggcaatttcaagaacctgagggagttcgtgtttaagaatatcgatggctacttcaagatctacagcaagcacaccccaatcaacctggtgcgcgacctgccacagggattctccgccctggagccactggtggatctgcccatcggcatcaacatcacccggtttcagacactgctggccctgcacagatcctacctgacaccaggcgactcctctagcggatggaccgcaggagctgccgcctactatgtgggctatctgcagccccggaccttcctgctgaagtacaacgagaatggcaccatcacagacgcagtggattgcgccctggaccccctgtctgagacaaagtgtacactgaagagctttaccgtggagaagggcatctatcagacaagcaatttcagggtgcagcctaccgagtccatcgtgcgctttcccaatatcacaaacctgtgcccttttggcgaggtgttcaacgccaccagattcgccagcgtgtacgcctggaatcggaagagaatctccaactgcgtggccgactattctgtgctgtacaactccgcctctttcagcacctttaagtgctatggcgtgtctcccacaaagctgaatgatctgtgctttaccaacgtgtacgccgatagcttcgtgatcaggggagacgaagtgagacagatcgcaccaggacagacaggaaagatcgcagactacaattataagctgcctgacgatttcaccggctgcgtgatcgcctggaactccaacaatctggattctaaagtgggcggcaactacaattatctgtacaggctgtttcgcaagtccaatctgaagccattcgagcgggacatctccacagagatctaccaggccggctctaccccctgcaatggcgtggagggctttaactgttatttccctctgcagtcttacggcttccagccaacaaacggcgtgggctatcagccctacagagtggtggtgctgtcctttgagctgctgcacgcaccagcaacagtgtgcggcccaaagaagtctaccaatctggtgaagaacaagtgcgtgaacttcaacttcaacggactgaccggcacaggcgtgctgaccgagagcaataagaagttcctgccttttcagcagttcggcagggacatcgcagataccacagacgccgtgcgcgaccctcagaccctggagatcctgtgtatcacaccatgcagcttcggcggcgtgtccgtgatcacaccaggcaccaatacatccaaccaggtggccgtgctgtatcaggacgtgaattgtaccgaggtgcccgtggcaatccacgcagatcagctgacccctacatggcgggtgtactctaccggcagcaacgtgttccagacaagagccggatgcctgatcggagcagagcacgtgaacaatagctatgagtgcgacatccctatcggcgccggcatctgtgccagctaccagacccagacaaactccccatctggagcaggctccgtggccagccagtccatcatcgcctataccatgagcctgggcgccgagaacagcgtggcctactccaacaattctatcgccatccctaccaacttcacaatcagcgtgaccacagagatcctgccagtgtctatgaccaagacaagcgtggactgcacaatgtatatctgtggcgatagcaccgagtgctccaacctgctgctgcagtacggctccttttgtacccagctgaatagagccctgacaggcatcgccgtggagcaggataagaacacacaggaggtgttcgcccaggtgaagcagatctacaagaccccacccatcaaggactttggcggcttcaacttcagccagatcctgcctgatccaagcaagccctccaagaggtcttttatcgaggacctgctgttcaacaaggtgaccctggccgatgccggcttcatcaagcagtatggagattgcctgggagacatcgcagcccgcgacctgatctgtgcccagaagtttaatggcctgaccgtgctgcctccactgctgacagatgagatgatcgcccagtacacatctgccctgctggccggcaccatcacaagcggatggaccttcggcgcaggagccgccctgcagatcccttttgccatgcagatggcctataggttcaacggcatcggcgtgacccagaatgtgctgtacgagaaccagaagctgatcgccaatcagtttaacagcgccatcggcaagatccaggactctctgtcctctacagccagcgccctgggcaagctgcaggatgtggtgaatcagaacgcccaggccctgaataccctggtgaagcagctgagctccaacttcggcgccatctctagcgtgctgaatgacatcctgagccggctggacccccctgaggcagaggtgcagatcgacaggctgatcacaggccgcctgcagagcctgcagacctacgtgacacagcagctgatcagggcagcagagatcagagcctccgccaatctggccgccaccaagatgagcgagtgcgtgctgggacagtccaagagggtggacttttgtggcaagggctatcacctgatgtctttcccacagagcgcccctcacggcgtggtgtttctgcacgtgacctacgtgccagcccaggagaagaacttcaccacagcaccagccatctgccacgatggaaaggcacactttcctagggagggcgtgttcgtgtctaacggcacccactggtttgtgacacagcgcaatttctacgagccacagatcatcaccacagacaatacattcgtgagcggcaactgtgatgtggtgatcggcatcgtgaacaataccgtgtatgatccactgcagcccgagctggactcctttaaggaggagctggataagtacttcaagaatcacacctctcccgacgtggatctgggcgacatctccggcatcaatgcctctgtggtgaacatccagaaggagatcgaccggctgaacgaggtggccaagaatctgaacgagagcctgatcgatctgcaggagctgggcaagtatgagcagtacatcaagggctctggcagagagaacctgtatttccagggaggaggaggcagcggatacatccctgaggcaccaagggacggacaggcctacgtgcgcaaggatggcgagtgggtgctgctgtccacctttctgggccatcatcaccaccaccaccaccactga

SEQ ID NO: 1249 - DNA, 3846 bp, Artificial Sequence
  Description of Artificial Sequence: Synthetic polynucleotide
atgggcatcctgccaagcccaggaatgcccgccctgctgtctctggtgagcctgctgtccgtgctgctgatgggatgcgtggcagagacaggcacacagtgcgtgaacctgaccacaaggacccagctgccccctgcctataccaattctttcacacggggcgtgtactatcccgacaaggtgtttagaagctccgtgctgcactccacacaggatctgtttctgcctttcttttctaacgtgacctggttccacgccatccacgtgtccggcaccaatggcacaaagcggttcgacaatcccgtgctgccttttaacgatggcgtgtacttcgccagcaccgagaagtccaacatcatcagaggctggatctttggcaccacactggactctaagacacagagcctgctgatcgtgaacaatgccaccaacgtggtgatcaaggtgtgcgagttccagttttgtaatgatccattcctgggcgtgtactatcacaagaacaataagtcctggatggagtctgagtttcgcgtgtattctagcgccaacaattgcacatttgagtacgtgagccagcccttcctgatggacctggagggcaagcagggcaatttcaagaacctgagggagttcgtgtttaagaatatcgatggctacttcaagatctacagcaagcacaccccaatcaacctggtgcgcgacctgccacagggattctccgccctggagccactggtggatctgcccatcggcatcaacatcacccggtttcagacactgctggccctgcacagatcctacctgacaccaggcgactcctctagcggatggaccgcaggagctgccgcctactatgtgggctatctgcagccccggaccttcctgctgaagtacaacgagaatggcaccatcacagacgcagtggattgcgccctggaccccctgtctgagacaaagtgtacactgaagagctttaccgtggagaagggcatctatcagacaagcaatttcagggtgcagcctaccgagtccatcgtgcgctttcccaatatcacaaacctgtgcccttttggcgaggtgttcaacgccaccagattcgccagcgtgtacgcctggaatcggaagagaatctccaactgcgtggccgactattctgtgctgtacaactccgcctctttcagcacctttaagtgctatggcgtgtctcccacaaagctgaatgatctgtgctttaccaacgtgtacgccgatagcttcgtgatcaggggagacgaagtgagacagatcgcaccaggacagacaggaaagatcgcagactacaattataagctgcctgacgatttcaccggctgcgtgatcgcctggaactccaacaatctggattctaaagtgggcggcaactacaattatctgtacaggctgtttcgcaagtccaatctgaagccattcgagcgggacatctccacagagatctaccaggccggctctaccccctgcaatggcgtggagggctttaactgttatttccctctgcagtcttacggcttccagccaacaaacggcgtgggctatcagccctacagagtggtggtgctgtcctttgagctgctgcacgcaccagcaacagtgtgcggcccaaagaagtctaccaatctggtgaagaacaagtgcgtgaacttcaacttcaacggactgaccggcacaggcgtgctgaccgagagcaataagaagttcctgccttttcagcagttcggcagggacatcgcagataccacagacgccgtgcgcgaccctcagaccctggagatcctggacatcacaccatgcagcttcggcggcgtgtccgtgatcacaccaggcaccaatacatccaaccaggtggccgtgctgtatcaggacgtgaattgtaccgaggtgcccgtggcaatccacgcagatcagctgacccctacatggcgggtgtactctaccggcagcaacgtgttccagacaagagccggatgcctgatcggagcagagcacgtgaacaatagctatgagtgcgacatccctatcggcgccggcatctgtgccagctaccagacccagacaaactccccatctggagcaggctccgtggccagccagtccatcatcgcctataccatgagcctgggcgccgagaacagcgtggcctactccaacaattctatcgccatccctaccaacttcacaatcagcgtgaccacagagatcctgccagtgtctatgaccaagacaagcgtggactgcacaatgtatatctgtggcgatagcaccgagtgctccaacctgctgctgcagtacggctccttttgtacccagctgaatagagccctgacaggcatcgccgtggagcaggataagaacacacaggaggtgttcgcccaggtgaagcagatctacaagaccccacccatcaaggactttggcggcttcaacttcagccagatcctgcctgatccaagcaagccctccaagaggtcttttatcgaggacctgctgttcaacaaggtgaccctggccgatgccggcttcatcaagcagtatggagattgcctgggagacatcgcagcccgcgacctgatctgtgcccagaagtttaatggcctgaccgtgctgcctccactgctgacagatgagatgatcgcccagtacacatctgccctgctggccggcaccatcacaagcggatggaccttcggcgcaggagccgccctgcagatcccttttgccatgcagatggcctataggttcaacggcatcggcgtgacccagaatgtgctgtacgagaaccagaagctgatcgccaatcagtttaacagcgccatcggcaagatccaggactctctgtcctctacagccagcgccctgggcaagctgcaggatgtggtgaatcagaacgcccaggccctgaataccctggtgaagcagctgagctccaacttcggcgccatctctagcgtgctgaatgacatcctgagccggctggacccccctgaggcagaggtgcagatcgacaggctgatcacaggccgcctgcagagcctgcagacctacgtgacacagcagctgatcagggcagcagagatcagagcctccgccaatctggccgccaccaagatgagcgagtgcgtgaaaggacagtccaagagggtggacttttgtggcaagggctatcacctgatgtctttcccacagagcgcccctcacggcgtggtgtttctgcacgtgacctacgtgccagcccaggagaagaacttcaccacagcaccagccatctgccacgatggaaaggcacactttcctagggagggcgtgttcgtgtctaacggcacccactggtttgtgacacagcgcaatttctacgagccacagatcatcaccacagacaatacattcgtgagcggcaactgtgatgtggtgatcggcatcgtgaacaataccgtgtatgatccactgcagcccgagctggactcctttaaggaggagctggataagtacttcaagaatcacacctctcccgacgtggatctgggcgacatctccggcatcaatgcctctgtggtgaacatccagaaggagatcgaccggctgaacgaggtggccaagaatctgaacgagagcctgatcgatctgcaggagctgggcaagtatgagcagtacatcaagggctctggcagagagaacctgtatttccagggaggaggaggcagcggatacatccctgaggcaccaagggacggacaggcctacgtgcgcaaggatggcgagtgggtgctgctgtccacctttctgggccatcatcaccaccaccaccaccactga

SEQ ID NO: 1250 - DNA, 3846 bp, Artificial Sequence
  Description of Artificial Sequence: Synthetic polynucleotide
atgggcatcctgccaagcccaggaatgcccgccctgctgtctctggtgagcctgctgtccgtgctgctgatgggatgcgtggcagagacaggcacacagtgcgtgaacctgaccacaaggacccagctgccccctgcctataccaattctttcacacggggcgtgtactatcccgacaaggtgtttagaagctccgtgctgcactccacacaggatctgtttctgcctttcttttctaacgtgacctggttccacgccatccacgtgtccggcaccaatggcacaaagcggttcgacaatcccgtgctgccttttaacgatggcgtgtacttcgccagcaccgagaagtccaacatcatcagaggctggatctttggcaccacactggactctaagacacagagcctgctgatcgtgaacaatgccaccaacgtggtgatcaaggtgtgcgagttccagttttgtaataacccattcctgggcgtgtactatcacaagaacaataagtcctggatggagtctgagtttcgcgtgtattctagcgccaacaattgcacatttgagtacgtgagccagcccttcctgatggacctggagggcaagcagggcaatttcaagaacctgagggagttcgtgtttaagaatatcgatggctacttcaagatctacagcaagcacaccccaatcaacctggtgcgcgacctgccacagggattctccgccctggagccactggtggatctgcccatcggcatcaacatcacccggtttcagacactgctggccctgcacagatcctacctgacaccaggcgactcctctagcggatggaccgcaggagctgccgcctactatgtgggctatctgcagccccggaccttcctgctgaagtacaacgagaatggcaccatcacagacgcagtggattgcgccctggaccccctgtctgagacaaagtgtacactgaagagctttaccgtggagaagggcatctatcagacaagcaatttcagggtgcagcctaccgagtccatcgtgcgctttcccaatatcacaaacctgtgcccttttggcgaggtgttcaacgccaccagattcgccagcgtgtacgcctggaatcggaagagaatctccaactgcgtggccgactattctgtgctgtacaactccgcctctttcagcacctttaagtgctatggcgtgtctcccacaaagctgaatgatctgtgctttaccaacgtgtacgccgatagcttcgtgatcaggggagacgaagtgagacagatcgcaccaggacagacaggaaagatcgcagactacaattataagctgcctgacgatttcaccggctgcgtgatcgcctggaactccaacaatctggattctaaagtgggcggcaactacaattatctgtacaggctgtttcgcaagtccaatctgaagccattcgagcgggacatctccacagagatctaccaggccggctctaccccctgcaatggcgtggagggctttaactgttatttccctctgcagtcttacggcttccagccaacaaacggcgtgggctatcagccctacagagtggtggtgctgtcctttgagctgctgcacgcaccagcaacagtgtgcggcccaaagaagtctaccaatctggtgaagaacaagtgcgtgaacttcaacttcaacggactgaccggcacaggcgtgctgaccgagagcaataagaagttcctgccttttcagcagttcggcagggacatcgcagataccacagacgccgtgcgcgaccctcagaccctggagatcctggacatcacaccatgcagcttcggcggcgtgtccgtgatcacaccaggcaccaatacatccaaccaggtggccgtgctgtatcaggacgtgaattgtaccgaggtgcccgtggcaatccacgcagatcagctgacccctacatggcgggtgtactctaccggcagcaacgtgttccagacaagagccggatgcctgatcggagcagagcacgtgaacaatagctatgagtgcgacatccctatcggcgccggcatctgtgccagctaccagacccagacaaactccccatctggagcaggctccgtggccagccagtccatcatcgcctataccatgagcctgggcgccgagaacagcgtggcctactccaacaattctatcgccatccctaccaacttcacaatcagcgtgaccacagagatcctgccagtgtctatgaccaagacaagcgtggactgcacaatgtatatctgtggcgatagcaccgagtgctccaacctgctgctgcagtacggctccttttgtacccagctgaatagagccctgacaggcatcgccgtggagcaggataagaacacacaggaggtgttcgcccaggtgaagcagatctacaagaccccacccatcaaggactttggcggcttcaacttcagccagatcctgcctgatccaagcaagccctccaagaggtcttttatcgaggacctgctgttcaacaaggtgaccctggccgatgccggcttcatcaagcagtatggagattgcctgggagacatcgcagcccgcgacctgatctgtgcccagaagtttaatggcctgaccgtgctgcctccactgctgacagatgagatgatcgcccagtacacatctgccctgctggccggcaccatcacaagcggatggaccttcggcgcaggagccgccctgcagatcccttttgccatgcagatggcctataggttcaacggcatcggcgtgacccagaatgtgctgtacgagaaccagaagctgatcgccaatcagtttaacagcgccatcggcaagatccaggactctctgtcctctacagccagcgccctgggcaagctgcaggatgtggtgaatcagaacgcccaggccctgaataccctggtgaagcagctgagctccaacttcggcgccatctctagcgtgctgaatgacatcctgagccggctggacccccctgaggcagaggtgcagatcgacaggctgatcacaggccgcctgcagagcctgcagacctacgtgacacagcagctgatcagggcagcagagatcagagcctccgccaatctggccgccaccaagatgagcgagtgcgtgctgggacagtccaagagggtggacttttgtggcaagggctatcacctgatgtctttcccacagagcgcccctcacggcgtggtgtttctgcacgtgacctacgtgccagcccaggagaagaacttcaccacagcaccagccatctgccacgatggaaaggcacactttcctagggagggcgtgttcgtgtctaacggcacccactggtttgtgacacagcgcaatttctacgagccacagatcatcaccacagacaatacattcgtgagcggcaactgtgatgtggtgatcggcatcgtgaacaataccgtgtatgatccactgcagcccgagctggactcctttaaggaggagctggataagtacttcaagaatcacacctctcccgacgtggatctgggcgacatctccggcatcaatgcctctgtggtgaacatccagaaggagatcgaccggctgaacgaggtggccaagaatctgaacgagagcctgatcgatctgcaggagctgggcaagtatgagcagtacatcaagggctctggcagagagaacctgtatttccagggaggaggaggcagcggatacatccctgaggcaccaagggacggacaggcctacgtgcgcaaggatggcgagtgggtgctgctgtccacctttctgggccatcatcaccaccaccaccaccactga

SEQ ID NO: 1251 - DNA, 3846 bp, Artificial Sequence
  Description of Artificial Sequence: Synthetic polynucleotide
atgggcatcctgccaagcccaggaatgcccgccctgctgtctctggtgagcctgctgtccgtgctgctgatgggatgcgtggcagagacaggcacacagtgcgtgaacctgaccacaaggacccagctgccccctgcctataccaattctttcacacggggcgtgtactatcccgacaaggtgtttagaagctccgtgctgcactccacacaggatctgtttctgcctttcttttctaacgtgacctggttccacgccatccacgtgtccggcaccaatggcacaaagcggttcgacaatcccgtgctgccttttaacgatggcgtgtacttcgccagcaccgagaagtccaacatcatcagaggctggatctttggcaccacactggactctaagacacagagcctgctgatcgtgaacaatgccaccaacgtggtgatcaaggtgtgcgagttccagttttgtaatgatccattcctgggcgtgtactatcacaagaacaataagtcctggatggagtctgagtttcgcgtgtattctagcgccaacaattgcacatttgagtacgtgagccagcccttcctgatggacctggagggcaagcagggcaatttcaagaacctgagggagttcgtgtttaagaatatcgatggctacttcaagatctacagcaagcacaccccaatcaacctggtgcgcgacctgccacagggattctccgccctggagccactggtggatctgcccatcggcatcaacatcacccggtttcagacactgctggccctgcacagatcctacctgacaccaggcgactcctctagcggatggaccgcaggagctgccgcctactatgtgggctatctgcagccccggaccttcctgctgaagtacaacgagaatggcaccatcacagacgcagtggattgcgccctggaccccctgtctgagacaaagtgtacactgaagagctttaccgtggagaagggcatctatcagacaagcaatttcagggtgcagcctaccgagtccatcgtgcgctttcccaatatcacaaacctgtgcccttttggcgaggtgttcaacgccaccagattcgccagcgtgtacgcctggaatcggaagagaatctccaactgcgtggccgactattctgtgctgtacaactccgcctctttcagcacctttaagtgctatggcgtgtctcccacaaagctgaatgatctgtgctttaccaacgtgtacgccgatagcttcgtgatcaggggagacgaagtgagacagatcgcaccaggacagacaggaaagatcgcagactacaattataagctgcctgacgatttcaccggctgcgtgatcgcctggaactccaacaatctggattctaaagtgggcggcaactacaattatctgtacaggctgtttcgcaagtccaatctgaagccattcgagcgggacatctccacagagatctaccaggccggctctaccccctgcaatggcgtggagggctttaactgttatttccctctgcagtcttacggcttccagccaacaaacggcgtgggctatcagccctacagagtggtggtgctgtcctttgagctgctgcacgcaccagcaacagtgtgcggcccaaagaagtctaccaatctggtgaagaacaagtgcgtgaacttcaacttcaacggactgaccggcacaggcgtgctgaccgagagcaataagaagttcctgccttttcagcagttcggcagggacatcgcagataccacagacgccgtgcgcgaccctcagaccctggagatcctggacatcacaccatgcagcttcggcggcgtgtccgtgatcacaccaggcaccaatacatccaaccaggtggccgtgctgtatcaggacgtgaattgtaccgaggtgcccgtggcaatccacgcagatcagctgacccctacatggcgggtgtactctaccggcagcaacgtgttccagacaagagccggatgcctgatcggagcagagcacgtgaacaatagctatgagtgcgacatccctatcggcgccggcatctgtgccagctaccagacccagacaaactccccatctggagcaggctccgtggccagccagtccatcatcgcctataccatgagcctgggcgccgagaacagcgtggcctactccaacaattctatcgccatccctaccaacttcacaatcagcgtgaccacagagatcctgccagtgtctatgaccaagacaagcgtggactgcacaatgtatatctgtggcgatagcaccgagtgctccaacctgctgctgcagtacggctccttttgtacccagctgaatagagccctgacaggcatcgccgtggagcaggataagaacacacaggaggtgttcgcccaggtgaagcagatctacaagaccccacccatcaaggactttggcggcttcaacttcagccagatcctgcctgatccaagcaagccctccaagaggtcttttatcgaggacctgctgttcaacaaggtgaccctggccgatgccggcttcatcaagcagtatggagattgcctgggagacgtagcagcccgcgacctgatctgtgcccagaagtttaatggcctgaccgtgctgcctccactgctgacagatgagatgatcgcccagtacacatctgccctgctggccggcaccatcacaagcggatggaccttcggcgcaggagccgccctgcagatcccttttgccatgcagatggcctataggttcaacggcatcggcgtgacccagaatgtgctgtacgagaaccagaagctgatcgccaatcagtttaacagcgccatcggcaagatccaggactctctgtcctctacagccagcgccctgggcaagctgcaggatgtggtgaatcagaacgcccaggccctgaataccctggtgaagcagctgagctccaacttcggcgccatctctagcgtgctgaatgacatcctgagccggctggacccccctgaggcagaggtgcagatcgacaggctgatcacaggccgcctgcagagcctgcagacctacgtgacacagcagctgatcagggcagcagagatcagagcctccgccaatctggccgccaccaagatgagcgagtgcgtgctgggacagtccaagagggtggacttttgtggcaagggctatcacctgatgtctttcccacagagcgcccctcacggcgtggtgtttctgcacgtgacctacgtgccagcccaggagaagaacttcaccacagcaccagccatctgccacgatggaaaggcacactttcctagggagggcgtgttcgtgtctaacggcacccactggtttgtgacacagcgcaatttctacgagccacagatcatcaccacagacaatacattcgtgagcggcaactgtgatgtggtgatcggcatcgtgaacaataccgtgtatgatccactgcagcccgagctggactcctttaaggaggagctggataagtacttcaagaatcacacctctcccgacgtggatctgggcgacatctccggcatcaatgcctctgtggtgaacatccagaaggagatcgaccggctgaacgaggtggccaagaatctgaacgagagcctgatcgatctgcaggagctgggcaagtatgagcagtacatcaagggctctggcagagagaacctgtatttccagggaggaggaggcagcggatacatccctgaggcaccaagggacggacaggcctacgtgcgcaaggatggcgagtgggtgctgctgtccacctttctgggccatcatcaccaccaccaccaccactga

SEQ ID NO: 1252 - DNA, 3846 bp, Artificial Sequence
  Description of Artificial Sequence: Synthetic polynucleotide
atgggcatcctgccaagcccaggaatgcccgccctgctgtctctggtgagcctgctgtccgtgctgctgatgggatgcgtggcagagacaggcacacagtgcgtgaacctgaccacaaggacccagctgccccctgcctataccaattctttcacacggggcgtgtactatcccgacaaggtgtttagaagctccgtgctgcactccacacaggatctgtttctgcctttcttttctaacgtgacctggttccacgccatccacgtgtccggcaccaatggcacaaagcggttcgacaatcccgtgctgccttttaacgatggcgtgtacttcgccagcaccgagaagtccaacatcatcagaggctggatctttggcaccacactggactctaagacacagagcctgctgatcgtgaacaatgccaccaacgtggtgatcaaggtgtgcgagttccagttttgtaatgatccattcctgggcgtgtactatcacaagaacaataagtcctggatggagtctgagtttcgcgtgtattctagcgccaacaattgcacatttgagtacgtgagccagcccttcctgatggacctggagggcaagcagggcaatttcaagaacctgagggagttcgtgtttaagaatatcgatggctacttcaagatctacagcaagcacaccccaatcaacctggtgcgcgacctgccacagggattctccgccctggagccactggtggatctgcccatcggcatcaacatcacccggtttcagacactgctggccctgcacagatcctacctgacaccaggcgactcctctagcggatggaccgcaggagctgccgcctactatgtgggctatctgcagccccggaccttcctgctgaagtacaacgagaatggcaccatcacagacgcagtggattgcgccctggaccccctgtctgagacaaagtgtacactgaagagctttaccgtggagaagggcatctatcagacaagcaatttcagggtgcagcctaccgagtccatcgtgcgctttcccaatatcacaaacctgtgcccttttggcgaggtgttcaacgccaccagattcgccagcgtgtacgcctggaatcggaagagaatctccaactgcgtggccgactattctgtgctgtacaactccgcctctttcagcacctttaagtgctatggcgtgtctcccacaaagctgaatgatctgtgctttaccaacgtgtacgccgatagcttcgtgatcaggggagacgaagtgagacagatcgcaccaggacagacaggaaagatcgcagactacaattataagctgcctgacgatttcaccggctgcgtgatcgcctggaactccaacaatctggattctaaagtgggcggcaactacaattatctgtacaggctgtttcgcaagtccaatctgaagccattcgagcgggacatctccacagagatctaccaggccggctctaccccctgcaatggcgtggagggctttaactgttatttccctctgcagtcttacggcttccagccaacaaacggcgtgggctatcagccctacagagtggtggtgctgtcctttgagctgctgcacgcaccagcaacagtgtgcggcccaaagaagtctaccaatctggtgaagaacaagtgcgtgaacttcaacttcaacggactgaccggcacaggcgtgctgaccgagagcaataagaagttcctgccttttcagcagttcggcagggacatcgcagataccacagacgccgtgcgcgaccctcagaccctggagatcctggacatcacaccatgcagcttcggcggcgtgtccgtgatcacaccaggcaccaatacatccaaccaggtggccgtgctgtatcaggacgtgaattgtaccgaggtgcccgtggcaatccacgcagatcagctgacccctacatggcgggtgtactctaccggcagcaacgtgttccagacaagagccggatgcctgatcggagcagagcacgtgaacaatagctatgagtgcgacatccctatcggcgccggcatctgtgccagctaccagacccagacaaactccccatctggagcaggctccgtggccagccagtccatcatcgcctataccatgagcctgggcgccgagaacagcgtggcctactccaacaattctatcgccatccctaccaacttcacaatcagcgtgaccacagagatcctgccagtgtctatgaccaagacaagcgtggactgcacaatgtatatctgtggcgatagcaccgagtgctccaacctgctgctgcagtacggctccttttgtacccagctgaatagagccctgacaggcatcgccgtggaggaagataagaacacacaggaggtgttcgcccaggtgaagcagatctacaagaccccacccatcaaggactttggcggcttcaacttcagccagatcctgcctgatccaagcaagccctccaagaggtcttttatcgaggacctgctgttcaacaaggtgaccctggccgatgccggcttcatcaagcagtatggagattgcctgggagacatcgcagcccgcgacctgatctgtgcccagaagtttaatggcctgaccgtgctgcctccactgctgacagatgagatgatcgcccagtacacatctgccctgctggccggcaccatcacaagcggatggaccttcggcgcaggagccgccctgcagatcccttttgccatgcagatggcctataggttcaacggcatcggcgtgacccagaatgtgctgtacgagaaccagaagctgatcgccaatcagtttaacagcgccatcggcaagatccaggactctctgtcctctacagccagcgccctgggcaagctgcaggatgtggtgaatcagaacgcccaggccctgaataccctggtgaagcagctgagctccaacttcggcgccatctctagcgtgctgaatgacatcctgagccggctggacccccctgaggcagaggtgcagatcgacaggctgatcacaggccgcctgcagagcctgcagacctacgtgacacagcagctgatcagggcagcagagatcagagcctccgccaatctggccgccaccaagatgagcgagtgcgtgctgggacagtccaagagggtggacttttgtggcaagggctatcacctgatgtctttcccacagagcgcccctcacggcgtggtgtttctgcacgtgacctacgtgccagcccaggagaagaacttcaccacagcaccagccatctgccacgatggaaaggcacactttcctagggagggcgtgttcgtgtctaacggcacccactggtttgtgacacagcgcaatttctacgagccacagatcatcaccacagacaatacattcgtgagcggcaactgtgatgtggtgatcggcatcgtgaacaataccgtgtatgatccactgcagcccgagctggactcctttaaggaggagctggataagtacttcaagaatcacacctctcccgacgtggatctgggcgacatctccggcatcaatgcctctgtggtgaacatccagaaggagatcgaccggctgaacgaggtggccaagaatctgaacgagagcctgatcgatctgcaggagctgggcaagtatgagcagtacatcaagggctctggcagagagaacctgtatttccagggaggaggaggcagcggatacatccctgaggcaccaagggacggacaggcctacgtgcgcaaggatggcgagtgggtgctgctgtccacctttctgggccatcatcaccaccaccaccaccactga

SEQ ID NO: 1253 - DNA, 3846 bp, Artificial Sequence
  Description of Artificial Sequence: Synthetic polynucleotide
atgggcatcctgccaagcccaggaatgcccgccctgctgtctctggtgagcctgctgtccgtgctgctgatgggatgcgtggcagagacaggcacacagtgcgtgaacctgaccacaaggacccagctgccccctgcctataccaattctttcacacggggcgtgtactatcccgacaaggtgtttagaagctccgtgctgcactccacacaggatctgtttctgcctttcttttctaacgtgacctggttccacgccatccacgtgtccggcaccaatggcacaaagcggttcgacaatcccgtgctgccttttaacgatggcgtgtacttcgccagcaccgagaagtccaacatcatcagaggctggatctttggcaccacactggactctaagacacagagcctgctgatcgtgaacaatgccaccaacgtggtgatcaaggtgtgcgagttccagttttgtaatgatccattcctgggcgtgtactatcacaagaacaataagtcctggatggagtctgagtttcgcgtgtattctagcgccaacaattgcacatttgagtacgtgagccagcccttcctgatggacctggagggcaagcagggcaatttcaagaacctgagggagttcgtgtttaagaatatcgatggctacttcaagatctacagcaagcacaccccaatcaacctggtgcgcgacctgccacagggattctccgccctggagccactggtggatctgcccatcggcatcaacatcacccggtttcagacactgctggccctgcacagatcctacctgacaccaggcgactcctctagcggatggaccgcaggagctgccgcctactatgtgggctatctgcagccccggaccttcctgctgaagtacaacgagaatggcaccatcacagacgcagtggattgcgccctggaccccctgtctgagacaaagtgtacactgaagagctttaccgtggagaagggcatctatcagacaagcaatttcagggtgcagcctaccgagtccatcgtgcgctttcccaatatcacaaacctgtgcccttttggcgaggtgttcaacgccaccagattcgccagcgtgtacgcctggaatcggaagagaatctccaactgcgtggccgactattctgtgctgtacaactccgcctctttcagcacctttaagtgctatggcgtgtctcccacaaagctgaatgatctgtgctttaccaacgtgtacgccgatagcttcgtgatcaggggagacgaagtgagacagatcgcaccaggacagacaggaaagatcgcagactacaattataagctgcctgacgatttcaccggctgcgtgatcgcctggaactccaacaatctggattctaaagtgggcggcaactacaattatctgtacaggctgtttcgcaagtccaatctgaagccattcgagcgggacatctccacagagatctaccaggccggctctaccccctgcaatggcgtggagggctttaactgttatttccctctgcagtcttacggcttccagccaacaaacggcgtgggctatcagccctacagagtggtggtgctgtcctttgagctgctgcacgcaccagcaacagtgtgcggcccaaagaagtctaccaatctggtgaagaacaagtgcgtgaacttcaacttcaacggactgaccggcacaggcgtgctgaccgagagcaataagaagttcctgccttttcagcagttcggcagggacatcgcagataccacagacgccgtgcgcgaccctcagaccctggagatcctggacatcacaccatgcagcttcggcggcgtgtccgtgatcacaccaggcaccaatacatccaaccaggtggccgtgctgtatcaggacgtgaattgtaccgaggtgcccgtggcaatccacgcagatcagctgacccctacatggcgggtgtactctaccggcagcaacgtgttccagacaagagccggatgcctgatcggagcagagcacgtgaacaatagctatgagtgcgacatccctatcggcgccggcatctgtgccagctaccagacccagacaaactccccatctggagcaggctccgtggccagccagtccatcatcgcctataccatgagcctgggcgccgagaacagcgtggcctactccaacaattctatcgccatccctaccaacttcacaatcagcgtgaccacagagatcctgccagtgtctatgaccaagacaagcgtggactgcacaatgtatatctgtggcgatagcaccgagtgctccaacctgctgctgcagtacggctccttttgtacccagctgaatagagccctgacaggcatcgccgtggagcaggataagaacacacaggaggtgttcgcccaggtgaagcagatctacaagaccccacccatcaaggactttggcggcttcaacttcagccagatcctgcctgatccaagcaagccctccaagaggtcttttatcgaggacctgctgttcaacaaggtgaccctggccgatgccggcttcatcaagcagtatggagattgcctgggagacatcgcagcccgcgacctgatctgtgcccagaagtttaatggcctgaccgtgctgcctccactgctgacagatgagatgatcgcccagtacacatctgccctgctggccggcaccatcacaagcggatggaccttcggcgcaggagccgccctgcagatcccttttgccatgcagatggcctataggttcaacggcatcggcgtgacccagaatgtgctgtacgagaaccagaagctgatcgccaatcagtttaacagcgccatcggcaagatccaggactctctgtcctctacagccagcgccctgggcaagctgcaggatgtggtgaatcagaacgcccaggccctgaataccctggtgaagcagctgagctccaacttcggcgccatctctagcgtgctgaatgacatcctgagccggctggacccccctgaggcagaggtgcagatcgacaggctgatcacaggccgcctgcagagcctgcagacctacgtgacacagcagctgatcagggcagcagagatcagagcctccgccaatctggccgccaccaagatgagcgagtgcgtgctgggacagtccaagagggtggacttttgtggcaagggctatcacctgatgtctttcccacagagcgcccctcacggcgtggtgtttctgcacgtgacctacgtgccagcccaggagaagaacttcaccacagcaccagccatctgccacgatggaaaggcacactttcctagggagggcgtgttcgtgtctaacggcacccactggtttgtgacacagcgcaatttctacgagccacagtcgatcaccacagacaatacattcgtgagcggcaactgtgatgtggtgatcggcatcgtgaacaataccgtgtatgatccactgcagcccgagctggactcctttaaggaggagctggataagtacttcaagaatcacacctctcccgacgtggatctgggcgacatctccggcatcaatgcctctgtggtgaacatccagaaggagatcgaccggctgaacgaggtggccaagaatctgaacgagagcctgatcgatctgcaggagctgggcaagtatgagcagtacatcaagggctctggcagagagaacctgtatttccagggaggaggaggcagcggatacatccctgaggcaccaagggacggacaggcctacgtgcgcaaggatggcgagtgggtgctgctgtccacctttctgggccatcatcaccaccaccaccaccactga

SEQ ID NO: 1254 - DNA, 3846 bp, Artificial Sequence
  Description of Artificial Sequence: Synthetic polynucleotide
atgggcatcctgccaagcccaggaatgcccgccctgctgtctctggtgagcctgctgtccgtgctgctgatgggatgcgtggcagagacaggcacacagtgcgtgaacctgaccacaaggacccagctgccccctgcctataccaattctttcacacggggcgtgtactatcccgacaaggtgtttagaagctccgtgctgcactccacacaggatctgtttctgcctttcttttctaacgtgacctggttccacgccatccacgtgtccggcaccaatggcacaaagcggttcgacaatcccgtgctgccttttaacgatggcgtgtacttcgccagcaccgagaagtccaacatcatcagaggctggatctttggcaccacactggactctaagacacagagcctgctgatcgtgaacaatgccaccaacgtggtgatcaaggtgtgcgagttccagttttgtaatgatccattcctgggcgtgtactatcacaagaacaataagtcctggatggagtctgagtttcgcgtgtattctagcgccaacaattgcacatttgagtacgtgagccagcccttcctgatggacctggagggcaagcagggcaatttcaagaacctgagggagttcgtgtttaagaatatcgatggctacttcaagatctacagcaagcacaccccaatcaacctggtgcgcgacctgccacagggattctccgccctggagccactggtggatctgcccatcggcatcaacatcacccggtttcagacactgctggccctgcacagatcctacctgacaccaggcgactcctctagcggatggaccgcaggagctgccgcctactatgtgggctatctgcagccccggaccttcctgctgaagtacaacgagaatggcaccatcacagacgcagtggattgcgccctggaccccctgtctgagacaaagtgtacactgaagagctttaccgtggagaagggcatctatcagacaagcaatttcagggtgcagcctaccgagtccatcgtgcgctttcccaatatcacaaacctgtgcccttttggcgaggtgttcaacgccaccagattcgccagcgtgtacgcctggaatcggaagagaatctccaactgcgtggccgactattctgtgctgtacaactccgcctctttcagcacctttaagtgctatggcgtgtctcccacaaagctgaatgatctgtgctttaccaacgtgtacgccgatagcttcgtgatcaggggagacgaagtgagacagatcgcaccaggacagacaggaaagatcgcagactacaattataagctgcctgacgatttcaccggctgcgtgatcgcctggaactccaacaatctggattctaaagtgggcggcaactacaattatctgtacaggctgtttcgcaagtccaatctgaagccattcgagcgggacatctccacagagatctaccaggccggctctaccccctgcaatggcgtggagggctttaactgttatttccctctgcagtcttacggcttccagccaacaaacggcgtgggctatcagccctacagagtggtggtgctgtcctttgagctgctgcacgcaccagcaacagtgtgcggcccaaagaagtctaccaatctggtgaagaacaagtgcgtgaacttcaacttcaacggactgaccggcacaggcgtgctgaccgagagcaataagaagttcctgccttttcagcagttcggcagggacatcgcagataccacagacgccgtgcgcgaccctcagaccctggagatcctggacatcacaccatgcagcttcggcggcgtgtccgtgatcacaccaggcaccaatacatccaaccaggtggccgtgctgtatcaggacgtgaattgtaccgaggtgcccgtggcaatccacgcagatcagctgacccctacatggcgggtgtactctaccggcagcaacgtgttccagacaagagccggatgcctgatcggagcagagcacgtgaacaatagctatgagtgcgacatccctatcggcgccggcatctgtgccagctaccagacccagacaaactccccatctggagcaggctccgtggccagccagtccatcatcgcctataccatgagcctgggcgccgagaacagcgtggcctactccaacaattctatcgccatccctaccaacttcacaatcagcgtgaccacagagatcctgccagtgtctatgaccaagacaagcgtggactgcacaatgtatatctgtggcgatagcaccgagtgctccaacctgctgctgcagtacggctccttttgtacccagctgaatagagccctgacaggcatcgccgtggagcaggataagaacacacaggaggtgttcgcccaggtgaagcagatctacaagaccccacccatcaaggactttggcggcttcaacttcagccagatcctgcctgatccaagcaagccctccaagaggtcttttatcgaggacctgctgttcaacaaggtgaccctggccgatgccggcttcatcaagcagtatggagattgcctgggagacatcgcagcccgcgacctgatctgtgcccagaagtttaatggcctgaccgtgctgcctccactgctgacagatgagatgatcgcccagtacacatctgccctgctggccggcaccatcacaagcggatggaccttcggcgcaggagccgccctgcagatcccttttgccatgcagatggcctataggttcaacggcatcggcgtgacccagaatgtgctgtacgagaaccagaagctgatcgccaatcagtttaacagcgccatcggcaagatccaggactctctgtcctctacagccagcgccctgggcaagctgcaggatgtggtgaatcagaacgcccaggccctgagtaccctggtgaagcagctgagctccaacttcggcgccatctctagcgtgctgaatgacatcctgagccggctggacccccctgaggcagaggtgcagatcgacaggctgatcacaggccgcctgcagagcctgcagacctacgtgacacagcagctgatcagggcagcagagatcagagcctccgccaatctggccgccaccaagatgagcgagtgcgtgctgggacagtccaagagggtggacttttgtggcaagggctatcacctgatgtctttcccacagagcgcccctcacggcgtggtgtttctgcacgtgacctacgtgccagcccaggagaagaacttcaccacagcaccagccatctgccacgatggaaaggcacactttcctagggagggcgtgttcgtgtctaacggcacccactggtttgtgacacagcgcaatttctacgagccacagatcatcaccacagacaatacattcgtgagcggcaactgtgatgtggtgatcggcatcgtgaacaataccgtgtatgatccactgcagcccgagctggactcctttaaggaggagctggataagtacttcaagaatcacacctctcccgacgtggatctgggcgacatctccggcatcaatgcctctgtggtgaacatccagaaggagatcgaccggctgaacgaggtggccaagaatctgaacgagagcctgatcgatctgcaggagctgggcaagtatgagcagtacatcaagggctctggcagagagaacctgtatttccagggaggaggaggcagcggatacatccctgaggcaccaagggacggacaggcctacgtgcgcaaggatggcgagtgggtgctgctgtccacctttctgggccatcatcaccaccaccaccaccactga

SEQ ID NO: 1255 - DNA, 3846 bp, Artificial Sequence
  Description of Artificial Sequence: Synthetic polynucleotide
atgggcatcctgccaagcccaggaatgcccgccctgctgtctctggtgagcctgctgtccgtgctgctgatgggatgcgtggcagagacaggcacacagtgcgtgaacctgaccacaaggacccagctgccccctgcctataccaattctttcacacggggcgtgtactatcccgacaaggtgtttagaagctccgtgctgcactccacacaggatctgtttctgcctttcttttctaacgtgacctggttccacgccatccacgtgtccggcaccaatggcacaaagcggttcgacaatcccgtgctgccttttaacgatggcgtgtacttcgccagcaccgagaagtccaacatcatcagaggctggatctttggcaccacactggactctaagacacagagcctgctgatcgtgaacaatgccaccaacgtggtgatcaaggtgtgcgagttccagttttgtaatgatccattcctgggcgtgtactatcacaagaacaataagtcctggatggagtctgagtttcgcgtgtattctagcgccaacaattgcacatttgagtacgtgagccagcccttcctgatggacctggagggcaagcagggcaatttcaagaacctgagggagttcgtgtttaagaatatcgatggctacttcaagatctacagcaagcacaccccaatcaacctggtgcgcgacctgccacagggattctccgccctggagccactggtggatctgcccatcggcatcaacatcacccggtttcagacactgctggccctgcacagatcctacctgacaccaggcgactcctctagcggatggaccgcaggagctgccgcctactatgtgggctatctgcagccccggaccttcctgctgaagtacaacgagaatggcaccatcacagacgcagtggattgcgccctggaccccctgtctgagacaaagtgtacactgaagagctttaccgtggagaagggcatctatcagacaagcaatttcagggtgcagcctaccgagtccatcgtgcgctttcccaatatcacaaacctgtgcccttttggcgaggtgttcaacgccaccagattcgccagcgtgtacgcctggaatcggaagagaatctccaactgcgtggccgactattctgtgctgtacaactccgcctctttcagcacctttaagtgctatggcgtgtctcccacaaagctgaatgatctgtgctttaccaacgtgtacgccgatagcttcgtgatcaggggagacgaagtgagacagatcgcaccaggacagacaggaaagatcgcagactacaattataagctgcctgacgatttcaccggctgcgtgatcgcctggaactccaacaatctggattctaaagtgggcggcaactacaattatctgtacaggctgtttcgcaagtccaatctgaagccattcgagcgggacatctccacagagatctaccaggccggctctaccccctgcaatggcgtggagggctttaactgttatttccctctgcagtcttacggcttccagccaacaaacggcgtgggctatcagccctacagagtggtggtgctgtcctttgagctgctgcacgcaccagcaacagtgtgcggcccaaagaagtctaccaatctggtgaagaacaagtgcgtgaacttcaacttcaacggactgaccggcacaggcgtgctgaccgagagcaataagaagttcctgccttttcagcagttcggcagggacatcgcagataccacagacgccgtgcgcgaccctcagaccctggagatcctggacatcacaccatgcagcttcggcggcgtgtccgtgatcacaccaggcaccaatacatccaaccaggtggccgtgctgtatcaggacgtgaattgtaccgaggtgcccgtggcaatccacgcagatcagctgacccctacatggcgggtgtactctaccggcagcaacgtgttccagacaagagccggatgcctgatcggagcagagcacgtgaacaatagctatgagtgcgacatccctatcggcgccggcatctgtgccagctaccagacccagacaaactccccatctggagcaggctccgtggccagccagtccatcatcgcctataccatgagcctgggcgccgagaacagcgtggcctactccaacaattctatcgccatccctaccaacttcacaatcagcgtgaccacagagatcctgccagtgtctatgaccaagacaagcgtggactgcacaatgtatatctgtggcgatagcaccgagtgctccaacctgctgctgcagtacggctccttttgtacccagctgaatagagccctgacaggcatcgccgtggagcaggataagaacacacaggaggtgttcgcccaggtgaagcagatctacaagaccccacccatcaaggactttggcggcttcaacttcagccagatcctgcctgatccaagcaagccctccaagaggtcttttatcgaggacctgctgttcaacaaggtgaccctggccgatgccggcttcatcaagcagtatggagattgcctgggagacatcgcagcccgcgacctgatctgtgcccagaagtttaatggcctgaccgtgctgcctccactgctgacagatgagatgatcgcccagtacacatctgccctgctggccggcaccatcacaagcggatggaccttcggcgcaggagccgccctgcagatcccttttgccatgcagatggcctataggttcaacggcatcggcgtgacccagaatgtgctgtacgagaaccagaagctgatcgccaatcagtttaacagcgccatcggcaagatccaggactctctgtcctctacagccagcgccctgggcaagctgcaggatgtggtgaatcagaacgcccaggccctgaataccctggtgaagcagctgagctccaacttcggcgccatctctagcgtgctgaatgacatcctgagccggctggacccccctgaggcagaggtgcagatcgacaggctgatcacaggccgcctgcagagcctgcagacctacgtgacacagcagctgatcagggcagcagagatcagagcctccgccaatctggccgccaccaagatgagcgagtgcgtgctgggacagtccaagagggtgggtttttgtggcaagggctatcacctgatgtctttcccacagagcgcccctcacggcgtggtgtttctgcacgtgacctacgtgccagcccaggagaagaacttcaccacagcaccagccatctgccacgatggaaaggcacactttcctagggagggcgtgttcgtgtctaacggcacccactggtttgtgacacagcgcaatttctacgagccacagatcatcaccacagacaatacattcgtgagcggcaactgtgatgtggtgatcggcatcgtgaacaataccgtgtatgatccactgcagcccgagctggactcctttaaggaggagctggataagtacttcaagaatcacacctctcccgacgtggatctgggcgacatctccggcatcaatgcctctgtggtgaacatccagaaggagatcgaccggctgaacgaggtggccaagaatctgaacgagagcctgatcgatctgcaggagctgggcaagtatgagcagtacatcaagggctctggcagagagaacctgtatttccagggaggaggaggcagcggatacatccctgaggcaccaagggacggacaggcctacgtgcgcaaggatggcgagtgggtgctgctgtccacctttctgggccatcatcaccaccaccaccaccactga

SEQ ID NO: 1256 - DNA, 3846 bp, Artificial Sequence
  Description of Artificial Sequence: Synthetic polynucleotide
atgggcatcctgccaagcccaggaatgcccgccctgctgtctctggtgagcctgctgtccgtgctgctgatgggatgcgtggcagagacaggcacacagtgcgtgaacctgaccacaaggacccagctgccccctgcctataccaattctttcacacggggcgtgtactatcccgacaaggtgtttagaagctccgtgctgcactccacacaggatctgtttctgcctttcttttctaacgtgacctggttccacgccatccacgtgtccggcaccaatggcacaaagcggttcgacaatcccgtgctgccttttaacgatggcgtgtacttcgccagcaccgagaagtccaacatcatcagaggctggatctttggcaccacactggactctaagacacagagcctgctgatcgtgaacaatgccaccaacgtggtgatcaaggtgtgcgagttccagttttgtaatgatccattcctgggcgtgtactatcacaagaacaataagtcctggatggagtctgagtttcgcgtgtattctagcgccaacaattgcacatttgagtacgtgagccagcccttcctgatggacctggagggcaagcagggcaatttcaagaacctgagggagttcgtgtttaagaatatcgatggctacttcaagatctacagcaagcacaccccaatcaacctggtgcgcgacctgccacagggattctccgccctggagccactggtggatctgcccatcggcatcaacatcacccggtttcagacactgctggccctgcacagatcctacctgacaccaggcgactcctctagcggatggaatgcaggagctgccgcctactatgtgggctatctgcagccccggaccttcctgctgaagtacaacgagaatggcaccatcacagacgcagtggattgcgccctggaccccctgtctgagacaaagtgtacactgaagagctttaccgtggagaagggcatctatcagacaagcaatttcagggtgcagcctaccgagtccatcgtgcgctttcccaatatcacaaacctgtgcccttttggcgaggtgttcaacgccaccagattcgccagcgtgtacgcctggaatcggaagagaatctccaactgcgtggccgactattctgtgctgtacaactccgcctctttcagcacctttaagtgctatggcgtgtctcccacaaagctgaatgatctgtgctttaccaacgtgtacgccgatagcttcgtgatcaggggagacgaagtgagacagatcgcaccaggacagacaggaaagatcgcagactacaattataagctgcctgacgatttcaccggctgcgtgatcgcctggaactccaacaatctggattctaaagtgggcggcaactacaattatctgtacaggctgtttcgcaagtccaatctgaagccattcgagcgggacatctccacagagatctaccaggccggctctaccccctgcaatggcgtggagggctttaactgttatttccctctgcagtcttacggcttccagccaacaaacggcgtgggctatcagccctacagagtggtggtgctgtcctttgagctgctgcacgcaccagcaacagtgtgcggcccaaagaagtctaccaatctggtgaagaacaagtgcgtgaacttcaacttcaacggactgaccggcacaggcgtgctgaccgagagcaataagaagttcctgccttttcagcagttcggcagggacatcgcagataccacagacgccgtgcgcgaccctcagaccctggagatcctggacatcacaccatgcagcttcggcggcgtgtccgtgatcacaccaggcaccaatacatccaaccaggtggccgtgctgtatcaggacgtgaattgtaccgaggtgcccgtggcaatccacgcagatcagctgacccctacatggcgggtgtactctaccggcagcaacgtgttccagacaagagccggatgcctgatcggagcagagcacgtgaacaatagctatgagtgcgacatccctatcggcgccggcatctgtgccagctaccagacccagacaaactccccatctggagcaggctccgtggccagccagtccatcatcgcctataccatgagcctgggcgccgagaacagcgtggcctactccaacaattctatcgccatccctaccaacttcacaatcagcgtgaccacagagatcctgccagtgtctatgaccaagacaagcgtggactgcacaatgtatatctgtggcgatagcaccgagtgctccaacctgctgctgcagtacggctccttttgtacccagctgaatagagccctgacaggcatcgccgtggagcaggataagaacacacaggaggtgttcgcccaggtgaagcagatctacaagaccccacccatcaaggactttggcggcttcaacttcagccagatcctgcctgatccaagcaagccctccaagaggtcttttatcgaggacctgctgttcaacaaggtgaccctggccgatgccggcttcatcaagcagtatggagattgcctgggagacatcgcagcccgcgacctgatctgtgcccagaagtttaatggcctgaccgtgctgcctccactgctgacagatgagatgatcgcccagtacacatctgccctgctggccggcaccatcacaagcggatggaccttcggcgcaggagccgccctgcagatcccttttgccatgcagatggcctataggttcaacggcatcggcgtgacccagaatgtgctgtacgagaaccagaagctgatcgccaatcagtttaacagcgccatcggcaagatccaggactctctgtcctctacagccagcgccctgggcaagctgcaggatgtggtgaatcagaacgcccaggccctgaataccctggtgaagcagctgagctccaacttcggcgccatctctagcgtgctgaatgacatcctgagccggctggacccccctgaggcagaggtgcagatcgacaggctgatcacaggccgcctgcagagcctgcagacctacgtgacacagcagctgatcagggcagcagagatcagagcctccgccaatctggccgccaccaagatgagcgagtgcgtgctgggacagtccaagagggtggacttttgtggcaagggctatcacctgatgtctttcccacagagcgcccctcacggcgtggtgtttctgcacgtgacctacgtgccagcccaggagaagaacttcaccacagcaccagccatctgccacgatggaaaggcacactttcctagggagggcgtgttcgtgtctaacggcacccactggtttgtgacacagcgcaatttctacgagccacagatcatcaccacagacaatacattcgtgagcggcaactgtgatgtggtgatcggcatcgtgaacaataccgtgtatgatccactgcagcccgagctggactcctttaaggaggagctggataagtacttcaagaatcacacctctcccgacgtggatctgggcgacatctccggcatcaatgcctctgtggtgaacatccagaaggagatcgaccggctgaacgaggtggccaagaatctgaacgagagcctgatcgatctgcaggagctgggcaagtatgagcagtacatcaagggctctggcagagagaacctgtatttccagggaggaggaggcagcggatacatccctgaggcaccaagggacggacaggcctacgtgcgcaaggatggcgagtgggtgctgctgtccacctttctgggccatcatcaccaccaccaccaccactga

SEQ ID NO: 1257 - DNA, 3846 bp, Artificial Sequence
  Description of Artificial Sequence: Synthetic polynucleotide
atgggcatcctgccaagcccaggaatgcccgccctgctgtctctggtgagcctgctgtccgtgctgctgatgggatgcgtggcagagacaggcacacagtgcgtgaacctgaccacaaggacccagctgccccctgcctataccaattctttcacacggggcgtgtactatcccgacaaggtgtttagaagctccgtgctgcactccacacaggatctgtttctgcctttcttttctaacgtgacctggttccacgccatccacgtgtccggcaccaatggcacaaagcggttcgacaatcccgtgctgccttttaacgatggcgtgtacttcgccagcaccgagaagtccaacatcatcagaggctggatctttggcaccacactggactctaagacacagagcctgctgatcgtgaacaatgccaccaacgtggtgatcaaggtgtgcgagttccagttttgtaatgatccattcctgggcgtgtactatcacaagaacaataagtcctggatggagtctgagtttcgcgtgtattctagcgccaacaattgcacatttgagtacgtgagccagcccttcctgatggacctggagggcaagcagggcaatttcaagaacctgagggagttcgtgtttaagaatatcgatggctacttcaagatctacagcaagcacaccccaatcaacctggtgcgcgacctgccacagggattctccgccctggagccactggtggatctgcccatcggcatcaacatcacccggtttcagacactgctggccctgcacagatcctacctgacaccaggcgactcctctagcggatggaccgcaggagctgccgcctactatgtgggctatctgcagccccggaccttcctgctgaagtacaacgagaatggcaccatcacagacgcagtggattgcgccctggaccccctgtctgagacaaagtgtacactgaagagctttaccgtggagaagggcatctatcagacaagcaatttcagggtgcagcctaccgagtccatcgtgcgctttcccaatatcacaaacctgtgcccttttggcgaggtgttcaacgccaccagattcgccagcgtgtacgcctggaatcggaagagaatctccaactgcgtggccgactattctgtgctgtacaactccgcctctttcagcacctttaagtgctatggcgtgtctcccacaaagctgaatgatctgtgctttaccaacgtgtacgccgatagcttcgtgatcaggggagacgaagtgagacagatcgcaccaggacagacaggaaagatcgcagactacaattataagctgcctgacgatttcaccggctgcgtgatcgcctggaactccaacaatctggattctaaagtgggcggcaactacaattatctgtacaggctgtttcgcaagtccaatctgaagccattcgagcgggacatctccacagagatctaccaggccggctctaccccctgcaatggcgtggagggctttaactgttatttccctctgcagtcttacggcttccagccaacaaacggcgtgggctatcagccctacagagtggtggtgctgtcctttgagctgctgcacgcaccagcaacagtgtgcggcccaaagaagtctaccaatctggtgaagaacaagtgcgtgaacttcaacttcaacggactgaccggcacaggcgtgctgaccgagagcaataagaagttcctgccttttcagcagttcggcagggacatcgcagataccacagacgccgtgcgcgaccctcagaccctggagatcctggacatctcgccatgcagcttcggcggcgtgtccgtgatcacaccaggcaccaatacatccaaccaggtggccgtgctgtatcaggacgtgaattgtaccgaggtgcccgtggcaatccacgcagatcagctgacccctacatggcgggtgtactctaccggcagcaacgtgttccagacaagagccggatgcctgatcggagcagagcacgtgaacaatagctatgagtgcgacatccctatcggcgccggcatctgtgccagctaccagacccagacaaactccccatctggagcaggctccgtggccagccagtccatcatcgcctataccatgagcctgggcgccgagaacagcgtggcctactccaacaattctatcgccatccctaccaacttcacaatcagcgtgaccacagagatcctgccagtgtctatgaccaagacaagcgtggactgcacaatgtatatctgtggcgatagcaccgagtgctccaacctgctgctgcagtacggctccttttgtacccagctgaatagagccctgacaggcatcgccgtggagcaggataagaacacacaggaggtgttcgcccaggtgaagcagatctacaagaccccacccatcaaggactttggcggcttcaacttcagccagatcctgcctgatccaagcaagccctccaagaggtcttttatcgaggacctgctgttcaacaaggtgaccctggccgatgccggcttcatcaagcagtatggagattgcctgggagacatcgcagcccgcgacctgatctgtgcccagaagtttaatggcctgaccgtgctgcctccactgctgacagatgagatgatcgcccagtacacatctgccctgctggccggcaccatcacaagcggatggaccttcggcgcaggagccgccctgcagatcccttttgccatgcagatggcctataggttcaacggcatcggcgtgacccagaatgtgctgtacgagaaccagaagctgatcgccaatcagtttaacagcgccatcggcaagatccaggactctctgtcctctacagccagcgccctgggcaagctgcaggatgtggtgaatcagaacgcccaggccctgaataccctggtgaagcagctgagctccaacttcggcgccatctctagcgtgctgaatgacatcctgagccggctggacccccctgaggcagaggtgcagatcgacaggctgatcacaggccgcctgcagagcctgcagacctacgtgacacagcagctgatcagggcagcagagatcagagcctccgccaatctggccgccaccaagatgagcgagtgcgtgctgggacagtccaagagggtggacttttgtggcaagggctatcacctgatgtctttcccacagagcgcccctcacggcgtggtgtttctgcacgtgacctacgtgccagcccaggagaagaacttcaccacagcaccagccatctgccacgatggaaaggcacactttcctagggagggcgtgttcgtgtctaacggcacccactggtttgtgacacagcgcaatttctacgagccacagatcatcaccacagacaatacattcgtgagcggcaactgtgatgtggtgatcggcatcgtgaacaataccgtgtatgatccactgcagcccgagctggactcctttaaggaggagctggataagtacttcaagaatcacacctctcccgacgtggatctgggcgacatctccggcatcaatgcctctgtggtgaacatccagaaggagatcgaccggctgaacgaggtggccaagaatctgaacgagagcctgatcgatctgcaggagctgggcaagtatgagcagtacatcaagggctctggcagagagaacctgtatttccagggaggaggaggcagcggatacatccctgaggcaccaagggacggacaggcctacgtgcgcaaggatggcgagtgggtgctgctgtccacctttctgggccatcatcaccaccaccaccaccactga

SEQ ID NO: 1258 - DNA, 3846 bp, Artificial Sequence
  Description of Artificial Sequence: Synthetic polynucleotide
atgggcatcctgccaagcccaggaatgcccgccctgctgtctctggtgagcctgctgtccgtgctgctgatgggatgcgtggcagagacaggcacacagtgcgtgaacctgaccacaaggacccagctgccccctgcctataccaattctttcacacggggcgtgtactatcccgacaaggtgtttagaagctccgtgctgcactccacacaggatctgtttctgcctttcttttctaacgtgacctggttccacgccatccacgtgtccggcaccaatggcacaaaggagttcgacaatcccgtgctgccttttaacgatggcgtgtacttcgccagcaccgagaagtccaacatcatcagaggctggatctttggcaccacactggactctaagacacagagcctgctgatcgtgaacaatgccaccaacgtggtgatcaaggtgtgcgagttccagttttgtaatgatccattcctgggcgtgtactatcacaagaacaataagtcctggatggagtctgagtttcgcgtgtattctagcgccaacaattgcacatttgagtacgtgagccagcccttcctgatggacctggagggcaagcagggcaatttcaagaacctgagggagttcgtgtttaagaatatcgatggctacttcaagatctacagcaagcacaccccaatcaacctggtgcgcgacctgccacagggattctccgccctggagccactggtggatctgcccatcggcatcaacatcacccggtttcagacactgctggccctgcacagatcctacctgacaccaggcgactcctctagcggatggaccgcaggagctgccgcctactatgtgggctatctgcagccccggaccttcctgctgaagtacaacgagaatggcaccatcacagacgcagtggattgcgccctggaccccctgtctgagacaaagtgtacactgaagagctttaccgtggagaagggcatctatcagacaagcaatttcagggtgcagcctaccgagtccatcgtgcgctttcccaatatcacaaacctgtgcccttttggcgaggtgttcaacgccaccagattcgccagcgtgtacgcctggaatcggaagagaatctccaactgcgtggccgactattctgtgctgtacaactccgcctctttcagcacctttaagtgctatggcgtgtctcccacaaagctgaatgatctgtgctttaccaacgtgtacgccgatagcttcgtgatcaggggagacgaagtgagacagatcgcaccaggacagacaggaaagatcgcagactacaattataagctgcctgacgatttcaccggctgcgtgatcgcctggaactccaacaatctggattctaaagtgggcggcaactacaattatctgtacaggctgtttcgcaagtccaatctgaagccattcgagcgggacatctccacagagatctaccaggccggctctaccccctgcaatggcgtggagggctttaactgttatttccctctgcagtcttacggcttccagccaacaaacggcgtgggctatcagccctacagagtggtggtgctgtcctttgagctgctgcacgcaccagcaacagtgtgcggcccaaagaagtctaccaatctggtgaagaacaagtgcgtgaacttcaacttcaacggactgaccggcacaggcgtgctgaccgagagcaataagaagttcctgccttttcagcagttcggcagggacatcgcagataccacagacgccgtgcgcgaccctcagaccctggagatcctggacatcacaccatgcagcttcggcggcgtgtccgtgatcacaccaggcaccaatacatccaaccaggtggccgtgctgtatcaggacgtgaattgtaccgaggtgcccgtggcaatccacgcagatcagctgacccctacatggcgggtgtactctaccggcagcaacgtgttccagacaagagccggatgcctgatcggagcagagcacgtgaacaatagctatgagtgcgacatccctatcggcgccggcatctgtgccagctaccagacccagacaaactccccatctggagcaggctccgtggccagccagtccatcatcgcctataccatgagcctgggcgccgagaacagcgtggcctactccaacaattctatcgccatccctaccaacttcacaatcagcgtgaccacagagatcctgccagtgtctatgaccaagacaagcgtggactgcacaatgtatatctgtggcgatagcaccgagtgctccaacctgctgctgcagtacggctccttttgtacccagctgaatagagccctgacaggcatcgccgtggagcaggataagaacacacaggaggtgttcgcccaggtgaagcagatctacaagaccccacccatcaaggactttggcggcttcaacttcagccagatcctgcctgatccaagcaagccctccaagaggtcttttatcgaggacctgctgttcaacaaggtgaccctggccgatgccggcttcatcaagcagtatggagattgcctgggagacatcgcagcccgcgacctgatctgtgcccagaagtttaatggcctgaccgtgctgcctccactgctgacagatgagatgatcgcccagtacacatctgccctgctggccggcaccatcacaagcggatggaccttcggcgcaggagccgccctgcagatcccttttgccatgcagatggcctataggttcaacggcatcggcgtgacccagaatgtgctgtacgagaaccagaagctgatcgccaatcagtttaacagcgccatcggcaagatccaggactctctgtcctctacagccagcgccctgggcaagctgcaggatgtggtgaatcagaacgcccaggccctgaataccctggtgaagcagctgagctccaacttcggcgccatctctagcgtgctgaatgacatcctgagccggctggacccccctgaggcagaggtgcagatcgacaggctgatcacaggccgcctgcagagcctgcagacctacgtgacacagcagctgatcagggcagcagagatcagagcctccgccaatctggccgccaccaagatgagcgagtgcgtgctgggacagtccaagagggtggacttttgtggcaagggctatcacctgatgtctttcccacagagcgcccctcacggcgtggtgtttctgcacgtgacctacgtgccagcccaggagaagaacttcaccacagcaccagccatctgccacgatggaaaggcacactttcctagggagggcgtgttcgtgtctaacggcacccactggtttgtgacacagcgcaatttctacgagccacagatcatcaccacagacaatacattcgtgagcggcaactgtgatgtggtgatcggcatcgtgaacaataccgtgtatgatccactgcagcccgagctggactcctttaaggaggagctggataagtacttcaagaatcacacctctcccgacgtggatctgggcgacatctccggcatcaatgcctctgtggtgaacatccagaaggagatcgaccggctgaacgaggtggccaagaatctgaacgagagcctgatcgatctgcaggagctgggcaagtatgagcagtacatcaagggctctggcagagagaacctgtatttccagggaggaggaggcagcggatacatccctgaggcaccaagggacggacaggcctacgtgcgcaaggatggcgagtgggtgctgctgtccacctttctgggccatcatcaccaccaccaccaccactga

SEQ ID NO: 1259 - DNA, 3846 bp, Artificial Sequence
  Description of Artificial Sequence: Synthetic polynucleotide
atgggcatcctgccaagcccaggaatgcccgccctgctgtctctggtgagcctgctgtccgtgctgctgatgggatgcgtggcagagacaggcacacagtgcgtgaacctgaccacaaggacccagctgccccctgcctataccaattctttcacacggggcgtgtactatcccgacaaggtgtttagaagctccgtgctgcactccacacaggatctgtttctgcctttcttttctaacgtgacctggttccacgccatccacgtgtccggcaccaatggcacaaagcggttcgacaatcccgtgctgccttttaacgatggcgtgtacttcgccagcaccgagaagtccaacatcatcagaggctggatctttggcaccacactggactctaagacacagagcctgctgatcgtgaacaatgccaccaacgtggtgatcaaggtgtgcgagttccagttttgtaatgatccattcctgggcgtgtactatcacaagaacaataagtcctggatggagtctgagtttcgcgtgtattctagcgccaacaattgcacatttgagtacgtgagccagcccttcctgatggacctggagggcaagcagggcaatttcaagaacctgagggagttcgtgtttaagaatatcgatggctacttcaagatctacagcaagcacaccccaatcaacctggtgcgcgacctgccacagggattctccgccctggagccactggtggatctgcccatcggcatcaacatcacccggtttcagacactgctggccctgcacagatcctacctgacaccaggcgactcctctagcggatggaccgcaggagctgccgcctactatgtgggctatctgcagccccggaccttcctgctgaagtacaacgagaatggcaccatcacagacgcagtggattgcgccctggaccccctgtctgagacaaagtgtacactgaagagctttaccgtggagaagggcatctatcagacaagcaatttcagggtgcagcctaccgagtccatcgtgcgctttcccaatatcacaaacctgtgcccttttggcgaggtgttcaacgccaccagattcgccagcgtgtacgcctggaatcggaagagaatctccaactgcgtggccgactattctgtgctgtacaactccgcctctttcagcacctttaagtgctatggcgtgtctcccacaaagctgaatgatctgtgctttaccaacgtgtacgccgatagcttcgtgatcaggggagacgaagtgagacagatcgcaccaggacagacaggaaagatcgcagactacaattataagctgcctgacgatttcaccggctgcgtgatcgcctggaactccaacaatctggattctaaagtgggcggcaactacaattatctgtacaggctgtttcgcaagtccaatctgaagccattcgagcgggacatctccacagagatctaccaggccggctctaccccctgcaatggcgtggagggctttaactgttatttccctctgcagtcttacggcttccagccaacaaacggcgtgggctatcagccctacagagtggtggtgctgtcctttgagctgctgcacgcaccagcaacagtgtgcggcccaaagaagtctaccaatctggtgaagaacaagtgcgtgaacttcaacttcaacggactgaccggcacaggcgtgctgaccgagagcaataagaagttcctgccttttcagcagttcggcagggacatcgcagataccacagacgccgtgcgcgaccctcagaccctggagatcctggacatcacaccatgcagcttcggcggcgtgtccgtgatcacaccaggcaccaatacatccaaccaggtggccgtgctgtatcaggacgtgaattgtaccgaggtgcccgtggcaatccacgcagatcagctgacccctacatggcgggtgtactctaccggcagcaacgtgttccagacaagagccggatgcctgatcggagcagagcacgtgaacaatagctatgagtgcgacatccctatcggcgccggcatctgtgccagctaccagacccagacaaactccccatctggagcaggctccgtggccagccagtccatcatcgcctataccatgagcctgggcgccgagaacagcgtggcctactccaacaattctatcgccatccctaccaacttcacaatcagcgtgaccacagagatcctgccagtgtctatgaccaagacaagcgtggactgcacaatgtatatctgtggcgatagcaccgagtgctccaacctgctgctgcagtacggctccttttgtacccagctgaatagagccctgacaggcatcgccgtggagcaggataagaacacacaggaggtgttcgcccaggtgaagcagatctacaagaccccacccatcaaggactttggcggcttcaacttcagccagatcctgcctgatccaagcaagccctccaagaggtcttttatcgaggacctgctgttcaacaaggtgaccctggccgatgccggcttcatcaagcagtatggagattgcctgggagacatcgcagcccgcgacctgatctgtgcccagaagtttaatggcctgaccgtgctgcctccactgctgacagatgagatgatcgcccagtacacatctgccctgctggccggcaccatcacaagcggatggaccttcggcgcaggagccgccctgcagatcccttttgccatgcagatggcctataggttcaacggcatcggcgtgacccagaatgtgctgtacgagaaccagaagctgatcgccaatcagtttaacagcgccatcggcaagatccaggactctctgtcctctacagccagcgccctgggcaagctgcaggatgtggtgaatcagaacgcccaggccctgaataccctggtgaagcagctgagctccaacttcggcgccatctctagcgtgctgaatgacatcctgagccggctggacccccctgaggcagaggtgcagatcgacaggctgatcacaggccgcctgcagagcctgcagacctacgtgacacagcagctgatcagggcagcagagatcagagcctccgccaatctggccgccaccaagatgagcgagtgcgtgctgggacagtccaagagggtggacttttgtggcaagggctatcacctgatgtctttcccacagagcgcccctcacggcgtggtgtttctgcacgtgacctacgtgccagcccaggagaagaacttcaccacagcaccagccatctgccacgatggaaaggcacactttcctagggagggcgtgttcgtgtctaacggcaccagttggtttgtgacacagcgcaatttctacgagccacagatcatcaccacagacaatacattcgtgagcggcaactgtgatgtggtgatcggcatcgtgaacaataccgtgtatgatccactgcagcccgagctggactcctttaaggaggagctggataagtacttcaagaatcacacctctcccgacgtggatctgggcgacatctccggcatcaatgcctctgtggtgaacatccagaaggagatcgaccggctgaacgaggtggccaagaatctgaacgagagcctgatcgatctgcaggagctgggcaagtatgagcagtacatcaagggctctggcagagagaacctgtatttccagggaggaggaggcagcggatacatccctgaggcaccaagggacggacaggcctacgtgcgcaaggatggcgagtgggtgctgctgtccacctttctgggccatcatcaccaccaccaccaccactga

SEQ ID NO: 1260 - DNA, 3846 bp, Artificial Sequence
  Description of Artificial Sequence: Synthetic polynucleotide
atgggcatcctgccaagcccaggaatgcccgccctgctgtctctggtgagcctgctgtccgtgctgctgatgggatgcgtggcagagacaggcacacagtgcgtgaacctgaccacaaggacccagctgccccctgcctataccaattctttcacacggggcgtgtactatcccgacaaggtgtttagaagctccgtgctgcactccacacaggatctgtttctgcctttcttttctaacgtgacctggttccacgccatccacgtgtccggcaccaatggcacaaagcggttcgacaatcccgtgctgccttttaacgatggcgtgtacttcgccagcaccgagaagtccaacatcatcagaggctggatctttggcaccacactggactctaagacacagagcctgctgatcgtgaacaatgccaccaacgtggtgatcaaggtgtgcgagttccagttttgtaatgatccattcctgggcgtgtactatcacaagaacaataagtcctggatggagtctgagtttcgcgtgtattctagcgccaacaattgcacatttgagtacgtgagccagcccttcctgatggacctggagggcaagcagggcaatttcaagaacctgagggagttcgtgtttaagaatatcgatggctacttcaagatctacagcaagcaccaaccaatcaacctggtgcgcgacctgccacagggattctccgccctggagccactggtggatctgcccatcggcatcaacatcacccggtttcagacactgctggccctgcacagatcctacctgacaccaggcgactcctctagcggatggaccgcaggagctgccgcctactatgtgggctatctgcagccccggaccttcctgctgaagtacaacgagaatggcaccatcacagacgcagtggattgcgccctggaccccctgtctgagacaaagtgtacactgaagagctttaccgtggagaagggcatctatcagacaagcaatttcagggtgcagcctaccgagtccatcgtgcgctttcccaatatcacaaacctgtgcccttttggcgaggtgttcaacgccaccagattcgccagcgtgtacgcctggaatcggaagagaatctccaactgcgtggccgactattctgtgctgtacaactccgcctctttcagcacctttaagtgctatggcgtgtctcccacaaagctgaatgatctgtgctttaccaacgtgtacgccgatagcttcgtgatcaggggagacgaagtgagacagatcgcaccaggacagacaggaaagatcgcagactacaattataagctgcctgacgatttcaccggctgcgtgatcgcctggaactccaacaatctggattctaaagtgggcggcaactacaattatctgtacaggctgtttcgcaagtccaatctgaagccattcgagcgggacatctccacagagatctaccaggccggctctaccccctgcaatggcgtggagggctttaactgttatttccctctgcagtcttacggcttccagccaacaaacggcgtgggctatcagccctacagagtggtggtgctgtcctttgagctgctgcacgcaccagcaacagtgtgcggcccaaagaagtctaccaatctggtgaagaacaagtgcgtgaacttcaacttcaacggactgaccggcacaggcgtgctgaccgagagcaataagaagttcctgccttttcagcagttcggcagggacatcgcagataccacagacgccgtgcgcgaccctcagaccctggagatcctggacatcacaccatgcagcttcggcggcgtgtccgtgatcacaccaggcaccaatacatccaaccaggtggccgtgctgtatcaggacgtgaattgtaccgaggtgcccgtggcaatccacgcagatcagctgacccctacatggcgggtgtactctaccggcagcaacgtgttccagacaagagccggatgcctgatcggagcagagcacgtgaacaatagctatgagtgcgacatccctatcggcgccggcatctgtgccagctaccagacccagacaaactccccatctggagcaggctccgtggccagccagtccatcatcgcctataccatgagcctgggcgccgagaacagcgtggcctactccaacaattctatcgccatccctaccaacttcacaatcagcgtgaccacagagatcctgccagtgtctatgaccaagacaagcgtggactgcacaatgtatatctgtggcgatagcaccgagtgctccaacctgctgctgcagtacggctccttttgtacccagctgaatagagccctgacaggcatcgccgtggagcaggataagaacacacaggaggtgttcgcccaggtgaagcagatctacaagaccccacccatcaaggactttggcggcttcaacttcagccagatcctgcctgatccaagcaagccctccaagaggtcttttatcgaggacctgctgttcaacaaggtgaccctggccgatgccggcttcatcaagcagtatggagattgcctgggagacatcgcagcccgcgacctgatctgtgcccagaagtttaatggcctgaccgtgctgcctccactgctgacagatgagatgatcgcccagtacacatctgccctgctggccggcaccatcacaagcggatggaccttcggcgcaggagccgccctgcagatcccttttgccatgcagatggcctataggttcaacggcatcggcgtgacccagaatgtgctgtacgagaaccagaagctgatcgccaatcagtttaacagcgccatcggcaagatccaggactctctgtcctctacagccagcgccctgggcaagctgcaggatgtggtgaatcagaacgcccaggccctgaataccctggtgaagcagctgagctccaacttcggcgccatctctagcgtgctgaatgacatcctgagccggctggacccccctgaggcagaggtgcagatcgacaggctgatcacaggccgcctgcagagcctgcagacctacgtgacacagcagctgatcagggcagcagagatcagagcctccgccaatctggccgccaccaagatgagcgagtgcgtgctgggacagtccaagagggtggacttttgtggcaagggctatcacctgatgtctttcccacagagcgcccctcacggcgtggtgtttctgcacgtgacctacgtgccagcccaggagaagaacttcaccacagcaccagccatctgccacgatggaaaggcacactttcctagggagggcgtgttcgtgtctaacggcacccactggtttgtgacacagcgcaatttctacgagccacagatcatcaccacagacaatacattcgtgagcggcaactgtgatgtggtgatcggcatcgtgaacaataccgtgtatgatccactgcagcccgagctggactcctttaaggaggagctggataagtacttcaagaatcacacctctcccgacgtggatctgggcgacatctccggcatcaatgcctctgtggtgaacatccagaaggagatcgaccggctgaacgaggtggccaagaatctgaacgagagcctgatcgatctgcaggagctgggcaagtatgagcagtacatcaagggctctggcagagagaacctgtatttccagggaggaggaggcagcggatacatccctgaggcaccaagggacggacaggcctacgtgcgcaaggatggcgagtgggtgctgctgtccacctttctgggccatcatcaccaccaccaccaccactga

SEQ ID NO: 1261 - DNA, 3846 bp, Artificial Sequence
  Description of Artificial Sequence: Synthetic polynucleotide
atgggcatcctgccaagcccaggaatgcccgccctgctgtctctggtgagcctgctgtccgtgctgctgatgggatgcgtggcagagacaggcacacagtgcgtgaacctgaccacaaggacccagctgccccctgcctataccaattctttcacacggggcgtgtactatcccgacaaggtgtttagaagctccgtgctgcactccacacaggatctgtttctgcctttcttttctaacgtgacctggttccacgccatccacgtgtccggcaccaatggcacaaagcggttcgacaatcccgtgctgccttttaacgatggcgtgtacttcgccagcaccgagaagtccaacatcatcagaggctggatctttggcaccacactggactctaagacacagagcctgctgatcgtgaacaatgccaccaacgtggtgatcaaggtgtgcgagttccagttttgtaatgatccattcctgggcgtgtactatcacaagaacaataagtcctggatggagtctgagtttcgcgtgtattctagcgccaacaattgcacatttgagtacgtgagccagcccttcctgatggacctggagggcaagcagggcaatttcaagaacctgagggagttcgtgtttaagaatatcgatggctacttcaagatctacagcaagcacaccccaatcaacctggtgcgcgacctgccacagggattctccgccctggagccactggtggatctgcccatcggcatcaacatcacccggtttcagacactgctggccctgcacagatcctacctgacaccaggcgactcctctagcggatggaccgcaggagctgccgcctactatgtgggctatctgcagccccggaccttcctgctgaagtacaacgagaatggcaccatcacagacgcagtggattgcgccctggaccccctgtctgagacaaagtgtacactgaagagctttaccgtggagaagggcatctatcagacaagcaatttcagggtgcagcctaccgagtccatcgtgcgctttcccaatatcacaaacctgtgcccttttggcgaggtgttcaacgccaccagattcgccagcgtgtacgcctggaatcggaagagaatctccaactgcgtggccgactattctgtgctgtacaactccgcctctttcagcacctttaagtgctatggcgtgtctcccacaaagctgaatgatctgtgctttaccaacgtgtacgccgatagcttcgtgatcaggggagacgaagtgagacagatcgcaccaggacagacaggaaagatcgcagactacaattataagctgcctgacgatttcaccggctgcgtgatcgcctggaactccaacaatctggattctaaagtgggcggcaactacaattatctgtacaggctgtttcgcaagtccaatctgaagccattcgagcgggacatctccacagagatctaccaggccggctctaccccctgcaatggcgtggagggctttaactgttatttccctctgcagtcttacggcttccagccaacaaacggcgtgggctatcagccctacagagtggtggtgctgtcctttgagctgctgcacgcaccagcaacagtgtgcggcccaaagaagtctaccaatctggtgaagaacaagtgcgtgaacttcaacttcaacggactgaccggcacaggcgtgctgaccgagagcaataagaagttcctgccttttcagcagttcggcagggacatcgcagataccacagacgccgtgcgcgaccctcagaccctggagatcctggacatcacaccatgcagcttcggcggcgtgtccgtgatcacaccaggcaccaatacatccaaccaggtggccgtgctgtatcaggacgtgaattgtaccgaggtgcccgtggcaatccacgcagatcagctgacccctacatggcgggtgtactctaccggcagcaacgtgttccagacaagagccggatgcctgatcggagcagagcacgtgaacaatagctatgagtgcgacatccctatcggcgccggcatctgtgccagctaccagacccagacaaactccccatctggagcaggctccgtggccagcaaatccatcatcgcctataccatgagcctgggcgccgagaacagcgtggcctactccaacaattctatcgccatccctaccaacttcacaatcagcgtgaccacagagatcctgccagtgtctatgaccaagacaagcgtggactgcacaatgtatatctgtggcgatagcaccgagtgctccaacctgctgctgcagtacggctccttttgtacccagctgaatagagccctgacaggcatcgccgtggagcaggataagaacacacaggaggtgttcgcccaggtgaagcagatctacaagaccccacccatcaaggactttggcggcttcaacttcagccagatcctgcctgatccaagcaagccctccaagaggtcttttatcgaggacctgctgttcaacaaggtgaccctggccgatgccggcttcatcaagcagtatggagattgcctgggagacatcgcagcccgcgacctgatctgtgcccagaagtttaatggcctgaccgtgctgcctccactgctgacagatgagatgatcgcccagtacacatctgccctgctggccggcaccatcacaagcggatggaccttcggcgcaggagccgccctgcagatcccttttgccatgcagatggcctataggttcaacggcatcggcgtgacccagaatgtgctgtacgagaaccagaagctgatcgccaatcagtttaacagcgccatcggcaagatccaggactctctgtcctctacagccagcgccctgggcaagctgcaggatgtggtgaatcagaacgcccaggccctgaataccctggtgaagcagctgagctccaacttcggcgccatctctagcgtgctgaatgacatcctgagccggctggacccccctgaggcagaggtgcagatcgacaggctgatcacaggccgcctgcagagcctgcagacctacgtgacacagcagctgatcagggcagcagagatcagagcctccgccaatctggccgccaccaagatgagcgagtgcgtgctgggacagtccaagagggtggacttttgtggcaagggctatcacctgatgtctttcccacagagcgcccctcacggcgtggtgtttctgcacgtgacctacgtgccagcccaggagaagaacttcaccacagcaccagccatctgccacgatggaaaggcacactttcctagggagggcgtgttcgtgtctaacggcacccactggtttgtgacacagcgcaatttctacgagccacagatcatcaccacagacaatacattcgtgagcggcaactgtgatgtggtgatcggcatcgtgaacaataccgtgtatgatccactgcagcccgagctggactcctttaaggaggagctggataagtacttcaagaatcacacctctcccgacgtggatctgggcgacatctccggcatcaatgcctctgtggtgaacatccagaaggagatcgaccggctgaacgaggtggccaagaatctgaacgagagcctgatcgatctgcaggagctgggcaagtatgagcagtacatcaagggctctggcagagagaacctgtatttccagggaggaggaggcagcggatacatccctgaggcaccaagggacggacaggcctacgtgcgcaaggatggcgagtgggtgctgctgtccacctttctgggccatcatcaccaccaccaccaccactga

SEQ ID NO: 1262 - DNA, 3846 bp, Artificial Sequence
  Description of Artificial Sequence: Synthetic polynucleotide
atgggcatcctgccaagcccaggaatgcccgccctgctgtctctggtgagcctgctgtccgtgctgctgatgggatgcgtggcagagacaggcacacagtgcgtgaacctgaccacaaggacccagctgccccctgcctataccaattctttcacacggggcgtgtactatcccgacaaggtgtttagaagctccgtgctgcactccacacaggatctgtttctgcctttcttttctaacgtgacctggttccacgccatccacgtgtccggcaccaatggcacaaagcggttcgacaatcccgtgctgccttttaacgatggcgtgtacttcgccagcaccgagaagtccaacatcatcagaggctggatctttggcaccacactggactctaagacacagagcctgctgatcgtgaacaatgccaccaacgtggtgatcaaggtgtgcgagttccagttttgtaatgatccattcctgggcgtgtactatcacaagaacaataagtcctggatggagtctgagtttcgcgtgtattctagcgccaacaattgcacatttgagtacgtgagccagcccttcctgatggacctggagggcaagcagggcaatttcaagaacctgagggagttcgtgtttaagaatatcgatggctacttcaagatctacagcaagcacaccccaatcaacctggtgcgcgacctgccacagggattctccgccctggagccactggtggatctgcccatcggcatcaacatcacccggtttcagacactgctggccctgcacagatcctacctgacaccaggcgactcctctagcggatggaccgcaggagctgccgcctactatgtgggctatctgcagccccggaccttcctgctgaagtacaacgagaatggcaccatcacagacgcagtggattgcgccctggaccccctgtctgagacaaagtgtacactgaagagctttaccgtggagaagggcatctatcagacaagcaatttcagggtgcagcctaccgagtccatcgtgcgctttcccaatatcacaaacctgtgcccttttggcgaggtgttcaacgccaccagattcgccagcgtgtacgcctggaatcggaagagaatctccaactgcgtggccgactattctgtgctgtacaactccgcctctttcagcacctttaagtgctatggcgtgtctcccacaaagctgaatgatctgtgctttaccaacgtgtacgccgatagcttcgtgatcaggggagacgaagtgagacagatcgcaccaggacagacaggaaagatcgcagactacaattataagctgcctgacgatttcaccggctgcgtgatcgcctggaactccaacaatctggattctaaagtgggcggcaactacaattatctgtacaggctgtttcgcaagtccaatctgaagccattcgagcgggacatctccacagagatctaccaggccggctctaccccctgcaatggcgtggagggctttaactgttatttccctctgcagtcttacggcttccagccaacaaacggcgtgggctatcagccctacagagtggtggtgctgtcctttgagctgctgcacgcaccagcaacagtgtgcggcccaaagaagtctaccaatctggtgaagaacaagtgcgtgaacttcaacttcaacggactgaccggcacaggcgtgctgaccgagagcaataagaagttcctgccttttcagcagttcggcagggacatcgcagataccacagacgccgtgcgcgaccctcagaccctggagatcctggacatcacaccatgcagcttcggcggcgtgtccgtgatcacaccaggcaccaatacatccaaccaggtggccgtgctgtatcaggacgtgaattgtaccgaggtgcccgtggcaatccacgcagatcagctgacccctacatggcgggtgtactctaccggcagcaacgtgttccagacaagagccggatgcctgatcggagcagagcacgtgaacaatagctatgagtgcgacatccctatcggcgccggcatctgtgccagctaccagacccagacaaactccccatctggagcaggctccgtggccagccagtccatcatcgcctataccatgagcctgggcgccgagaacagcgtggcctactccaacaattctatcgccatccctaccaacttcacaatcagcgtgaccacagagatcctgccagtgtctatgaccaagacaagcgtggactgcacaatgtatatctgtggcgatagcaccgagtgctccaacctgctgctgcagtacggctccttttgtacccagctgaatagagccctgacaggcatcgccgtggagcaggataagaacacacaggaggtgttcgcccaggtgaagcagatctacaagaccccacccatcaaggactttggcggcttcaacttcagccagatcctgcctgatccaagcaagccctccaagaggtcttttatcgaggacctgctgttcaacaaggtgaccctggccgatgccggcttcatcaagcagtatggagattgcctgggagacatcgcagcccgcgacctgatctgtgcccagaagtttaatggcctgaccgtgctgcctccactgctgacagatgagatgatcgcccagtacacatctgccctgctggccggcaccatcacaagcggatggaccttcggcgcaggagccgccctgcagatcccttttgccatgcagatggcctataggttcaacggcatcggcgtgacccagaatgtgctgtacgagaaccagaagctgatcgccaatcagtttaacaaagccatcggcaagatccaggactctctgtcctctacagccagcgccctgggcaagctgcaggatgtggtgaatcagaacgcccaggccctgaataccctggtgaagcagctgagctccaacttcggcgccatctctagcgtgctgaatgacatcctgagccggctggacccccctgaggcagaggtgcagatcgacaggctgatcacaggccgcctgcagagcctgcagacctacgtgacacagcagctgatcagggcagcagagatcagagcctccgccaatctggccgccaccaagatgagcgagtgcgtgctgggacagtccaagagggtggacttttgtggcaagggctatcacctgatgtctttcccacagagcgcccctcacggcgtggtgtttctgcacgtgacctacgtgccagcccaggagaagaacttcaccacagcaccagccatctgccacgatggaaaggcacactttcctagggagggcgtgttcgtgtctaacggcacccactggtttgtgacacagcgcaatttctacgagccacagatcatcaccacagacaatacattcgtgagcggcaactgtgatgtggtgatcggcatcgtgaacaataccgtgtatgatccactgcagcccgagctggactcctttaaggaggagctggataagtacttcaagaatcacacctctcccgacgtggatctgggcgacatctccggcatcaatgcctctgtggtgaacatccagaaggagatcgaccggctgaacgaggtggccaagaatctgaacgagagcctgatcgatctgcaggagctgggcaagtatgagcagtacatcaagggctctggcagagagaacctgtatttccagggaggaggaggcagcggatacatccctgaggcaccaagggacggacaggcctacgtgcgcaaggatggcgagtgggtgctgctgtccacctttctgggccatcatcaccaccaccaccaccactga

SEQ ID NO: 1263 - DNA, 3846 bp, Artificial Sequence
  Description of Artificial Sequence: Synthetic polynucleotide
atgggcatcctgccaagcccaggaatgcccgccctgctgtctctggtgagcctgctgtccgtgctgctgatgggatgcgtggcagagacaggcacacagtgcgtgaacctgaccacaaggacccagctgccccctgcctataccaattctttcacacggggcgtgtactatcccgacaaggtgtttagaagcgatgtgctgcactccacacaggatctgtttctgcctttcttttctaacgtgacctggttccacgccatccacgtgtccggcaccaatggcacaaaggacttcgacaatcccgtgctgccttttaacgatggcgtgtacttcgccagcaccgagaagtccaacatcatcagaggctggatctttggcaccacactggactctaagacacagagcctgctgatcgtgaacaatgccaccaacgtggtgatcaaggtgtgcgagttccagttttgtgaaaatccattcctgggcgtgtactatcacaagaacaataagtcctggatggagaaagagtttcgcgtgtattctagcgccaacaattgcacatttgagtacgtgagccagcccttcctgatggacctgggaggcaagcagggcaatttcaagtggctgagggagttcgtgtttaagaatatcgatggctacttcaagatctacagcaagcacaccccaatcaacctggtgcgcgacctgccacagggattctccgccctggagccactgatggatctgcccatcggcatcaacatcacccggtttcagacactgctggccctgcacagatcctacctgacaccaggcgactcctctagcggatggaccgcaggagctgccgcctactatgtgggctatctgcagccccggaccttcctgctgaagtacaacgagaatggcaccatcacagacgcagtggattgcgccctggaccccctgtctgagacaaagtgtacactgaagagctttaccgtggagaagggcatctatcagacaagcaatttcagggtgcagcctaccgagtccatcgtgcgctttcccaatatcacaaacctgtgcccttttggcgaggtgttcaacgccaccagattcgccagcgtgtacgcctggaatcggaagagaatctccaactgcgtggccgactattctgtgctgtacaactccgcctctttcagcacctttaagtgctatggcgtgtctcccacaaagctgaatgatctgtgctttaccaacgtgtacgccgatagcttcgtgatcaggggagacgaagtgagacagatcgcaccaggacagacaggaaagatcgcagactacaattataagctgcctgacgatttcaccggctgcgtgatcgcctggaactccaacaatctggattctaaagtgggcggcaactacaattatctgtacaggctgtttcgcaagtccaatctgaagccattcgagcgggacatctccacagagatctaccaggccggctctaccccctgcaatggcgtggagggctttaactgttatttccctctgcagtcttacggcttccagccaacaaacggcgtgggctatcagccctacagagtggtggtgctgtcctttgagctgctgcacgcaccagcaacagtgtgcggcccaaagaagtctaccaatctggtgaagaacaagtgcgtgaacttcaacttcaacggactgaccggcacaggcgtgctgaccgagagcaataagaagttcctgccttttcagcagttcggcagggacatcgcagataacacagacgccgtgcgcgaccctcagaccctggagatcctggacatcacaccatgcagcttcggcggcgtgtccgtgatcacaccaggcaccaatacatccaaccaggtggccgtgctgtatcaggacgtgaattgtaccgaggtgcccaatgcaatccacgcagatcagctgacccctacatggcgggtgtactctaccggcagcaacgtgttccagacaagagccggatgcctgatcggagcagagcacgtgaacaatagctatgagtgcgacatccctatcggcgccggcatctgtgccagctaccagacccagacaaactccccatctggagcaggctccgtggccagccagtccatcatcgcctataccatgagcctgggcgccgagaacagcgtggcctactccaacaattctatcgccatccctaccaacttcacaatcagcgtgaccacagagatcctgccagtgtctatgaccaagacaagcgtggactgcacaatgtatatctgtggcgatagcaccgagtgctccaacctgctgctgcagtacggctccttttgtacccagctgaatagagccctgcaaggcatcgcccgtgagcaggataagaacacacaggaggtgttcgcccaggtgaagcagatctacaagaccccacccatcaaggactttggcggcttcaacttcagccagatcctgcctgatccaagcaagccctccaagaggtcttttatcgaggacctgctgttcaacaaggtgaccctggccgatgccggcttcatcaagcagtatggagattgcctgggagacatcgcagcccgcgacctgatctgtgcccagaagtttaatggcctgaccgtgctgcctccactgctgacagatgagatgatcgcccagtacacatctgccctgctggccggcaccatcacaagcggatggaccttcggcgcaggagccgccctgcagatcccttttgccatgcagatggcctataggttcaacggcatcggcgtgacccagaatgtgctgtacgagaaccagaagctgatcgccaatcagtttaacaaagccatcggcaagatccaggactctctgtcctctacagccagcgccctgggcaagctgcaggatgtggtgaatcagaacgcccaggccctgaataccctggtgaagcagctgagctccaacttcggcgccatctctagcgtgctgaatgacatcctgagccggctggacccccctgaggcagaggtgcagatcgacaggctgatcacaggccgcctgcagagcctgcagacctacgtgacacagcagctgatcagggcagcagagatcagagcctccgccaatctggccgccaccaagatgagcgagtgcgtgctgggacagtccaagagggtggacttttgtggcaagggctatcacctgatgtctttcccacagagcgcccctcacggcgtggtgtttctgcacgtgacctacgtgccagcccaggagaagaacttcaccacagcaccagccatctgccacgatggaaaggcattttttcctagggagggcgtgttcgtgtctaacggcacccaatggtttgtgacacagcgcaatttctacgagccacagatcatcaccacagacaatacattcgtgagcggcaactgtgatgtggtgatcggcatcgtgaacaataccgtgtatgatccactgcagcccgagctggactcctttaaggaggagctggataagtacttcaagaatcacacctctcccgacgtggatctgggcgacatctccggcatcaatgcctctgtggtgaacatccagaaggagatcgaccggctgaacgaggtggccaagaatctgaacgagagcctgatcgatctgcaggagctgggcaagtatgagcagtacatcaagggctctggcagagagaacctgtatttccagggaggaggaggcagcggatacatccctgaggcaccaagggacggacaggcctacgtgcgcaaggatggcgagtgggtgctgctgtccacctttctgggccatcatcaccaccaccaccaccactga

SEQ ID NO: 1264 - DNA, 3846 bp, Artificial Sequence
  Description of Artificial Sequence: Synthetic polynucleotide
atgggcatcctgccaagcccaggaatgcccgccctgctgtctctggtgagcctgctgtccgtgctgctgatgggatgcgtggcagagacaggcacacagtgcgtgaacctgaccacaaggacccagctgccccctgcctataccaattctttcacacggggcgtgtactatcccgacaaggtgtttagaagctccgtgctgcactccacacaggatctgtttctgcctttcttttctaacgtgacctggttccacgccatccacgtgtccggcaccaatggcacaaagcggttcgacaatcccgtgctgccttttaacgatggcgtgtacttcgccagcaccgagaagtccaacatcatcagaggctggatctttggcaccacactggactctaagacacagagcctgctgatcgtgaacaatgccaccaacgtggtgatcaaggtgtgcgagttccagttttgtaatgatccattcctgggcgtgtactatcacaagaacaataagtcctggatggagtctgagtttcgcgtgtattctagcgccaacaattgcacatttgagtacgtgagccagcccttcctgatggacctggagggcaagcagggcaatttcaagaacctgagggagttcgtgtttaagaatatcgatggctacttcaagatctacagcaagcacaccccaatcaacctggtgcgcgacctgccacagggattctccgccctggagccactggtggatctgcccatcggcatcaacatcacccggtttcagacactgctggccctgcacagatcctacctgacaccaggcgactcctctagcggatggaccgcaggagctgccgcctactatgtgggctatctgcagccccggaccttcctgctgaagtacaacgagaatggcaccatcacagacgcagtggattgcgccctggaccccctgtctgagacaaagtgtacactgaagagctttaccgtggagaagggcatctatcagacaagcaatttcagggtgcagcctaccgagtccatcgtgcgctttcccaatatcacaaacctgtgcccttttggcgaggtgttcaacgccaccagattcgccagcgtgtacgcctggaatcggaagagaatctccaactgcgtggccgactattctgtgctgtacaactccgcctctttcagcacctttaagtgctatggcgtgtctcccacaaagctgaatgatctgtgctttaccaacgtgtacgccgatagcttcgtgatcaggggagacgaagtgagacagatcgcaccaggacagacaggaaagatcgcagactacaattataagctgcctgacgatttcaccggctgcgtgatcgcctggaactccaacaatctggattctaaagtgggcggcaactacaattatctgtacaggctgtttcgcaagtccaatctgaagccattcgagcgggacatctccacagagatctaccaggccggctctaccccctgcaatggcgtggagggctttaactgttatttccctctgcagtcttacggcttccagccaacaaacggcgtgggctatcagccctacagagtggtggtgctgtcctttgagctgctgcacgcaccagcaacagtgtgcggcccaaagaagtctaccaatctggtgaagaacaagtgcgtgaacttcaacttcaacggactgaccggcacaggcgtgctgaccgagagcaataagaagttcctgccttttcagcagttcggcagggacatcgcagataccacagacgccgtgcgcgaccctcagaccctggagatcctggacatcacaccatgcagcttcggcggcgtgtccgtgatcacaccaggcaccaatacatccaaccaggtggccgtgctgtatcaggacgtgaattgtaccgaggtgcccgtggcaatccacgcagatcagctgacccctacatggcgggtgtactctaccggcagcaacgtgttccagacaagagccggatgcctgatcggagcagagcacgtgaacaatagctatgagtgcgacatccctatcggcgccggcatctgtgccagctaccagacccagacaaactccccatctggagcaggctccgtggccagccagtccatcatcgcctataccatgagcctgggcgccgagaacagcgtggcctactccaacaattctatcgccatccctaccaacttcacaatcagcgtgaccacagagatcctgccagtgtctatgaccaagacaagcgtggactgcacaatgtatatctgtggcgatagcaccgagtgctccaacctgctgctgcagtacggctccttttgtacccagctgaatagagccctgacaggcatcgccgtggagcaggataagaacacacaggaggtgttcgcccaggtgaagcagatctacaagaccccacccatcaaggactttggcggcttcaacttcagccagatcctgcctgatccaagcaagccctccaagaggtcttttatcgaggacctgctgttcaacaaggtgaccctggccgatgccggcttcatcaagcagtatggagattgcctgggagacatcgcagcccgcgacctgatctgtgcccagaagtttaatggcctgaccgtgctgcctccactgctgacagatgagatgatcgcccagtacacatctgccctgctggccggcaccatcacaagcggatggaccttcggcgcaggagccgccctgcagatcccttttgccatgcagatggcctataggttcaacggcatcggcgtgacccagaatgtgctgtacgagaaccagaagctgatcgccaatcagtttaacagcgccatcggcaagatccaggactctctgtcctctacagccagcgccctgggcaagctgcaggatgtggtgaatcagaacgcccaggccctgaataccctggtgaagcagctgagctccaacttcggcgccatctctagcgtgctgaatgacatcctgagccggctggacccccctgaggcagaggtgcagatcgacaggctgatcacaggccgcctgcagagcctgcagacctacgtgacacagcagctgatcagggcagcagagatcagagcctccgccaatctggccgccaccaagatgagcgagtgcgtgctgggacagtccaagagggtggacttttgtggcaagggctatcacctgatgtctttcccacagagcgcccctcacggcgtggtgtttctgcacgtgacctacgtgccagcccaggagaagaacttcaccacagcaccagccatctgccacgatggaaaggcacactttcctagggagggcgtgttcgtgtctaacggcacccactggtttgtgacacagcgcaatttctacgagccacaggtaatcaccacagacaatacattcgtgagcggcaactgtgatgtggtgatcggcatcgtgaacaataccgtgtatgatccactgcagcccgagctggactcctttaaggaggagctggataagtacttcaagaatcacacctctcccgacgtggatctgggcgacatctccggcatcaatgcctctgtggtgaacatccagaaggagatcgaccggctgaacgaggtggccaagaatctgaacgagagcctgatcgatctgcaggagctgggcaagtatgagcagtacatcaagggctctggcagagagaacctgtatttccagggaggaggaggcagcggatacatccctgaggcaccaagggacggacaggcctacgtgcgcaaggatggcgagtgggtgctgctgtccacctttctgggccatcatcaccaccaccaccaccactga

SEQ ID NO: 1265 - DNA, 3846 bp, Artificial Sequence
  Description of Artificial Sequence: Synthetic polynucleotide
atgggcatcctgccaagcccaggaatgcccgccctgctgtctctggtgagcctgctgtccgtgctgctgatgggatgcgtggcagagacaggcacacagtgcgtgaacctgaccacaaggacccagctgccccctgcctataccaattctttcacacggggcgtgtactatcccgacaaggtgtttagaagctccgtgctgcactccacacaggatctgtttctgcctttcttttctaacgtgacctggttccacgccatccacgtgtccggcaccaatggcacaaagcggttcgacaatcccgtgctgccttttaacgatggcgtgtacttcgccagcaccgagaagtccaacatcatcagaggctggatctttggcaccacactggactctaagacacagagcctgctgatcgtgaacaatgccaccaacgtggtgatcaaggtgtgcgagttccagttttgtaatgatccattcctgggcgtgtactatcacaagaacaataagtcctggatggagtctgagtttcgcgtgtattctagcgccaacaattgcacatttgagtacgtgagccagcccttcctgatggacctggagggcaagcagggcaatttcaagaacctgagggagttcgtgtttaagaatatcgatggctacttcaagatctacagcaagcacaccccaatcaacctggtgcgcgacctgccacagggattctccgccctggagccactggtggatctgcccatcggcatcaacatcacccggtttcagacactgctggccctgcacagatcctacctgacaccaggcgactcctctagcggatggaccgcaggagctgccgcctactatgtgggctatctgcagccccggaccttcctgctgaagtacaacgagaatggcaccatcacagacgcagtggattgcgccctggaccccctgtctgagacaaagtgtacactgaagagctttaccgtggagaagggcatctatcagacaagcaatttcagggtgcagcctaccgagtccatcgtgcgctttcccaatatcacaaacctgtgcccttttggcgaggtgttcaacgccaccagattcgccagcgtgtacgcctggaatcggaagagaatctccaactgcgtggccgactattctgtgctgtacaactccgcctctttcagcacctttaagtgctatggcgtgtctcccacaaagctgaatgatctgtgctttaccaacgtgtacgccgatagcttcgtgatcaggggagacgaagtgagacagatcgcaccaggacagacaggaaagatcgcagactacaattataagctgcctgacgatttcaccggctgcgtgatcgcctggaactccaacaatctggattctaaagtgggcggcaactacaattatctgtacaggctgtttcgcaagtccaatctgaagccattcgagcgggacatctccacagagatctaccaggccggctctaccccctgcaatggcgtggagggctttaactgttatttccctctgcagtcttacggcttccagccaacaaacggcgtgggctatcagccctacagagtggtggtgctgtcctttgagctgctgcacgcaccagcaacagtgtgcggcccaaagaagtctaccaatctggtgaagaacaagtgcgtgaacttcaacttcaacggactgaccggcacaggcgtgctgaccgagagcaataagaagttcctgccttttcagcagttcggcagggacatcgcagataccacagacgccgtgcgcgaccctcagaccctggagatcctggacatcacaccatgcagcttcggcggcgtgtccgtgatcacaccaggcaccaatacatccaaccaggtggccgtgctgtatcaggacgtgaattgtaccgaggtgcccgtggcaatccacgcagatcagctgacccctacatggcgggtgtactctaccggcagcaacgtgttccagacaagagccggatgcctgatcggagcagagcacgtgaacaatagctatgagtgcgacatccctatcggcgccggcatctgtgccagctaccagacccagacaaactccccatctggagcaggctccgtggccagccagtccatcatcgcctataccatgagcctgggcgccgagaacagcgtggcctactccaacaattctatcgccatccctaccaacttcaatatcagcgtgaccacagagatcctgccagtgtctatgaccaagacaagcgtggactgcacaatgtatatctgtggcgatagcaccgagtgctccaacctgctgctgcagtacggctccttttgtacccagctgaatagagccctgacaggcatcgccgtggagcaggataagaacacacaggaggtgttcgcccaggtgaagcagatctacaagaccccacccatcaaggactttggcggcttcaacttcagccagatcctgcctgatccaagcaagccctccaagaggtcttttatcgaggacctgctgttcaacaaggtgaccctggccgatgccggcttcatcaagcagtatggagattgcctgggagacatcgcagcccgcgacctgatctgtgcccagaagtttaatggcctgaccgtgctgcctccactgctgacagatgagatgatcgcccagtacacatctgccctgctggccggcaccatcacaagcggatggaccttcggcgcaggagccgccctgcagatcccttttgccatgcagatggcctataggttcaacggcatcggcgtgacccagaatgtgctgtacgagaaccagaagctgatcgccaatcagtttaacagcgccatcggcaagatccaggactctctgtcctctacagccagcgccctgggcaagctgcaggatgtggtgaatcagaacgcccaggccctgaataccctggtgaagcagctgagctccaacttcggcgccatctctagcgtgctgaatgacatcctgagccggctggacccccctgaggcagaggtgcagatcgacaggctgatcacaggccgcctgcagagcctgcagacctacgtgacacagcagctgatcagggcagcagagatcagagcctccgccaatctggccgccaccaagatgagcgagtgcgtgctgggacagtccaagagggtggacttttgtggcaagggctatcacctgatgtctttcccacagagcgcccctcacggcgtggtgtttctgcacgtgacctacgtgccagcccaggagaagaacttcaccacagcaccagccatctgccacgatggaaaggcacactttcctagggagggcgtgttcgtgtctaacggcacccactggtttgtgacacagcgcaatttctacgagccacagatcatcaccacagacaatacattcgtgagcggcaactgtgatgtggtgatcggcatcgtgaacaataccgtgtatgatccactgcagcccgagctggactcctttaaggaggagctggataagtacttcaagaatcacacctctcccgacgtggatctgggcgacatctccggcatcaatgcctctgtggtgaacatccagaaggagatcgaccggctgaacgaggtggccaagaatctgaacgagagcctgatcgatctgcaggagctgggcaagtatgagcagtacatcaagggctctggcagagagaacctgtatttccagggaggaggaggcagcggatacatccctgaggcaccaagggacggacaggcctacgtgcgcaaggatggcgagtgggtgctgctgtccacctttctgggccatcatcaccaccaccaccaccactga

SEQ ID NO: 1266 - DNA, 3846 bp, Artificial Sequence
  Description of Artificial Sequence: Synthetic polynucleotide
atgggcatcctgccaagcccaggaatgcccgccctgctgtctctggtgagcctgctgtccgtgctgctgatgggatgcgtggcagagacaggcacacagtgcgtgaacctgaccacaaggacccagctgccccctgcctataccaattctttcacacggggcgtgtactatcccgacaaggtgtttagaagctccgtgctgcactccacacaggatctgtttctgcctttcttttctaacgtgacctggttccacgccatccacgtgtccggcaccaatggcacaaagcggttcgacaatcccgtgctgccttttaacgatggcgtgtacttcgccagcaccgagaagtccaacatcatcagaggctggatctttggcaccacactggactctaagacacagagcctgctgatcgtgaacaatgccaccaacgtggtgatcaaggtgtgcgagttccagttttgtaatgatccattcctgggcgtgtactatcacaagaacaataagtcctggatggagtctgagtttcgcgtgtattctagcgccaacaattgcacatttgagtacgtgagccagcccttcctgtacgacctggagggcaagcagggcaatttcaagaacctgagggagttcgtgtttaagaatatcgatggctacttcaagatctacagcaagcacaccccaatcaacctggtgcgcgacctgccacagggattctccgccctggagccactggtggatctgcccatcggcatcaacatcacccggtttcagacactgctggccctgcacagatcctacctgacaccaggcgactcctctagcggatggaccgcaggagctgccgcctactatgtgggctatctgcagccccggaccttcctgctgaagtacaacgagaatggcaccatcacagacgcagtggattgcgccctggaccccctgtctgagacaaagtgtacactgaagagctttaccgtggagaagggcatctatcagacaagcaatttcagggtgcagcctaccgagtccatcgtgcgctttcccaatatcacaaacctgtgcccttttggcgaggtgttcaacgccaccagattcgccagcgtgtacgcctggaatcggaagagaatctccaactgcgtggccgactattctgtgctgtacaactccgcctctttcagcacctttaagtgctatggcgtgtctcccacaaagctgaatgatctgtgctttaccaacgtgtacgccgatagcttcgtgatcaggggagacgaagtgagacagatcgcaccaggacagacaggaaagatcgcagactacaattataagctgcctgacgatttcaccggctgcgtgatcgcctggaactccaacaatctggattctaaagtgggcggcaactacaattatctgtacaggctgtttcgcaagtccaatctgaagccattcgagcgggacatctccacagagatctaccaggccggctctaccccctgcaatggcgtggagggctttaactgttatttccctctgcagtcttacggcttccagccaacaaacggcgtgggctatcagccctacagagtggtggtgctgtcctttgagctgctgcacgcaccagcaacagtgtgcggcccaaagaagtctaccaatctggtgaagaacaagtgcgtgaacttcaacttcaacggactgaccggcacaggcgtgctgaccgagagcaataagaagttcctgccttttcagcagttcggcagggacatcgcagataccacagacgccgtgcgcgaccctcagaccctggagatcctggacatcacaccatgcagcttcggcggcgtgtccgtgatcacaccaggcaccaatacatccaaccaggtggccgtgctgtatcaggacgtgaattgtaccgaggtgcccgtggcaatccacgcagatcagctgacccctacatggcgggtgtactctaccggcagcaacgtgttccagacaagagccggatgcctgatcggagcagagcacgtgaacaatagctatgagtgcgacatccctatcggcgccggcatctgtgccagctaccagacccagacaaactccccatctggagcaggctccgtggccagccagtccatcatcgcctataccatgagcctgggcgccgagaacagcgtggcctactccaacaattctatcgccatccctaccaacttcacaatcagcgtgaccacagagatcctgccagtgtctatgaccaagacaagcgtggactgcacaatgtatatctgtggcgatagcaccgagtgctccaacctgctgctgcagtacggctccttttgtacccagctgaatagagccctgacaggcatcgccgtggagcaggataagaacacacaggaggtgttcgcccaggtgaagcagatctacaagaccccacccatcaaggactttggcggcttcaacttcagccagatcctgcctgatccaagcaagccctccaagaggtcttttatcgaggacctgctgttcaacaaggtgaccctggccgatgccggcttcatcaagcagtatggagattgcctgggagacatcgcagcccgcgacctgatctgtgcccagaagtttaatggcctgaccgtgctgcctccactgctgacagatgagatgatcgcccagtacacatctgccctgctggccggcaccatcacaagcggatggaccttcggcgcaggagccgccctgcagatcccttttgccatgcagatggcctataggttcaacggcatcggcgtgacccagaatgtgctgtacgagaaccagaagctgatcgccaatcagtttaacagcgccatcggcaagatccaggactctctgtcctctacagccagcgccctgggcaagctgcaggatgtggtgaatcagaacgcccaggccctgaataccctggtgaagcagctgagctccaacttcggcgccatctctagcgtgctgaatgacatcctgagccggctggacccccctgaggcagaggtgcagatcgacaggctgatcacaggccgcctgcagagcctgcagacctacgtgacacagcagctgatcagggcagcagagatcagagcctccgccaatctggccgccaccaagatgagcgagtgcgtgctgggacagtccaagagggtggacttttgtggcaagggctatcacctgatgtctttcccacagagcgcccctcacggcgtggtgtttctgcacgtgacctacgtgccagcccaggagaagaacttcaccacagcaccagccatctgccacgatggaaaggcacactttcctagggagggcgtgttcgtgtctaacggcacccactggtttgtgacacagcgcaatttctacgagccacagatcatcaccacagacaatacattcgtgagcggcaactgtgatgtggtgatcggcatcgtgaacaataccgtgtatgatccactgcagcccgagctggactcctttaaggaggagctggataagtacttcaagaatcacacctctcccgacgtggatctgggcgacatctccggcatcaatgcctctgtggtgaacatccagaaggagatcgaccggctgaacgaggtggccaagaatctgaacgagagcctgatcgatctgcaggagctgggcaagtatgagcagtacatcaagggctctggcagagagaacctgtatttccagggaggaggaggcagcggatacatccctgaggcaccaagggacggacaggcctacgtgcgcaaggatggcgagtgggtgctgctgtccacctttctgggccatcatcaccaccaccaccaccactga

SEQ ID NO: 1267 - DNA, 3846 bp, Artificial Sequence
  Description of Artificial Sequence: Synthetic polynucleotide
atgggcatcctgccaagcccaggaatgcccgccctgctgtctctggtgagcctgctgtccgtgctgctgatgggatgcgtggcagagacaggcacacagtgcgtgaacctgaccacaaggacccagctgccccctgcctataccaattctttcacacggggcgtgtactatcccgacaaggtgtttagaagctccgtgctgcactccacacaggatctgtttctgcctttcttttctaacgtgacctggttccacgccatccacgtgtccggcaccaatggcacaaagcggttcgacaatcccgtgctgccttttaacgatggcgtgtacttcgccagcaccgagaagtccaacatcatcagaggctggatctttggcaccacactggactctaagacacagagcctgctgatcgtgaacaatgccaccaacgtggtgatcaaggtgtgcgagttccagttttgtaatgatccattcctgggcgtgtactatcacaagaacaataagtcctggatggagtctgagtttcgcgtgtattctagcgccaacaattgcacatttgagtacgtgagccagcccttcctgccagacctggagggcaagcagggcaatttcaagaacctgagggagttcgtgtttaagaatatcgatggctacttcaagatctacagcaagcacaccccaatcaacctggtgcgcgacctgccacagggattctccgccctggagccactggtggatctgcccatcggcatcaacatcacccggtttcagacactgctggccctgcacagatcctacctgacaccaggcgactcctctagcggatggaccgcaggagctgccgcctactatgtgggctatctgcagccccggaccttcctgctgaagtacaacgagaatggcaccatcacagacgcagtggattgcgccctggaccccctgtctgagacaaagtgtacactgaagagctttaccgtggagaagggcatctatcagacaagcaatttcagggtgcagcctaccgagtccatcgtgcgctttcccaatatcacaaacctgtgcccttttggcgaggtgttcaacgccaccagattcgccagcgtgtacgcctggaatcggaagagaatctccaactgcgtggccgactattctgtgctgtacaactccgcctctttcagcacctttaagtgctatggcgtgtctcccacaaagctgaatgatctgtgctttaccaacgtgtacgccgatagcttcgtgatcaggggagacgaagtgagacagatcgcaccaggacagacaggaaagatcgcagactacaattataagctgcctgacgatttcaccggctgcgtgatcgcctggaactccaacaatctggattctaaagtgggcggcaactacaattatctgtacaggctgtttcgcaagtccaatctgaagccattcgagcgggacatctccacagagatctaccaggccggctctaccccctgcaatggcgtggagggctttaactgttatttccctctgcagtcttacggcttccagccaacaaacggcgtgggctatcagccctacagagtggtggtgctgtcctttgagctgctgcacgcaccagcaacagtgtgcggcccaaagaagtctaccaatctggtgaagaacaagtgcgtgaacttcaacttcaacggactgaccggcacaggcgtgctgaccgagagcaataagaagttcctgccttttcagcagttcggcagggacatcgcagataccacagacgccgtgcgcgaccctcagaccctggagatcctggacatcacaccatgcagcttcggcggcgtgtccgtgatcacaccaggcaccaatacatccaaccaggtggccgtgctgtatcaggacgtgaattgtaccgaggtgcccgtggcaatccacgcagatcagctgacccctacatggcgggtgtactctaccggcagcaacgtgttccagacaagagccggatgcctgatcggagcagagcacgtgaacaatagctatgagtgcgacatccctatcggcgccggcatctgtgccagctaccagacccagacaaactccccatctggagcaggctccgtggccagccagtccatcatcgcctataccatgagcctgggcgccgagaacagcgtggcctactccaacaattctatcgccatccctaccaacttcacaatcagcgtgaccacagagatcctgccagtgtctatgaccaagacaagcgtggactgcacaatgtatatctgtggcgatagcaccgagtgctccaacctgctgctgcagtacggctccttttgtacccagctgaatagagccctgacaggcatcgccgtggagcaggataagaacacacaggaggtgttcgcccaggtgaagcagatctacaagaccccacccatcaaggactttggcggcttcaacttcagccagatcctgcctgatccaagcaagccctccaagaggtcttttatcgaggacctgctgttcaacaaggtgaccctggccgatgccggcttcatcaagcagtatggagattgcctgggagacatcgcagcccgcgacctgatctgtgcccagaagtttaatggcctgaccgtgctgcctccactgctgacagatgagatgatcgcccagtacacatctgccctgctggccggcaccatcacaagcggatggaccttcggcgcaggagccgccctgcagatcccttttgccatgcagatggcctataggttcaacggcatcggcgtgacccagaatgtgctgtacgagaaccagaagctgatcgccaatcagtttaacagcgccatcggcaagatccaggactctctgtcctctacagccagcgccctgggcaagctgcaggatgtggtgaatcagaacgcccaggccctgaataccctggtgaagcagctgagctccaacttcggcgccatctctagcgtgctgaatgacatcctgagccggctggacccccctgaggcagaggtgcagatcgacaggctgatcacaggccgcctgcagagcctgcagacctacgtgacacagcagctgatcagggcagcagagatcagagcctccgccaatctggccgccaccaagatgagcgagtgcgtgctgggacagtccaagagggtggacttttgtggcaagggctatcacctgatgtctttcccacagagcgcccctcacggcgtggtgtttctgcacgtgacctacgtgccagcccaggagaagaacttcaccacagcaccagccatctgccacgatggaaaggcacactttcctagggagggcgtgttcgtgtctaacggcacccactggtttgtgacacagcgcaatttctacgagccacagatcatcaccacagacaatacattcgtgagcggcaactgtgatgtggtgatcggcatcgtgaacaataccgtgtatgatccactgcagcccgagctggactcctttaaggaggagctggataagtacttcaagaatcacacctctcccgacgtggatctgggcgacatctccggcatcaatgcctctgtggtgaacatccagaaggagatcgaccggctgaacgaggtggccaagaatctgaacgagagcctgatcgatctgcaggagctgggcaagtatgagcagtacatcaagggctctggcagagagaacctgtatttccagggaggaggaggcagcggatacatccctgaggcaccaagggacggacaggcctacgtgcgcaaggatggcgagtgggtgctgctgtccacctttctgggccatcatcaccaccaccaccaccactga

SEQ ID NO: 1268 - DNA, 3846 bp, Artificial Sequence
  Description of Artificial Sequence: Synthetic polynucleotide
atgggcatcctgccaagcccaggaatgcccgccctgctgtctctggtgagcctgctgtccgtgctgctgatgggatgcgtggcagagacaggcacacagtgcgtgaacctgaccacaaggacccagctgccccctgcctataccaattctttcacacggggcgtgtactatcccgacaaggtgtttagaagctccgtgctgcactccacacaggatctgtttctgcctttcttttctaacgtgacctggttccacgccatccacgtgtccggcaccaatggcacaaagcggttcgacaatcccgtgctgccttttaacgatggcgtgtacttcgccagcaccgagaagtccaacatcatcagaggctggatctttggcaccacactggactctaagacacagagcctgctgatcgtgaacaatgccaccaacgtggtgatcaaggtgtgcgagttccagttttgtaatgatccattcctgggcgtgtactatcacaagaacaataagtcctggatggagactgagtttcgcgtgtattctagcgccaacaattgcacatttgagtacgtgagccagcccttcctgatggacctggagggcaagcagggcaatttcaagaacctgagggagttcgtgtttaagaatatcgatggctacttcaagatctacagcaagcacaccccaatcaacctggtgcgcgacctgccacagggattctccgccctggagccactggtggatctgcccatcggcatcaacatcacccggtttcagacactgctggccctgcacagatcctacctgacaccaggcgactcctctagcggatggaccgcaggagctgccgcctactatgtgggctatctgcagccccggaccttcctgctgaagtacaacgagaatggcaccatcacagacgcagtggattgcgccctggaccccctgtctgagacaaagtgtacactgaagagctttaccgtggagaagggcatctatcagacaagcaatttcagggtgcagcctaccgagtccatcgtgcgctttcccaatatcacaaacctgtgcccttttggcgaggtgttcaacgccaccagattcgccagcgtgtacgcctggaatcggaagagaatctccaactgcgtggccgactattctgtgctgtacaactccgcctctttcagcacctttaagtgctatggcgtgtctcccacaaagctgaatgatctgtgctttaccaacgtgtacgccgatagcttcgtgatcaggggagacgaagtgagacagatcgcaccaggacagacaggaaagatcgcagactacaattataagctgcctgacgatttcaccggctgcgtgatcgcctggaactccaacaatctggattctaaagtgggcggcaactacaattatctgtacaggctgtttcgcaagtccaatctgaagccattcgagcgggacatctccacagagatctaccaggccggctctaccccctgcaatggcgtggagggctttaactgttatttccctctgcagtcttacggcttccagccaacaaacggcgtgggctatcagccctacagagtggtggtgctgtcctttgagctgctgcacgcaccagcaacagtgtgcggcccaaagaagtctaccaatctggtgaagaacaagtgcgtgaacttcaacttcaacggactgaccggcacaggcgtgctgaccgagagcaataagaagttcctgccttttcagcagttcggcagggacatcgcagataccacagacgccgtgcgcgaccctcagaccctggagatcctggacatcacaccatgcagcttcggcggcgtgtccgtgatcacaccaggcaccaatacatccaaccaggtggccgtgctgtatcaggacgtgaattgtaccgaggtgcccgtggcaatccacgcagatcagctgacccctacatggcgggtgtactctaccggcagcaacgtgttccagacaagagccggatgcctgatcggagcagagcacgtgaacaatagctatgagtgcgacatccctatcggcgccggcatctgtgccagctaccagacccagacaaactccccatctggagcaggctccgtggccagccagtccatcatcgcctataccatgagcctgggcgccgagaacagcgtggcctactccaacaattctatcgccatccctaccaacttcacaatcagcgtgaccacagagatcctgccagtgtctatgaccaagacaagcgtggactgcacaatgtatatctgtggcgatagcaccgagtgctccaacctgctgctgcagtacggctccttttgtacccagctgaatagagccctgacaggcatcgccgtggagcaggataagaacacacaggaggtgttcgcccaggtgaagcagatctacaagaccccacccatcaaggactttggcggcttcaacttcagccagatcctgcctgatccaagcaagccctccaagaggtcttttatcgaggacctgctgttcaacaaggtgaccctggccgatgccggcttcatcaagcagtatggagattgcctgggagacatcgcagcccgcgacctgatctgtgcccagaagtttaatggcctgaccgtgctgcctccactgctgacagatgagatgatcgcccagtacacatctgccctgctggccggcaccatcacaagcggatggaccttcggcgcaggagccgccctgcagatcccttttgccatgcagatggcctataggttcaacggcatcggcgtgacccagaatgtgctgtacgagaaccagaagctgatcgccaatcagtttaacagcgccatcggcaagatccaggactctctgtcctctacagccagcgccctgggcaagctgcaggatgtggtgaatcagaacgcccaggccctgaataccctggtgaagcagctgagctccaacttcggcgccatctctagcgtgctgaatgacatcctgagccggctggacccccctgaggcagaggtgcagatcgacaggctgatcacaggccgcctgcagagcctgcagacctacgtgacacagcagctgatcagggcagcagagatcagagcctccgccaatctggccgccaccaagatgagcgagtgcgtgctgggacagtccaagagggtggacttttgtggcaagggctatcacctgatgtctttcccacagagcgcccctcacggcgtggtgtttctgcacgtgacctacgtgccagcccaggagaagaacttcaccacagcaccagccatctgccacgatggaaaggcacactttcctagggagggcgtgttcgtgtctaacggcacccactggtttgtgacacagcgcaatttctacgagccacagatcatcaccacagacaatacattcgtgagcggcaactgtgatgtggtgatcggcatcgtgaacaataccgtgtatgatccactgcagcccgagctggactcctttaaggaggagctggataagtacttcaagaatcacacctctcccgacgtggatctgggcgacatctccggcatcaatgcctctgtggtgaacatccagaaggagatcgaccggctgaacgaggtggccaagaatctgaacgagagcctgatcgatctgcaggagctgggcaagtatgagcagtacatcaagggctctggcagagagaacctgtatttccagggaggaggaggcagcggatacatccctgaggcaccaagggacggacaggcctacgtgcgcaaggatggcgagtgggtgctgctgtccacctttctgggccatcatcaccaccaccaccaccactga

SEQ ID NO: 1269 - DNA, 3846 bp, Artificial Sequence
  Description of Artificial Sequence: Synthetic polynucleotide
atgggcatcctgccaagcccaggaatgcccgccctgctgtctctggtgagcctgctgtccgtgctgctgatgggatgcgtggcagagacaggcacacagtgcgtgaacctgaccacaaggacccagctgccccctgcctataccaattctttcacacggggcgtgtactatcccgacaaggtgtttagaagcgatgtgctgcactccacacaggatctgtttctgcctttcttttctaacgtgacctggttccacgccatccacgtgtccggcaccaatggcacaaagcggttcgacaatcccgtgctgccttttaacgatggcgtgtacttcgccagcaccgagaagtccaacatcatcagaggctggatctttggcaccacactggactctaagacacagagcctgctgatcgtgaacaatgccaccaacgtggtgatcaaggtgtgcgagttccagttttgtgacaatccattcctgggcgtgtactatcacaagaacaataagtcctggatggagaaagagtttcgcgtgtattctagcgccaacaattgcacatttgagtacgtgagccagcccttcctgatggacctgggtggcaagcagggcaatttcaagtggctgagggagttcgtgtttaagaatatcgatggctacttcaagatctacagcaagcacaccccaatcaacctggtgcgcgacctgccacagggattctccgccctggagccactgatggatctgcccatcggcatcaacatcacccggtttcagacactgctggccctgcacagatcctacctgacaccaggcgactcctctagcggatggaccgcaggagctgccgcctactatgtgggctatctgcagccccggaccttcctgctgaagtacaacgagaatggcaccatcacagacgcagtggattgcgccctggaccccctgtctgagacaaagtgtacactgaagagctttaccgtggagaagggcatctatcagacaagcaatttcagggtgcagcctaccgagtccatcgtgcgctttcccaatatcacaaacctgtgcccttttggcgaggtgttcaacgccaccagattcgccagcgtgtacgcctggaatcggaagagaatctccaactgcgtggccgactattctgtgctgtacaactccgcctctttcagcacctttaagtgctatggcgtgtctcccacaaagctgaatgatctgtgctttaccaacgtgtacgccgatagcttcgtgatcaggggagacgaagtgagacagatcgcaccaggacagacaggaaagatcgcagactacaattataagctgcctgacgatttcaccggctgcgtgatcgcctggaactccaacaatctggattctaaagtgggcggcaactacaattatctgtacaggctgtttcgcaagtccaatctgaagccattcgagcgggacatctccacagagatctaccaggccggctctaccccctgcaatggcgtggagggctttaactgttatttccctctgcagtcttacggcttccagccaacaaacggcgtgggctatcagccctacagagtggtggtgctgtcctttgagctgctgcacgcaccagcaacagtgtgcggcccaaagaagtctaccaatctggtgaagaacaagtgcgtgaacttcaacttcaacggactgaccggcacaggcgtgctgaccgagagcaataagaagttcctgccttttcagcagttcggcagggacatcgcagataatacagacgccgtgcgcgaccctcagaccctggagatcctggacatcacaccatgcagcttcggcggcgtgtccgtgatcacaccaggcaccaatacatccaaccaggtggccgtgctgtatcaggacgtgaattgtaccgaggtgcccaatgcaatccacgcagatcagctgacccctacatggcgggtgtactctaccggcagcaacgtgttccagacaagagccggatgcctgatcggagcagagcacgtgaacaatagctatgagtgcgacatccctatcggcgccggcatctgtgccagctaccagacccagacaaactccccatctggagcaggctccgtggccagccagtccatcatcgcctataccatgagcctgggcgccgagaacagcgtggcctactccaacaattctatcgccatccctaccaacttcacaatcagcgtgaccacagagatcctgccagtgtctatgaccaagacaagcgtggactgcacaatgtatatctgtggcgatagcaccgagtgctccaacctgctgctgcagtacggctccttttgtacccagctgaatagagccctgcaaggcatcgcccgagagcaggataagaacacacaggaggtgttcgcccaggtgaagcagatctacaagaccccacccatcaaggactttggcggcttcaacttcagccagatcctgcctgatccaagcaagccctccaagaggtcttttatcgaggacctgctgttcaacaaggtgaccctggccgatgccggcttcatcaagcagtatggagattgcctgggagacatcgcagcccgcgacctgatctgtgcccagaagtttaatggcctgaccgtgctgcctccactgctgacagatgagatgatcgcccagtacacatctgccctgctggccggcaccatcacaagcggatggaccttcggcgcaggagccgccctgcagatcccttttgccatgcagatggcctataggttcaacggcatcggcgtgacccagaatgtgctgtacgagaaccagaagctgatcgccaatcagtttaacaaagccatcggcaagatccaggactctctgtcctctacagccagcgccctgggcaagctgcaggatgtggtgaatcagaacgcccaggccctgaataccctggtgaagcagctgagctccaacttcggcgccatctctagcgtgctgaatgacatcctgagccggctggacccccctgaggcagaggtgcagatcgacaggctgatcacaggccgcctgcagagcctgcagacctacgtgacacagcagctgatcagggcagcagagatcagagcctccgccaatctggccgccaccaagatgagcgagtgcgtgctgggacagtccaagagggtggacttttgtggcaagggctatcacctgatgtctttcccacagagcgcccctcacggcgtggtgtttctgcacgtgacctacgtgccagcccaggagaagaacttcaccacagcaccagccatctgccacgatggaaaggcattttttcctagggagggcgtgttcgtgtctaacggcacccaatggtttgtgacacagcgcaatttctacgagccacagatcatcaccacagacaatacattcgtgagcggcaactgtgatgtggtgatcggcatcgtgaacaataccgtgtatgatccactgcagcccgagctggactcctttaaggaggagctggataagtacttcaagaatcacacctctcccgacgtggatctgggcgacatctccggcatcaatgcctctgtggtgaacatccagaaggagatcgaccggctgaacgaggtggccaagaatctgaacgagagcctgatcgatctgcaggagctgggcaagtatgagcagtacatcaagggctctggcagagagaacctgtatttccagggaggaggaggcagcggatacatccctgaggcaccaagggacggacaggcctacgtgcgcaaggatggcgagtgggtgctgctgtccacctttctgggccatcatcaccaccaccaccaccactga

SEQ ID NO: 1270 - DNA, 3846 bp, Artificial Sequence
  Description of Artificial Sequence: Synthetic polynucleotide
atgggcatcctgccaagcccaggaatgcccgccctgctgtctctggtgagcctgctgtccgtgctgctgatgggatgcgtggcagagacaggcacacagtgcgtgaacctgaccacaaggacccagctgccccctgcctataccaattctttcacacggggcgtgtactatcccgacaaggtgtttagaagctccgtgctgcactccacacaggatctgtttctgcctttcttttctaacgtgacctggttccacgccatccacgtgtccggcaccaatggcacaaagcggttcgacaatcccgtgctgccttttaacgatggcgtgtacttcgccagcaccgagaagtccaacatcatcagaggctggatctttggcaccacactggactctaagacacagagcctgctgatcgtgaacaatgccaccaacgtggtgatcaaggtgtgcgagttccagttttgtaatgatccattcctgggcgtgtactatcacaagaacaataagtcctggatggagtctgagtttcgcgtgtattctagcgccaacaattgcacatttgagtacgtgagccagcccttcctgatggacctggagggcaagcagggcaatttcaagaacctgagggagttcgtgtttaagaatatcgatggctacttcaagatctacagcaagcacaccccaatcaacctggtgcgcgacctgccacagggattctccgccctggagccactggtggatctgcccatcggcatcaacatcacccggtttcagacactgctggccctgcacagatcctacctgacaccaggcgactcctctagcggatggaccgcaggagctgccgcctactatgtgggctatctgcagccccggaccttcctgctgaagtacaacgagaatggcaccatcacagacgcagtggattgcgccctggaccccctgtctgagacaaagtgtacactgaagagctttaccgtggagaagggcatctatcagacaagcaatttcagggtgcagcctaccgagtccatcgtgcgctttcccaatatcacaaacctgtgcccttttggcgaggtgttcaacgccaccagattcgccagcgtgtacgcctggaatcggaagagaatctccaactgcgtggccgactattctgtgctgtacaactccgcctctttcagcacctttaagtgctatggcgtgtctcccacaaagctgaatgatctgtgctttaccaacgtgtacgccgatagcttcgtgatcaggggagacgaagtgagacagatcgcaccaggacagacaggaaagatcgcagactacaattataagctgcctgacgatttcaccggctgcgtgatcgcctggaactccaacaatctggattctaaagtgggcggcaactacaattatctgtacaggctgtttcgcaagtccaatctgaagccattcgagcgggacatctccacagagatctaccaggccggctctaccccctgcaatggcgtggagggctttaactgttatttccctctgcagtcttacggcttccagccaacaaacggcgtgggctatcagccctacagagtggtggtgctgtcctttgagctgctgcacgcaccagcaacagtgtgcggcccaaagaagtctaccaatctggtgaagaacaagtgcgtgaacttcaacttcaacggactgaccggcacaggcgtgctgaccgagagcaataagaagttcctgccttttcagcagttcggcagggacatcgcagataccacagacgccgtgcgcgaccctcagaccctggagatcctggacatcacaccatgcagcttcggcggcgtgtccgtgatcacaccaggcaccaatacatccaaccaggtggccgtgctgtatcaggacgtgaattgtaccgaggtgcccgtggcaatccacgcagatcagctgacccctacatggcgggtgtactctaccggcagcaacgtgttccagacaagagccggatgcctgatcggagcagagcacgtgaacaatagctatgagtgcgacatccctatcggcgccggcatctgtgccagctaccagacccagacaaactccccatctggagcaggctccgtggccagccagtccatcatcgcctataccatgagcctgggcgccgagaacagcgtggcctactccaacaattctatcgccatccctaccaacttcctcatcagcgtgaccacagagatcctgccagtgtctatgaccaagacaagcgtggactgcacaatgtatatctgtggcgatagcaccgagtgctccaacctgctgctgcagtacggctccttttgtacccagctgaatagagccctgacaggcatcgccgtggagcaggataagaacacacaggaggtgttcgcccaggtgaagcagatctacaagaccccacccatcaaggactttggcggcttcaacttcagccagatcctgcctgatccaagcaagccctccaagaggtcttttatcgaggacctgctgttcaacaaggtgaccctggccgatgccggcttcatcaagcagtatggagattgcctgggagacatcgcagcccgcgacctgatctgtgcccagaagtttaatggcctgaccgtgctgcctccactgctgacagatgagatgatcgcccagtacacatctgccctgctggccggcaccatcacaagcggatggaccttcggcgcaggagccgccctgcagatcccttttgccatgcagatggcctataggttcaacggcatcggcgtgacccagaatgtgctgtacgagaaccagaagctgatcgccaatcagtttaacagcgccatcggcaagatccaggactctctgtcctctacagccagcgccctgggcaagctgcaggatgtggtgaatcagaacgcccaggccctgaataccctggtgaagcagctgagctccaacttcggcgccatctctagcgtgctgaatgacatcctgagccggctggacccccctgaggcagaggtgcagatcgacaggctgatcacaggccgcctgcagagcctgcagacctacgtgacacagcagctgatcagggcagcagagatcagagcctccgccaatctggccgccaccaagatgagcgagtgcgtgctgggacagtccaagagggtggacttttgtggcaagggctatcacctgatgtctttcccacagagcgcccctcacggcgtggtgtttctgcacgtgacctacgtgccagcccaggagaagaacttcaccacagcaccagccatctgccacgatggaaaggcacactttcctagggagggcgtgttcgtgtctaacggcacccactggtttgtgacacagcgcaatttctacgagccacagatcatcaccacagacaatacattcgtgagcggcaactgtgatgtggtgatcggcatcgtgaacaataccgtgtatgatccactgcagcccgagctggactcctttaaggaggagctggataagtacttcaagaatcacacctctcccgacgtggatctgggcgacatctccggcatcaatgcctctgtggtgaacatccagaaggagatcgaccggctgaacgaggtggccaagaatctgaacgagagcctgatcgatctgcaggagctgggcaagtatgagcagtacatcaagggctctggcagagagaacctgtatttccagggaggaggaggcagcggatacatccctgaggcaccaagggacggacaggcctacgtgcgcaaggatggcgagtgggtgctgctgtccacctttctgggccatcatcaccaccaccaccaccactga

SEQ ID NO: 1271 - DNA, 3846 bp, Artificial Sequence
  Description of Artificial Sequence: Synthetic polynucleotide
atgggcatcctgccaagcccaggaatgcccgccctgctgtctctggtgagcctgctgtccgtgctgctgatgggatgcgtggcagagacaggcacacagtgcgtgaacctgaccacaaggacccagctgccccctgcctataccaattctttcacacggggcgtgtactatcccgacaaggtgtttagaagctccgtgctgcactccacacaggatctgtttctgcctttcttttctaacgtgacctggttccacgccatccacgtgtccggcaccaatggcacaaagcggttcgacaatcccgtgctgccttttaacgatggcgtgtacttcgccagcaccgagaagtccaacatcatcagaggctggatctttggcaccacactggactctaagacacagagcctgctgatcgtgaacaatgccaccaacgtggtgatcaaggtgtgcgagttccagttttgtaatgatccattcctgggcgtgtactatcacaagaacaataagtcctggatggagtctgagtttcgcgtgtattctagcgccaacaattgcacatttgagtacgtgagccagcccttcctgatggacctggagggcaagcagggcaatttcaagaacctgagggagttcgtgtttaagaatatcgatggctacttcaagatctacagcaagcacaccccaatcaacctggtgcgcgacctgccacagggattctccgccctggagccactggtggatctgcccatcggcatcaacatcacccggtttcagacactgctgtcgctgcacagatcctacctgacaccaggcgactcctctagcggatggaccgcaggagctgccgcctactatgtgggctatctgcagccccggaccttcctgctgaagtacaacgagaatggcaccatcacagacgcagtggattgcgccctggaccccctgtctgagacaaagtgtacactgaagagctttaccgtggagaagggcatctatcagacaagcaatttcagggtgcagcctaccgagtccatcgtgcgctttcccaatatcacaaacctgtgcccttttggcgaggtgttcaacgccaccagattcgccagcgtgtacgcctggaatcggaagagaatctccaactgcgtggccgactattctgtgctgtacaactccgcctctttcagcacctttaagtgctatggcgtgtctcccacaaagctgaatgatctgtgctttaccaacgtgtacgccgatagcttcgtgatcaggggagacgaagtgagacagatcgcaccaggacagacaggaaagatcgcagactacaattataagctgcctgacgatttcaccggctgcgtgatcgcctggaactccaacaatctggattctaaagtgggcggcaactacaattatctgtacaggctgtttcgcaagtccaatctgaagccattcgagcgggacatctccacagagatctaccaggccggctctaccccctgcaatggcgtggagggctttaactgttatttccctctgcagtcttacggcttccagccaacaaacggcgtgggctatcagccctacagagtggtggtgctgtcctttgagctgctgcacgcaccagcaacagtgtgcggcccaaagaagtctaccaatctggtgaagaacaagtgcgtgaacttcaacttcaacggactgaccggcacaggcgtgctgaccgagagcaataagaagttcctgccttttcagcagttcggcagggacatcgcagataccacagacgccgtgcgcgaccctcagaccctggagatcctggacatcacaccatgcagcttcggcggcgtgtccgtgatcacaccaggcaccaatacatccaaccaggtggccgtgctgtatcaggacgtgaattgtaccgaggtgcccgtggcaatccacgcagatcagctgacccctacatggcgggtgtactctaccggcagcaacgtgttccagacaagagccggatgcctgatcggagcagagcacgtgaacaatagctatgagtgcgacatccctatcggcgccggcatctgtgccagctaccagacccagacaaactccccatctggagcaggctccgtggccagccagtccatcatcgcctataccatgagcctgggcgccgagaacagcgtggcctactccaacaattctatcgccatccctaccaacttcacaatcagcgtgaccacagagatcctgccagtgtctatgaccaagacaagcgtggactgcacaatgtatatctgtggcgatagcaccgagtgctccaacctgctgctgcagtacggctccttttgtacccagctgaatagagccctgacaggcatcgccgtggagcaggataagaacacacaggaggtgttcgcccaggtgaagcagatctacaagaccccacccatcaaggactttggcggcttcaacttcagccagatcctgcctgatccaagcaagccctccaagaggtcttttatcgaggacctgctgttcaacaaggtgaccctggccgatgccggcttcatcaagcagtatggagattgcctgggagacatcgcagcccgcgacctgatctgtgcccagaagtttaatggcctgaccgtgctgcctccactgctgacagatgagatgatcgcccagtacacatctgccctgctggccggcaccatcacaagcggatggaccttcggcgcaggagccgccctgcagatcccttttgccatgcagatggcctataggttcaacggcatcggcgtgacccagaatgtgctgtacgagaaccagaagctgatcgccaatcagtttaacagcgccatcggcaagatccaggactctctgtcctctacagccagcgccctgggcaagctgcaggatgtggtgaatcagaacgcccaggccctgaataccctggtgaagcagctgagctccaacttcggcgccatctctagcgtgctgaatgacatcctgagccggctggacccccctgaggcagaggtgcagatcgacaggctgatcacaggccgcctgcagagcctgcagacctacgtgacacagcagctgatcagggcagcagagatcagagcctccgccaatctggccgccaccaagatgagcgagtgcgtgctgggacagtccaagagggtggacttttgtggcaagggctatcacctgatgtctttcccacagagcgcccctcacggcgtggtgtttctgcacgtgacctacgtgccagcccaggagaagaacttcaccacagcaccagccatctgccacgatggaaaggcacactttcctagggagggcgtgttcgtgtctaacggcacccactggtttgtgacacagcgcaatttctacgagccacagatcatcaccacagacaatacattcgtgagcggcaactgtgatgtggtgatcggcatcgtgaacaataccgtgtatgatccactgcagcccgagctggactcctttaaggaggagctggataagtacttcaagaatcacacctctcccgacgtggatctgggcgacatctccggcatcaatgcctctgtggtgaacatccagaaggagatcgaccggctgaacgaggtggccaagaatctgaacgagagcctgatcgatctgcaggagctgggcaagtatgagcagtacatcaagggctctggcagagagaacctgtatttccagggaggaggaggcagcggatacatccctgaggcaccaagggacggacaggcctacgtgcgcaaggatggcgagtgggtgctgctgtccacctttctgggccatcatcaccaccaccaccaccactga

SEQ ID NO: 1272 - DNA, 3846 bp, Artificial Sequence
  Description of Artificial Sequence: Synthetic polynucleotide
atgggcatcctgccaagcccaggaatgcccgccctgctgtctctggtgagcctgctgtccgtgctgctgatgggatgcgtggcagagacaggcacacagtgcgtgaacctgaccacaaggacccagctgccccctgcctataccaattctttcacacggggcgtgtactatcccgacaaggtgtttagaagcgatgtgctgcactccacacaggatctgtttctgcctttcttttctaacgtgacctggttccacgccatccacgtgtccggcaccaatggcacaaagcggttcgacaatcccgtgctgccttttaacgatggcgtgtacttcgccagcaccgagaagtccaacatcatcagaggctggatctttggcaccacactggactctaagacacagagcctgctgatcgtgaacaatgccaccaacgtggtgatcaaggtgtgcgagttccagttttgtgacaatccattcctgggcgtgtactatcacaagaacaataagtcctggatggagaaagagtttcgcgtgtattctagcgccaacaattgcacatttgagtacgtgagccagcccttcctgatggacctggggggcaagcagggcaatttcaagtggctgagggagttcgtgtttaagaatatcgatggctacttcaagatctacagcaagcacaccccaatcaacctggtgcgcgacctgccacagggattctccgccctggagccactgatggatctgcccatcggcatcaacatcacccggtttcagacactgctggccctgcacagatcctacctgacaccaggcgactcctctagcggatggaccgcaggagctgccgcctactatgtgggctatctgcagccccggaccttcctgctgaagtacaacgagaatggcaccatcacagacgcagtggattgcgccctggaccccctgtctgagacaaagtgtacactgaagagctttaccgtggagaagggcatctatcagacaagcaatttcagggtgcagcctaccgagtccatcgtgcgctttcccaatatcacaaacctgtgcccttttggcgaggtgttcaacgccaccagattcgccagcgtgtacgcctggaatcggaagagaatctccaactgcgtggccgactattctgtgctgtacaactccgcctctttcagcacctttaagtgctatggcgtgtctcccacaaagctgaatgatctgtgctttaccaacgtgtacgccgatagcttcgtgatcaggggagacgaagtgagacagatcgcaccaggacagacaggaaagatcgcagactacaattataagctgcctgacgatttcaccggctgcgtgatcgcctggaactccaacaatctggattctaaagtgggcggcaactacaattatctgtacaggctgtttcgcaagtccaatctgaagccattcgagcgggacatctccacagagatctaccaggccggctctaccccctgcaatggcgtggagggctttaactgttatttccctctgcagtcttacggcttccagccaacaaacggcgtgggctatcagccctacagagtggtggtgctgtcctttgagctgctgcacgcaccagcaacagtgtgcggcccaaagaagtctaccaatctggtgaagaacaagtgcgtgaacttcaacttcaacggactgaccggcacaggcgtgctgaccgagagcaataagaagttcctgccttttcagcagttcggcagggacatcgcagataacacagacgccgtgcgcgaccctcagaccctggagatcctggacatcacaccatgcagcttcggcggcgtgtccgtgatcacaccaggcaccaatacatccaaccaggtggccgtgctgtatcaggacgtgaattgtaccgaggtgcccaatgcaatccacgcagatcagctgacccctacatggcgggtgtactctaccggcagcaacgtgttccagacaagagccggatgcctgatcggagcagagcacgtgaacaatagctatgagtgcgacatccctatcggcgccggcatctgtgccagctaccagacccagacaaactccccatctggagcaggctccgtggccagccagtccatcatcgcctataccatgagcctgggcgccgagaacagcgtggcctactccaacaattctatcgccatccctaccaacttcacaatcagcgtgaccacagagatcctgccagtgtctatgaccaagacaagcgtggactgcacaatgtatatctgtggcgatagcaccgagtgctccaacctgctgctgcagtacggctccttttgtacccagctgaatagagccctgcaaggcatcgcccgagagcaggataagaacacacaggaggtgttcgcccaggtgaagcagatctacaagaccccacccatcaaggactttggcggcttcaacttcagccagatcctgcctgatccaagcaagccctccaagaggtcttttatcgaggacctgctgttcaacaaggtgaccctggccgatgccggcttcatcaagcagtatggagattgcctgggagacatcgcagcccgcgacctgatctgtgcccagaagtttaatggcctgaccgtgctgcctccactgctgacagatgagatgatcgcccagtacacatctgccctgctggccggcaccatcacaagcggatggaccttcggcgcaggagccgccctgcagatcccttttgccatgcagatggcctataggttcaacggcatcggcgtgacccagaatgtgctgtacgagaaccagaagctgatcgccaatcagtttaaccaagccatcggcaagatccaggactctctgtcctctacagccagcgccctgggcaagctgcaggatgtggtgaatcagaacgcccaggccctgaataccctggtgaagcagctgagctccaacttcggcgccatctctagcgtgctgaatgacatcctgagccggctggacccccctgaggcagaggtgcagatcgacaggctgatcacaggccgcctgcagagcctgcagacctacgtgacacagcagctgatcagggcagcagagatcagagcctccgccaatctggccgccaccaagatgagcgagtgcgtgctgggacagtccaagagggtggacttttgtggcaagggctatcacctgatgtctttcccacagagcgcccctcacggcgtggtgtttctgcacgtgacctacgtgccagcccaggagaagaacttcaccacagcaccagccatctgccacgatggaaaggcattttttcctagggagggcgtgttcgtgtctaacggcacccaatggtttgtgacacagcgcaatttctacgagccacagatcatcaccacagacaatacattcgtgagcggcaactgtgatgtggtgatcggcatcgtgaacaataccgtgtatgatccactgcagcccgagctggactcctttaaggaggagctggataagtacttcaagaatcacacctctcccgacgtggatctgggcgacatctccggcatcaatgcctctgtggtgaacatccagaaggagatcgaccggctgaacgaggtggccaagaatctgaacgagagcctgatcgatctgcaggagctgggcaagtatgagcagtacatcaagggctctggcagagagaacctgtatttccagggaggaggaggcagcggatacatccctgaggcaccaagggacggacaggcctacgtgcgcaaggatggcgagtgggtgctgctgtccacctttctgggccatcatcaccaccaccaccaccactga

SEQ ID NO: 1273 - DNA, 3846 bp, Artificial Sequence
  Description of Artificial Sequence: Synthetic polynucleotide
atgggcatcctgccaagcccaggaatgcccgccctgctgtctctggtgagcctgctgtccgtgctgctgatgggatgcgtggcagagacaggcacacagtgcgtgaacctgaccacaaggacccagctgccccctgcctataccaattctttcacacggggcgtgtactatcccgacaaggtgtttagaagctccgtgctgcactccacacaggatctgtttctgcctttcttttctaacgtgacctggttccacgccatccacgtgtccggcaccaatggcacaaagcggttcgacaatcccgtgctgccttttaacgatggcgtgtacttcgccagcaccgagaagtccaacatcatcagaggctggatctttggcaccacactggactctaagacacagagcctgctgatcgtgaacaatgccaccaacgtggtgatcaaggtgtgcgagttccagttttgtaatgatccattcctgggcgtgtactatcacaagaacaataagtcctggatggagtctgagtttcgcgtgtattctagcgccaacaattgcacatttgagtacgtgagccagcccttcctgatggacctggagggcaagcagggcaatttcaagaacctgagggagttcgtgtttaagaatatcgatggctacttcaagatctacagcaagcacaccccaatcaacctggtgcgcgacctgccacagggattctccgccctggagccactggtggatctgcccatcggcatcaacatcacccggtttcagacactgctggccctgcacagatcctacctgacaccaggcgactcctctagcggatggaccgcaggagctgccgcctactatgtgggctatctgcagccccggaccttcctgctgaagtacaacgagaatggcaccatcacagacgcagtggattgcgccctggaccccctgtctgagacaaagtgtacactgaagagctttaccgtggagaagggcatctatcagacaagcaatttcagggtgcagcctaccgagtccatcgtgcgctttcccaatatcacaaacctgtgcccttttggcgaggtgttcaacgccaccagattcgccagcgtgtacgcctggaatcggaagagaatctccaactgcgtggccgactattctgtgctgtacaactccgcctctttcagcacctttaagtgctatggcgtgtctcccacaaagctgaatgatctgtgctttaccaacgtgtacgccgatagcttcgtgatcaggggagacgaagtgagacagatcgcaccaggacagacaggaaagatcgcagactacaattataagctgcctgacgatttcaccggctgcgtgatcgcctggaactccaacaatctggattctaaagtgggcggcaactacaattatctgtacaggctgtttcgcaagtccaatctgaagccattcgagcgggacatctccacagagatctaccaggccggctctaccccctgcaatggcgtggagggctttaactgttatttccctctgcagtcttacggcttccagccaacaaacggcgtgggctatcagccctacagagtggtggtgctgtcctttgagctgctgcacgcaccagcaacagtgtgcggcccaaagaagtctaccaatctggtgaagaacaagtgcgtgaacttcaacttcaacggactgaccggcacaggcgtgctgaccgagagcaataagaagttcctgccttttcagcagttcggcagggacatcgcagataccacagacgccgtgcgcgaccctcagaccctggagatcctggacatcacaccatgcagcttcggcggcgtgtccgtgatcacaccaggcaccaatacatccaaccaggtggccgtgctgtatcaggacgtgaattgtaccgaggtgcccgtggcaatccacgcagatcagctgacccctacatggcgggtgtactctaccggcagcaacgtgttccagacaagagccggatgcctgatcggagcagagcacgtgaacaatagctatgagtgcgacatccctatcggcgccggcatctgtgccagctaccagacccagacaaactccccatctggagcaggctccgtggccagccagtccatcatcgcctataccatgagcctgggcgccgagaacagcgtggcctactccaacaattctatcgccatccctaccaacttcacaatcagcgtgaccacagagatcctgccagtgtctatgaccaagacaagcgtggactgcacaatgtatatctgtggcgatagcaccgagtgctccaacctgctgctgcagtacggctccttttgtacccagctgaatagagccctgacaggcatcgccgtggagcaggataagaacacacaggaggtgttcgcccaggtgaagcagatctacaagaccccacccatcaaggactttggcggcttcaacttcagccagatcctgcctgatccaagcaagccctccaagaggtcttttatcgaggacctgctgttcaacaaggataccctggccgatgccggcttcatcaagcagtatggagattgcctgggagacatcgcagcccgcgacctgatctgtgcccagaagtttaatggcctgaccgtgctgcctccactgctgacagatgagatgatcgcccagtacacatctgccctgctggccggcaccatcacaagcggatggaccttcggcgcaggagccgccctgcagatcccttttgccatgcagatggcctataggttcaacggcatcggcgtgacccagaatgtgctgtacgagaaccagaagctgatcgccaatcagtttaacagcgccatcggcaagatccaggactctctgtcctctacagccagcgccctgggcaagctgcaggatgtggtgaatcagaacgcccaggccctgaataccctggtgaagcagctgagctccaacttcggcgccatctctagcgtgctgaatgacatcctgagccggctggacccccctgaggcagaggtgcagatcgacaggctgatcacaggccgcctgcagagcctgcagacctacgtgacacagcagctgatcagggcagcagagatcagagcctccgccaatctggccgccaccaagatgagcgagtgcgtgctgggacagtccaagagggtggacttttgtggcaagggctatcacctgatgtctttcccacagagcgcccctcacggcgtggtgtttctgcacgtgacctacgtgccagcccaggagaagaacttcaccacagcaccagccatctgccacgatggaaaggcacactttcctagggagggcgtgttcgtgtctaacggcacccactggtttgtgacacagcgcaatttctacgagccacagatcatcaccacagacaatacattcgtgagcggcaactgtgatgtggtgatcggcatcgtgaacaataccgtgtatgatccactgcagcccgagctggactcctttaaggaggagctggataagtacttcaagaatcacacctctcccgacgtggatctgggcgacatctccggcatcaatgcctctgtggtgaacatccagaaggagatcgaccggctgaacgaggtggccaagaatctgaacgagagcctgatcgatctgcaggagctgggcaagtatgagcagtacatcaagggctctggcagagagaacctgtatttccagggaggaggaggcagcggatacatccctgaggcaccaagggacggacaggcctacgtgcgcaaggatggcgagtgggtgctgctgtccacctttctgggccatcatcaccaccaccaccaccactga

SEQ ID NO: 1274 - DNA, 3846 bp, Artificial Sequence
  Description of Artificial Sequence: Synthetic polynucleotide
atgggcatcctgccaagcccaggaatgcccgccctgctgtctctggtgagcctgctgtccgtgctgctgatgggatgcgtggcagagacaggcacacagtgcgtgaacctgaccacaaggacccagctgccccctgcctataccaattctttcacacggggcgtgtactatcccgacaaggtgtttagaagctccgtgctgcactccacacaggatctgtttctgcctttcttttctaacgtgacctggttccacgccatccacgtgtccggcaccaatggcacaaagcggttcgacaatcccgtgctgccttttaacgatggcgtgtacttcgccagcaccgagaagtccaacatcatcagaggctggatctttggcaccacactggactctaagacacagagcctgctgatcgtgaacaatgccaccaacgtggtgatcaaggtgtgcgagttccagttttgtaatgatccattcctgggcgtgtactatcacaagaacaataagtcctggatggagtctgagtttcgcgtgtattctagcgccaacaattgcacatttgagtacgtgagccagcccttcctgatggacctggagggcaagcagggcaatttcaagaacctgagggagttcgtgtttaagaatatcgatggctacttcaagatctacagcaagcacaccccaatcaacctggtgcgcgacctgccacagggattctccgccctggagccactggtggatctgcccatcggcatcaacatcacccggtttcagacactgctggccctgcacagatcctacctgacaccaggcgactcctctagcggatggaccgcaggagctgccgcctactatgtgggctatctgcagccccggaccttcctgctgaagtacaacgagaatggcaccatcacagacgcagtggattgcgccctggaccccctgtctgagacaaagtgtacactgaagagctttaccgtggagaagggcatctatcagacaagcaatttcagggtgcagcctaccgagtccatcgtgcgctttcccaatatcacaaacctgtgcccttttggcgaggtgttcaacgccaccagattcgccagcgtgtacgcctggaatcggaagagaatctccaactgcgtggccgactattctgtgctgtacaactccgcctctttcagcacctttaagtgctatggcgtgtctcccacaaagctgaatgatctgtgctttaccaacgtgtacgccgatagcttcgtgatcaggggagacgaagtgagacagatcgcaccaggacagacaggaaagatcgcagactacaattataagctgcctgacgatttcaccggctgcgtgatcgcctggaactccaacaatctggattctaaagtgggcggcaactacaattatctgtacaggctgtttcgcaagtccaatctgaagccattcgagcgggacatctccacagagatctaccaggccggctctaccccctgcaatggcgtggagggctttaactgttatttccctctgcagtcttacggcttccagccaacaaacggcgtgggctatcagccctacagagtggtggtgctgtcctttgagctgctgcacgcaccagcaacagtgtgcggcccaaagaagtctaccaatctggtgaagaacaagtgcgtgaacttcaacttcaacggactgaccggcacaggcgtgctgaccgagagcaataagaagttcctgccttttcagcagttcggcagggacatcgcagataccacagacgccgtgcgcgaccctcagaccctggagatcctggacatcacaccatgcagcttcggcggcgtgtccgtgatcacaccaggcaccaatacatccaaccaggtggccgtgctgtatcaggacgtgaattgtaccgaggtgcccgtggcaatccacgcagatcagctgacccctacatggcgggtgtactctaccggcagcaacgtgttccagacaagagccggatgcctgatcggagcagagcacgtgaacaatagctatgagtgcgacatccctatcggcgccggcatctgtgccagctaccagacccagacaaactccccatctggagcaggctccgtggccagccagtccatcatcgcctataccatgagcctgggcgccgagaacagcgtggcctactccaacaattctatcgccatccctaccaacttcacaatcagcgtgaccacagagatcctgccagtgtctatgaccaagacaagcgtggactgcacaatgtatatctgtggcgatagcaccgagtgctccaacctgctgctgcagtacggctccttttgtacccagctgaatagagccctgacaggcatcgccaacgagcaggataagaacacacaggaggtgttcgcccaggtgaagcagatctacaagaccccacccatcaaggactttggcggcttcaacttcagccagatcctgcctgatccaagcaagccctccaagaggtcttttatcgaggacctgctgttcaacaaggtgaccctggccgatgccggcttcatcaagcagtatggagattgcctgggagacatcgcagcccgcgacctgatctgtgcccagaagtttaatggcctgaccgtgctgcctccactgctgacagatgagatgatcgcccagtacacatctgccctgctggccggcaccatcacaagcggatggaccttcggcgcaggagccgccctgcagatcccttttgccatgcagatggcctataggttcaacggcatcggcgtgacccagaatgtgctgtacgagaaccagaagctgatcgccaatcagtttaacagcgccatcggcaagatccaggactctctgtcctctacagccagcgccctgggcaagctgcaggatgtggtgaatcagaacgcccaggccctgaataccctggtgaagcagctgagctccaacttcggcgccatctctagcgtgctgaatgacatcctgagccggctggacccccctgaggcagaggtgcagatcgacaggctgatcacaggccgcctgcagagcctgcagacctacgtgacacagcagctgatcagggcagcagagatcagagcctccgccaatctggccgccaccaagatgagcgagtgcgtgctgggacagtccaagagggtggacttttgtggcaagggctatcacctgatgtctttcccacagagcgcccctcacggcgtggtgtttctgcacgtgacctacgtgccagcccaggagaagaacttcaccacagcaccagccatctgccacgatggaaaggcacactttcctagggagggcgtgttcgtgtctaacggcacccactggtttgtgacacagcgcaatttctacgagccacagatcatcaccacagacaatacattcgtgagcggcaactgtgatgtggtgatcggcatcgtgaacaataccgtgtatgatccactgcagcccgagctggactcctttaaggaggagctggataagtacttcaagaatcacacctctcccgacgtggatctgggcgacatctccggcatcaatgcctctgtggtgaacatccagaaggagatcgaccggctgaacgaggtggccaagaatctgaacgagagcctgatcgatctgcaggagctgggcaagtatgagcagtacatcaagggctctggcagagagaacctgtatttccagggaggaggaggcagcggatacatccctgaggcaccaagggacggacaggcctacgtgcgcaaggatggcgagtgggtgctgctgtccacctttctgggccatcatcaccaccaccaccaccactga

SEQ ID NO: 1275 - DNA, 3846 bp, Artificial Sequence
  Description of Artificial Sequence: Synthetic polynucleotide
atgggcatcctgccaagcccaggaatgcccgccctgctgtctctggtgagcctgctgtccgtgctgctgatgggatgcgtggcagagacaggcacacagtgcgtgaacctgaccacaaggacccagctgccccctgcctataccaattctttcacacggggcgtgtactatcccgacaaggtgtttagaagctccgtgctgcactccacacaggatctgtttctgcctttcttttctaacgtgacctggttccacgccatccacgtgtccggcaccaatggcacaaagcggttcgacaatcccgtgctgccttttaacgatggcgtgtacttcgccagcaccgagaagtccaacatcatcagaggctggatctttggcaccacactggactctaagacacagagcctgctgatcgtgaacaatgccaccaacgtggtgatcaaggtgtgcgagttccagttttgtaatgatccattcctgggcgtgtactatcacaagaacaataagtcctggatggagtctgagtttcgcgtgtattctagcgccaacaattgcacatttgagtacgtgagccagcccttcctgatagacctggagggcaagcagggcaatttcaagaacctgagggagttcgtgtttaagaatatcgatggctacttcaagatctacagcaagcacaccccaatcaacctggtgcgcgacctgccacagggattctccgccctggagccactggtggatctgcccatcggcatcaacatcacccggtttcagacactgctggccctgcacagatcctacctgacaccaggcgactcctctagcggatggaccgcaggagctgccgcctactatgtgggctatctgcagccccggaccttcctgctgaagtacaacgagaatggcaccatcacagacgcagtggattgcgccctggaccccctgtctgagacaaagtgtacactgaagagctttaccgtggagaagggcatctatcagacaagcaatttcagggtgcagcctaccgagtccatcgtgcgctttcccaatatcacaaacctgtgcccttttggcgaggtgttcaacgccaccagattcgccagcgtgtacgcctggaatcggaagagaatctccaactgcgtggccgactattctgtgctgtacaactccgcctctttcagcacctttaagtgctatggcgtgtctcccacaaagctgaatgatctgtgctttaccaacgtgtacgccgatagcttcgtgatcaggggagacgaagtgagacagatcgcaccaggacagacaggaaagatcgcagactacaattataagctgcctgacgatttcaccggctgcgtgatcgcctggaactccaacaatctggattctaaagtgggcggcaactacaattatctgtacaggctgtttcgcaagtccaatctgaagccattcgagcgggacatctccacagagatctaccaggccggctctaccccctgcaatggcgtggagggctttaactgttatttccctctgcagtcttacggcttccagccaacaaacggcgtgggctatcagccctacagagtggtggtgctgtcctttgagctgctgcacgcaccagcaacagtgtgcggcccaaagaagtctaccaatctggtgaagaacaagtgcgtgaacttcaacttcaacggactgaccggcacaggcgtgctgaccgagagcaataagaagttcctgccttttcagcagttcggcagggacatcgcagataccacagacgccgtgcgcgaccctcagaccctggagatcctggacatcacaccatgcagcttcggcggcgtgtccgtgatcacaccaggcaccaatacatccaaccaggtggccgtgctgtatcaggacgtgaattgtaccgaggtgcccgtggcaatccacgcagatcagctgacccctacatggcgggtgtactctaccggcagcaacgtgttccagacaagagccggatgcctgatcggagcagagcacgtgaacaatagctatgagtgcgacatccctatcggcgccggcatctgtgccagctaccagacccagacaaactccccatctggagcaggctccgtggccagccagtccatcatcgcctataccatgagcctgggcgccgagaacagcgtggcctactccaacaattctatcgccatccctaccaacttcacaatcagcgtgaccacagagatcctgccagtgtctatgaccaagacaagcgtggactgcacaatgtatatctgtggcgatagcaccgagtgctccaacctgctgctgcagtacggctccttttgtacccagctgaatagagccctgacaggcatcgccgtggagcaggataagaacacacaggaggtgttcgcccaggtgaagcagatctacaagaccccacccatcaaggactttggcggcttcaacttcagccagatcctgcctgatccaagcaagccctccaagaggtcttttatcgaggacctgctgttcaacaaggtgaccctggccgatgccggcttcatcaagcagtatggagattgcctgggagacatcgcagcccgcgacctgatctgtgcccagaagtttaatggcctgaccgtgctgcctccactgctgacagatgagatgatcgcccagtacacatctgccctgctggccggcaccatcacaagcggatggaccttcggcgcaggagccgccctgcagatcccttttgccatgcagatggcctataggttcaacggcatcggcgtgacccagaatgtgctgtacgagaaccagaagctgatcgccaatcagtttaacagcgccatcggcaagatccaggactctctgtcctctacagccagcgccctgggcaagctgcaggatgtggtgaatcagaacgcccaggccctgaataccctggtgaagcagctgagctccaacttcggcgccatctctagcgtgctgaatgacatcctgagccggctggacccccctgaggcagaggtgcagatcgacaggctgatcacaggccgcctgcagagcctgcagacctacgtgacacagcagctgatcagggcagcagagatcagagcctccgccaatctggccgccaccaagatgagcgagtgcgtgctgggacagtccaagagggtggacttttgtggcaagggctatcacctgatgtctttcccacagagcgcccctcacggcgtggtgtttctgcacgtgacctacgtgccagcccaggagaagaacttcaccacagcaccagccatctgccacgatggaaaggcacactttcctagggagggcgtgttcgtgtctaacggcacccactggtttgtgacacagcgcaatttctacgagccacagatcatcaccacagacaatacattcgtgagcggcaactgtgatgtggtgatcggcatcgtgaacaataccgtgtatgatccactgcagcccgagctggactcctttaaggaggagctggataagtacttcaagaatcacacctctcccgacgtggatctgggcgacatctccggcatcaatgcctctgtggtgaacatccagaaggagatcgaccggctgaacgaggtggccaagaatctgaacgagagcctgatcgatctgcaggagctgggcaagtatgagcagtacatcaagggctctggcagagagaacctgtatttccagggaggaggaggcagcggatacatccctgaggcaccaagggacggacaggcctacgtgcgcaaggatggcgagtgggtgctgctgtccacctttctgggccatcatcaccaccaccaccaccactga

SEQ ID NO: 1276 - DNA, 3846 bp, Artificial Sequence
  Description of Artificial Sequence: Synthetic polynucleotide
atgggcatcctgccaagcccaggaatgcccgccctgctgtctctggtgagcctgctgtccgtgctgctgatgggatgcgtggcagagacaggcacacagtgcgtgaacctgaccacaaggacccagctgccccctgcctataccaattctttcacacggggcgtgtactatcccgacaaggtgtttagaagcgatgtgctgcactccacacaggatctgtttctgcctttcttttctaacgtgacctggttccacgccatccacgtgtccggcaccaatggcacaaaggacttcgacaatcccgtgctgccttttaacgatggcgtgtacttcgccagcaccgagaagtccaacatcatcagaggctggatctttggcaccacactggactctaagacacagagcctgctgatcgtgaacaatgccaccaacgtggtgatcaaggtgtgcgagttccagttttgtgatgatccattcctgggcgtgtactatcacaagaacaataagtcctggatggagaaagagtttcgcgtgtattctagcgccaacaattgcacatttgagtacgtgagccagcccttcctgatggacctgggtggcaagcagggcaatttcaagtggctgagggagttcgtgtttaagaatatcgatggctacttcaagatctacagcaagcacaccccaatcaacctggtgcgcgacctgccacagggattctccgccctggagccactgatggatctgcccatcggcatcaacatcacccggtttcagacactgctggccctgcacagatcctacctgacaccaggcgactcctctagcggatggaccgcaggagctgccgcctactatgtgggctatctgcagccccggaccttcctgctgaagtacaacgagaatggcaccatcacagacgcagtggattgcgccctggaccccctgtctgagacaaagtgtacactgaagagctttaccgtggagaagggcatctatcagacaagcaatttcagggtgcagcctaccgagtccatcgtgcgctttcccaatatcacaaacctgtgcccttttggcgaggtgttcaacgccaccagattcgccagcgtgtacgcctggaatcggaagagaatctccaactgcgtggccgactattctgtgctgtacaactccgcctctttcagcacctttaagtgctatggcgtgtctcccacaaagctgaatgatctgtgctttaccaacgtgtacgccgatagcttcgtgatcaggggagacgaagtgagacagatcgcaccaggacagacaggaaagatcgcagactacaattataagctgcctgacgatttcaccggctgcgtgatcgcctggaactccaacaatctggattctaaagtgggcggcaactacaattatctgtacaggctgtttcgcaagtccaatctgaagccattcgagcgggacatctccacagagatctaccaggccggctctaccccctgcaatggcgtggagggctttaactgttatttccctctgcagtcttacggcttccagccaacaaacggcgtgggctatcagccctacagagtggtggtgctgtcctttgagctgctgcacgcaccagcaacagtgtgcggcccaaagaagtctaccaatctggtgaagaacaagtgcgtgaacttcaacttcaacggactgaccggcacaggcgtgctgaccgagagcaataagaagttcctgccttttcagcagttcggcagggacatcgcagataatacagacgccgtgcgcgaccctcagaccctggagatcctggacatcacaccatgcagcttcggcggcgtgtccgtgatcacaccaggcaccaatacatccaaccaggtggccgtgctgtatcaggacgtgaattgtaccgaggtgcccaatgcaatccacgcagatcagctgacccctacatggcgggtgtactctaccggcagcaacgtgttccagacaagagccggatgcctgatcggagcagagcacgtgaacaatagctatgagtgcgacatccctatcggcgccggcatctgtgccagctaccagacccagacaaactccccatctggagcaggctccgtggccagccagtccatcatcgcctataccatgagcctgggcgccgagaacagcgtggcctactccaacaattctatcgccatccctaccaacttcacaatcagcgtgaccacagagatcctgccagtgtctatgaccaagacaagcgtggactgcacaatgtatatctgtggcgatagcaccgagtgctccaacctgctgctgcagtacggctccttttgtacccagctgaatagagccctgcaaggcatcgcccaagagcaggataagaacacacaggaggtgttcgcccaggtgaagcagatctacaagaccccacccatcaaggactttggcggcttcaacttcagccagatcctgcctgatccaagcaagccctccaagaggtcttttatcgaggacctgctgttcaacaaggtgaccctggccgatgccggcttcatcaagcagtatggagattgcctgggagacatcgcagcccgcgacctgatctgtgcccagaagtttaatggcctgaccgtgctgcctccactgctgacagatgagatgatcgcccagtacacatctgccctgctggccggcaccatcacaagcggatggaccttcggcgcaggagccgccctgcagatcccttttgccatgcagatggcctataggttcaacggcatcggcgtgacccagaatgtgctgtacgagaaccagaagctgatcgccaatcagtttaacaaagccatcggcaagatccaggactctctgtcctctacagccagcgccctgggcaagctgcaggatgtggtgaatcagaacgcccaggccctgaataccctggtgaagcagctgagctccaacttcggcgccatctctagcgtgctgaatgacatcctgagccggctggacccccctgaggcagaggtgcagatcgacaggctgatcacaggccgcctgcagagcctgcagacctacgtgacacagcagctgatcagggcagcagagatcagagcctccgccaatctggccgccaccaagatgagcgagtgcgtgctgggacagtccaagagggtggacttttgtggcaagggctatcacctgatgtctttcccacagagcgcccctcacggcgtggtgtttctgcacgtgacctacgtgccagcccaggagaagaacttcaccacagcaccagccatctgccacgatggaaaggcattttttcctagggagggcgtgttcgtgtctaacggcacccaatggtttgtgacacagcgcaatttctacgagccacagatcatcaccacagacaatacattcgtgagcggcaactgtgatgtggtgatcggcatcgtgaacaataccgtgtatgatccactgcagcccgagctggactcctttaaggaggagctggataagtacttcaagaatcacacctctcccgacgtggatctgggcgacatctccggcatcaatgcctctgtggtgaacatccagaaggagatcgaccggctgaacgaggtggccaagaatctgaacgagagcctgatcgatctgcaggagctgggcaagtatgagcagtacatcaagggctctggcagagagaacctgtatttccagggaggaggaggcagcggatacatccctgaggcaccaagggacggacaggcctacgtgcgcaaggatggcgagtgggtgctgctgtccacctttctgggccatcatcaccaccaccaccaccactga

SEQ ID NO: 1277 - DNA, 3846 bp, Artificial Sequence
  Description of Artificial Sequence: Synthetic polynucleotide
atgggcatcctgccaagcccaggaatgcccgccctgctgtctctggtgagcctgctgtccgtgctgctgatgggatgcgtggcagagacaggcacacagtgcgtgaacctgaccacaaggacccagctgccccctgcctataccaattctttcacacggggcgtgtactatcccgacaaggtgtttagaagctccgtgctgcactccacacaggatctgtttctgcctttcttttctaacgtgacctggttccacgccatccacgtgtccggcaccaatggcacaaagcggttcgacaatcccgtgctgccttttaacgatggcgtgtacttcgccagcaccgagaagtccaacatcatcagaggctggatctttggcaccacactggactctaagacacagagcctgctgatcgtgaacaatgccaccaacgtggtgatcaaggtgtgcgagttccagttttgtaatgatccattcctgggcgtgtactatcacaagaacaataagtcctggatggagtctgagtttcgcgtgtattctagcgccaacaattgcacatttgagtacgtgagccagcccttcctgatggacctggagggcaagcagggcaatttcaagaacctgagggagttcgtgtttaagaatatcgatggctacttcaagatctacagcaagcacaccccaatcaacctggtgcgcgacctgccacagggattctccgccctggagccactggtggatctgcccatcggcatcaacatcacccggtttcagacactgctggccctgcacagatcctacctgacaccaggcgactcctctagcggatggaccgcaggagctgccgcctactatgtgggctatctgcagccccggaccttcctgctgaagtacaacgagaatggcaccatcacagacgcagtggattgcagtctggaccccctgtctgagacaaagtgtacactgaagagctttaccgtggagaagggcatctatcagacaagcaatttcagggtgcagcctaccgagtccatcgtgcgctttcccaatatcacaaacctgtgcccttttggcgaggtgttcaacgccaccagattcgccagcgtgtacgcctggaatcggaagagaatctccaactgcgtggccgactattctgtgctgtacaactccgcctctttcagcacctttaagtgctatggcgtgtctcccacaaagctgaatgatctgtgctttaccaacgtgtacgccgatagcttcgtgatcaggggagacgaagtgagacagatcgcaccaggacagacaggaaagatcgcagactacaattataagctgcctgacgatttcaccggctgcgtgatcgcctggaactccaacaatctggattctaaagtgggcggcaactacaattatctgtacaggctgtttcgcaagtccaatctgaagccattcgagcgggacatctccacagagatctaccaggccggctctaccccctgcaatggcgtggagggctttaactgttatttccctctgcagtcttacggcttccagccaacaaacggcgtgggctatcagccctacagagtggtggtgctgtcctttgagctgctgcacgcaccagcaacagtgtgcggcccaaagaagtctaccaatctggtgaagaacaagtgcgtgaacttcaacttcaacggactgaccggcacaggcgtgctgaccgagagcaataagaagttcctgccttttcagcagttcggcagggacatcgcagataccacagacgccgtgcgcgaccctcagaccctggagatcctggacatcacaccatgcagcttcggcggcgtgtccgtgatcacaccaggcaccaatacatccaaccaggtggccgtgctgtatcaggacgtgaattgtaccgaggtgcccgtggcaatccacgcagatcagctgacccctacatggcgggtgtactctaccggcagcaacgtgttccagacaagagccggatgcctgatcggagcagagcacgtgaacaatagctatgagtgcgacatccctatcggcgccggcatctgtgccagctaccagacccagacaaactccccatctggagcaggctccgtggccagccagtccatcatcgcctataccatgagcctgggcgccgagaacagcgtggcctactccaacaattctatcgccatccctaccaacttcacaatcagcgtgaccacagagatcctgccagtgtctatgaccaagacaagcgtggactgcacaatgtatatctgtggcgatagcaccgagtgctccaacctgctgctgcagtacggctccttttgtacccagctgaatagagccctgacaggcatcgccgtggagcaggataagaacacacaggaggtgttcgcccaggtgaagcagatctacaagaccccacccatcaaggactttggcggcttcaacttcagccagatcctgcctgatccaagcaagccctccaagaggtcttttatcgaggacctgctgttcaacaaggtgaccctggccgatgccggcttcatcaagcagtatggagattgcctgggagacatcgcagcccgcgacctgatctgtgcccagaagtttaatggcctgaccgtgctgcctccactgctgacagatgagatgatcgcccagtacacatctgccctgctggccggcaccatcacaagcggatggaccttcggcgcaggagccgccctgcagatcccttttgccatgcagatggcctataggttcaacggcatcggcgtgacccagaatgtgctgtacgagaaccagaagctgatcgccaatcagtttaacagcgccatcggcaagatccaggactctctgtcctctacagccagcgccctgggcaagctgcaggatgtggtgaatcagaacgcccaggccctgaataccctggtgaagcagctgagctccaacttcggcgccatctctagcgtgctgaatgacatcctgagccggctggacccccctgaggcagaggtgcagatcgacaggctgatcacaggccgcctgcagagcctgcagacctacgtgacacagcagctgatcagggcagcagagatcagagcctccgccaatctggccgccaccaagatgagcgagtgcgtgctgggacagtccaagagggtggacttttgtggcaagggctatcacctgatgtctttcccacagagcgcccctcacggcgtggtgtttctgcacgtgacctacgtgccagcccaggagaagaacttcaccacagcaccagccatctgccacgatggaaaggcacactttcctagggagggcgtgttcgtgtctaacggcacccactggtttgtgacacagcgcaatttctacgagccacagatcatcaccacagacaatacattcgtgagcggcaactgtgatgtggtgatcggcatcgtgaacaataccgtgtatgatccactgcagcccgagctggactcctttaaggaggagctggataagtacttcaagaatcacacctctcccgacgtggatctgggcgacatctccggcatcaatgcctctgtggtgaacatccagaaggagatcgaccggctgaacgaggtggccaagaatctgaacgagagcctgatcgatctgcaggagctgggcaagtatgagcagtacatcaagggctctggcagagagaacctgtatttccagggaggaggaggcagcggatacatccctgaggcaccaagggacggacaggcctacgtgcgcaaggatggcgagtgggtgctgctgtccacctttctgggccatcatcaccaccaccaccaccactga

SEQ ID NO: 1278 - DNA, 3846 bp, Artificial Sequence
  Description of Artificial Sequence: Synthetic polynucleotide
atgggcatcctgccaagcccaggaatgcccgccctgctgtctctggtgagcctgctgtccgtgctgctgatgggatgcgtggcagagacaggcacacagtgcgtgaacctgaccacaaggacccagctgccccctgcctataccaattctttcacacggggcgtgtactatcccgacaaggtgtttagaagctccgtgctgcactccacacaggatctgtttctgcctttcttttctaacgtgacctggttccacgccatccacgtgtccggcaccaatggcacaaagcggttcgacaatcccgtgctgccttttaacgatggcgtgtacttcgccagcaccgagaagtccaacatcatcagaggctggatctttggcaccacactggactctaagacacagagcctgctgatcgtgaacaatgccaccaacgtggtgatcaaggtgtgcgagttccagttttgtaatgatccattcctgggcgtgtactatcacaagaacaataagtcctggatggagtctgagtttcgcgtgtattctagcgccaacaattgcacatttgagtacgtgagccagcccttcctgatggacctggagggcaagcagggcaatttcaagaacctgagggagttcgtgtttaagaatatcgatggctacttcaagatctacagcaagcacaccccaatcaacctggtgcgcgacctgccacagggattctccgccctggagccactggtggatctgcccatcggcatcaacatcacccggtttcagacactgctggccctgcacagatcctacctgacaccaggcgactcctctagcggatggaccgcaggagctgccgcctactatgtgggctatctgcagccccggaccttcctgctgaagtacaacgagaatggcaccatcacagacgcagtggattgcgccctggaccccctgtctgagacaaagtgtacactgaagagctttaccgtggagaagggcatctatcagacaagcaatttcagggtgcagcctaccgagtccatcgtgcgctttcccaatatcacaaacctgtgcccttttggcgaggtgttcaacgccaccagattcgccagcgtgtacgcctggaatcggaagagaatctccaactgcgtggccgactattctgtgctgtacaactccgcctctttcagcacctttaagtgctatggcgtgtctcccacaaagctgaatgatctgtgctttaccaacgtgtacgccgatagcttcgtgatcaggggagacgaagtgagacagatcgcaccaggacagacaggaaagatcgcagactacaattataagctgcctgacgatttcaccggctgcgtgatcgcctggaactccaacaatctggattctaaagtgggcggcaactacaattatctgtacaggctgtttcgcaagtccaatctgaagccattcgagcgggacatctccacagagatctaccaggccggctctaccccctgcaatggcgtggagggctttaactgttatttccctctgcagtcttacggcttccagccaacaaacggcgtgggctatcagccctacagagtggtggtgctgtcctttgagctgctgcacgcaccagcaacagtgtgcggcccaaagaagtctaccaatctggtgaagaacaagtgcgtgaacttcaacttcaacggactgaccggcacaggcgtgctgaccgagagcaataagaagttcctgccttttcagcagttcggcagggacatcgcagataccacagacgccgtgcgcgaccctcagaccctggagatcctggacatcacaccatgcagcttcggcggcgtgtccgtgatcacaccaggcaccaatacatccaaccaggtggccgtgctgtatcaggacgtgaattgtaccgaggtgcccgtggcaatccacgcagatcagctgacccctacatggcgggtgtactctaccggcagcaacgtgttccagacaagagccggatgcctgatcggagcagagcacgtgaacaatagctatgagtgcgacatccctatcggcgccggcatctgtgccagctaccagacccagacaaactccccatctggagcaggctccgtggccagccagtccatcatcgcctataccatgagcctgggcgccgagaacagcgtggcctactccaacaattctatcgccatccctaccaacttcacaatcagcgtgaccacagagatcctgccagtgtctatgaccaagacaagcgtggactgcacaatgtatatctgtggcgatagcaccgagtgctccaacctgctgctgcagtacggctccttttgtacccagctgaatagagccctgacaggcatcgccgtggagcaggataagaacacacaggaggtgttcgcccaggtgaagcagatctacaagaccccacccatcaaggactttggcggcttcaacttcagccagatcctgcctgatccaagcaagccctccaagaggtcttttatcgaggacctgctgttcaacaaggtgaccctggccgatttaggcttcgttaagcagtataaagattgcctgggagacatcgcagcccgcgacctgatctgtgcccagaagtttaatggcctgaccgtgctgcctccactgctgacagatgagatgatcgcccagtacacatctgccctgctggccggcaccatcacaagcggatggaccttcggcgcaggagccgccctgcagatcccttttgccatgcagatggcctataggttcaacggcatcggcgtgacccagaatgtgctgtacgagaaccagaagctgatcgccaatcagtttaacagcgccatcggcaagatccaggacgggctgtccacgacagccagcgccctgtcgaagctgcaggatgtggtgaatcagaacgcccaggccctgaataccctggtgaagcagctgagctccaacttcggcgccatctctagcgtgctgaatgacatcctgagccggctggacccccctgaggcagaggtgcagatcgacaggctgatcacaggccgcctgcagagcctgcagacctacgtgacacagcagctgatcagggcagcagagatcagagcctccgccaatctggccgccaccaagatgagcgagtgcgtgctgggacagtccaagagggtggacttttgtggcaagggctatcacctgatgtctttcccacagagcgcccctcacggcgtggtgtttctgcacgtgacctacgtgccagcccaggagaagaacttcaccacagcaccagccatctgccacgatggaaaggcacactttcctagggagggcgtgttcgtgtctaacggcacccactggtttgtgacacagcgcaatttctacgagccacagatcatcaccacagacaatacattcgtgagcggcaactgtgatgtggtgatcggcatcgtgaacaataccgtgtatgatccactgcagcccgagctggactcctttaaggaggagctggataagtacttcaagaatcacacctctcccgacgtggatctgggcgacatctccggcatcaatgcctctgtggtgaacatccagaaggagatcgaccggctgaacgaggtggccaagaatctgaacgagagcctgatcgatctgcaggagctgggcaagtatgagcagtacatcaagggctctggcagagagaacctgtatttccagggaggaggaggcagcggatacatccctgaggcaccaagggacggacaggcctacgtgcgcaaggatggcgagtgggtgctgctgtccacctttctgggccatcatcaccaccaccaccaccactga

SEQ ID NO: 1279 - DNA, 3846 bp, Artificial Sequence
  Description of Artificial Sequence: Synthetic polynucleotide
atgggcatcctgccaagcccaggaatgcccgccctgctgtctctggtgagcctgctgtccgtgctgctgatgggatgcgtggcagagacaggcacacagtgcgtgaacctgaccacaaggacccagctgccccctgcctataccaattctttcacacggggcgtgtactatcccgacaaggtgtttagaagcgatgtgctgcactccacacaggatctgtttctgcctttcttttctaacgtgacctggttccacgccatccacgtgtccggcaccaatggcacaaagcggttcgacaatcccgtgctgccttttaacgatggcgtgtacttcgccagcaccgagaagtccaacatcatcagaggctggatctttggcaccacactggactctaagacacagagcctgctgatcgtgaacaatgccaccaacgtggtgatcaaggtgtgcgagttccagttttgtgacgatccattcctgggcgtgtactatcacaagaacaataagtcctggatggagaaagagtttcgcgtgtattctagcgccaacaattgcacatttgagtacgtgagccagcccttcctgatggacctgggaggcaagcagggcaatttcaagtggctgagggagttcgtgtttaagaatatcgatggctacttcaagatctacagcaagcacaccccaatcaacctggtgcgcgacctgccacagggattctccgccctggagccactgatggatctgcccatcggcatcaacatcacccggtttcagacactgctggccctgcacagatcctacctgacaccaggcgactcctctagcggatggaccgcaggagctgccgcctactatgtgggctatctgcagccccggaccttcctgctgaagtacaacgagaatggcaccatcacagacgcagtggattgcgccctggaccccctgtctgagacaaagtgtacactgaagagctttaccgtggagaagggcatctatcagacaagcaatttcagggtgcagcctaccgagtccatcgtgcgctttcccaatatcacaaacctgtgcccttttggcgaggtgttcaacgccaccagattcgccagcgtgtacgcctggaatcggaagagaatctccaactgcgtggccgactattctgtgctgtacaactccgcctctttcagcacctttaagtgctatggcgtgtctcccacaaagctgaatgatctgtgctttaccaacgtgtacgccgatagcttcgtgatcaggggagacgaagtgagacagatcgcaccaggacagacaggaaagatcgcagactacaattataagctgcctgacgatttcaccggctgcgtgatcgcctggaactccaacaatctggattctaaagtgggcggcaactacaattatctgtacaggctgtttcgcaagtccaatctgaagccattcgagcgggacatctccacagagatctaccaggccggctctaccccctgcaatggcgtggagggctttaactgttatttccctctgcagtcttacggcttccagccaacaaacggcgtgggctatcagccctacagagtggtggtgctgtcctttgagctgctgcacgcaccagcaacagtgtgcggcccaaagaagtctaccaatctggtgaagaacaagtgcgtgaacttcaacttcaacggactgaccggcacaggcgtgctgaccgagagcaataagaagttcctgccttttcagcagttcggcagggacatcgcagataatacagacgccgtgcgcgaccctcagaccctggagatcctggacatcacaccatgcagcttcggcggcgtgtccgtgatcacaccaggcaccaatacatccaaccaggtggccgtgctgtatcaggacgtgaattgtaccgaggtgcccaacgcaatccacgcagatcagctgacccctacatggcgggtgtactctaccggcagcaacgtgttccagacaagagccggatgcctgatcggagcagagcacgtgaacaatagctatgagtgcgacatccctatcggcgccggcatctgtgccagctaccagacccagacaaactccccatctggagcaggctccgtggccagccagtccatcatcgcctataccatgagcctgggcgccgagaacagcgtggcctactccaacaattctatcgccatccctaccaacttcacaatcagcgtgaccacagagatcctgccagtgtctatgaccaagacaagcgtggactgcacaatgtatatctgtggcgatagcaccgagtgctccaacctgctgctgcagtacggctccttttgtacccagctgaatagagccctgcaaggcatcgcccaagagcaggataagaacacacaggaggtgttcgcccaggtgaagcagatctacaagaccccacccatcaaggactttggcggcttcaacttcagccagatcctgcctgatccaagcaagccctccaagaggtcttttatcgaggacctgctgttcaacaaggtgaccctggccgatgccggcttcatcaagcagtatggagattgcctgggagacatcgcagcccgcgacctgatctgtgcccagaagtttaatggcctgaccgtgctgcctccactgctgacagatgagatgatcgcccagtacacatctgccctgctggccggcaccatcacaagcggatggaccttcggcgcaggagccgccctgcagatcccttttgccatgcagatggcctataggttcaacggcatcggcgtgacccagaatgtgctgtacgagaaccagaagctgatcgccaatcagtttaacaaagccatcggcaagatccaggactctctgtcctctacagccagcgccctgggcaagctgcaggatgtggtgaatcagaacgcccaggccctgaataccctggtgaagcagctgagctccaacttcggcgccatctctagcgtgctgaatgacatcctgagccggctggacccccctgaggcagaggtgcagatcgacaggctgatcacaggccgcctgcagagcctgcagacctacgtgacacagcagctgatcagggcagcagagatcagagcctccgccaatctggccgccaccaagatgagcgagtgcgtgctgggacagtccaagagggtggacttttgtggcaagggctatcacctgatgtctttcccacagagcgcccctcacggcgtggtgtttctgcacgtgacctacgtgccagcccaggagaagaacttcaccacagcaccagccatctgccacgatggaaaggcattttttcctagggagggcgtgttcgtgtctaacggcacccaatggtttgtgacacagcgcaatttctacgagccacagatcatcaccacagacaatacattcgtgagcggcaactgtgatgtggtgatcggcatcgtgaacaataccgtgtatgatccactgcagcccgagctggactcctttaaggaggagctggataagtacttcaagaatcacacctctcccgacgtggatctgggcgacatctccggcatcaatgcctctgtggtgaacatccagaaggagatcgaccggctgaacgaggtggccaagaatctgaacgagagcctgatcgatctgcaggagctgggcaagtatgagcagtacatcaagggctctggcagagagaacctgtatttccagggaggaggaggcagcggatacatccctgaggcaccaagggacggacaggcctacgtgcgcaaggatggcgagtgggtgctgctgtccacctttctgggccatcatcaccaccaccaccaccactga

SEQ ID NO: 1280 - DNA, 3846 bp, Artificial Sequence
  Description of Artificial Sequence: Synthetic polynucleotide
atgggcatcctgccaagcccaggaatgcccgccctgctgtctctggtgagcctgctgtccgtgctgctgatgggatgcgtggcagagacaggcacacagtgcgtgaacctgaccacaaggacccagctgccccctgcctataccaattctttcacacggggcgtgtactatcccgacaaggtgtttagaagctccacgctgcactccacacaggatctgtttctgcctttcttttctaacgtgacctggttccacgccatccacgtgtccggcaccaatggcacaaagcggttcgacaatcccgtgctgccttttaacgatggcgtgtacttcgccagcaccgagaagtccaacatcatcagaggctggatctttggcaccacactggactctaagacacagagcctgctgatcgtgaacaatgccaccaacgtggtgatcaaggtgtgcgagttccagttttgtaatgatccattcctgggcgtgtactatcacaagaacaataagtcctggatggagtctgagtttcgcgtgtattctagcgccaacaattgcacatttgagtacgtgagccagcccttcctgatggacctggagggcaagcagggcaatttcaagaacctgagggagttcgtgtttaagaatatcgatggctacttcaagatctacagcaagcacaccccaatcaacctggtgcgcgacctgccacagggattctccgccctggagccactggtggatctgcccatcggcatcaacatcacccggtttcagacactgctggccctgcacagatcctacctgacaccaggcgactcctctagcggatggaccgcaggagctgccgcctactatgtgggctatctgcagccccggaccttcctgctgaagtacaacgagaatggcaccatcacagacgcagtggattgcgccctggaccccctgtctgagacaaagtgtacactgaagagctttaccgtggagaagggcatctatcagacaagcaatttcagggtgcagcctaccgagtccatcgtgcgctttcccaatatcacaaacctgtgcccttttggcgaggtgttcaacgccaccagattcgccagcgtgtacgcctggaatcggaagagaatctccaactgcgtggccgactattctgtgctgtacaactccgcctctttcagcacctttaagtgctatggcgtgtctcccacaaagctgaatgatctgtgctttaccaacgtgtacgccgatagcttcgtgatcaggggagacgaagtgagacagatcgcaccaggacagacaggaaagatcgcagactacaattataagctgcctgacgatttcaccggctgcgtgatcgcctggaactccaacaatctggattctaaagtgggcggcaactacaattatctgtacaggctgtttcgcaagtccaatctgaagccattcgagcgggacatctccacagagatctaccaggccggctctaccccctgcaatggcgtggagggctttaactgttatttccctctgcagtcttacggcttccagccaacaaacggcgtgggctatcagccctacagagtggtggtgctgtcctttgagctgctgcacgcaccagcaacagtgtgcggcccaaagaagtctaccaatctggtgaagaacaagtgcgtgaacttcaacttcaacggactgaccggcacaggcgtgctgaccgagagcaataagaagttcctgccttttcagcagttcggcagggacatcgcagataccacagacgccgtgcgcgaccctcagaccctggagatcctggacatcacaccatgcagcttcggcggcgtgtccgtgatcacaccaggcaccaatacatccaaccaggtggccgtgctgtatcaggacgtgaattgtaccgaggtgcccgtggcaatccacgcagatcagctgacccctacatggcgggtgtactctaccggcagcaacgtgttccagacaagagccggatgcctgatcggagcagagcacgtgaacaatagctatgagtgcgacatccctatcggcgccggcatctgtgccagctaccagacccagacaaactccccatctggagcaggctccgtggccagccagtccatcatcgcctataccatgagcctgggcgccgagaacagcgtggcctactccaacaattctatcgccatccctaccaacttcacaatcagcgtgaccacagagatcctgccagtgtctatgaccaagacaagcgtggactgcacaatgtatatctgtggcgatagcaccgagtgctccaacctgctgctgcagtacggctccttttgtacccagctgaatagagccctgacaggcatcgccgtggagcaggataagaacacacaggaggtgttcgcccaggtgaagcagatctacaagaccccacccatcaaggactttggcggcttcaacttcagccagatcctgcctgatccaagcaagccctccaagaggtcttttatcgaggacctgctgttcaacaaggtgaccctggccgatgccggcttcatcaagcagtatggagattgcctgggagacatcgcagcccgcgacctgatctgtgcccagaagtttaatggcctgaccgtgctgcctccactgctgacagatgagatgatcgcccagtacacatctgccctgctggccggcaccatcacaagcggatggaccttcggcgcaggagccgccctgcagatcccttttgccatgcagatggcctataggttcaacggcatcggcgtgacccagaatgtgctgtacgagaaccagaagctgatcgccaatcagtttaacagcgccatcggcaagatccaggactctctgtcctctacagccagcgccctgggcaagctgcaggatgtggtgaatcagaacgcccaggccctgaataccctggtgaagcagctgagctccaacttcggcgccatctctagcgtgctgaatgacatcctgagccggctggacccccctgaggcagaggtgcagatcgacaggctgatcacaggccgcctgcagagcctgcagacctacgtgacacagcagctgatcagggcagcagagatcagagcctccgccaatctggccgccaccaagatgagcgagtgcgtgctgggacagtccaagagggtggacttttgtggcaagggctatcacctgatgtctttcccacagagcgcccctcacggcgtggtgtttctgcacgtgacctacgtgccagcccaggagaagaacttcaccacagcaccagccatctgccacgatggaaaggcacactttcctagggagggcgtgttcgtgtctaacggcacccactggtttgtgacacagcgcaatttctacgagccacagatcatcaccacagacaatacattcgtgagcggcaactgtgatgtggtgatcggcatcgtgaacaataccgtgtatgatccactgcagcccgagctggactcctttaaggaggagctggataagtacttcaagaatcacacctctcccgacgtggatctgggcgacatctccggcatcaatgcctctgtggtgaacatccagaaggagatcgaccggctgaacgaggtggccaagaatctgaacgagagcctgatcgatctgcaggagctgggcaagtatgagcagtacatcaagggctctggcagagagaacctgtatttccagggaggaggaggcagcggatacatccctgaggcaccaagggacggacaggcctacgtgcgcaaggatggcgagtgggtgctgctgtccacctttctgggccatcatcaccaccaccaccaccactga

SEQ ID NO: 1281 - DNA, 3846 bp, Artificial Sequence
  Description of Artificial Sequence: Synthetic polynucleotide
atgggcatcctgccaagcccaggaatgcccgccctgctgtctctggtgagcctgctgtccgtgctgctgatgggatgcgtggcagagacaggcacacagtgcgtgaacctgaccacaaggacccagctgccccctgcctataccaattctttcacacggggcgtgtactatcccgacaagatttttagaagcaacgtgctgcactccacacaggatctgtttctgcctttcttttctaacgtgacctggttccacgccctccacgtgaaaggcaccaatggcacaaagcggttcgacaatcccgtgctgccttttaacgatggcgtgtacttcgccgcaatagagaagtccaacatcatcagaggctggatctttggcaccacactggactctaagacacagagcctgctgatcgtgaacaatgccaccaacgtggtgatccgcgtgtgcgagttccagttttgtgataatccattcctgggcgtgtactatcacaagaacaataagtcctggcgcgaggaagagtttcgctggtattctagcgccaacaattgcacatttgagtacgtgagccagcccttcctgtacgacctgaatggcaagcagggcaatttccatcatctgagggagttcgtgtttaagaatatcgatggctacttcaagatctacagcaagtgggaaccaatcaacctggtgcgcgacctgccacagggattctccgccctggagccactgatggatctgcccatcggcatcaacatcacccattttcagacaattctgtcactgagtagatcctaccgaacaccaggcgactcctctagcggatggaccgcaggagctgccgcctactatgtgggctatctgcagccccggaccttcctgctgaagtacgatgagaatggctatatcacagacgcagtggattgcagtctggaccccctgtctgagacaaagtgtaaactgaagagctttaccgtggagaagggcatctatcagacaagcaatttcagggtgcagcctacctatgaaatcgtgcgctttcccaatatcacaaacgaatgcccttttgatgaggtgttcaacgccaccagattcgccagcgtgtacaactggcgacggtatagaatctccaactgcgtggccgactattctgtgctgtacaactccgcctctttcagcacctttcaatgctatggcgtgtctcccacaaagctgaatgatctgtgctttaccaacgtgtacgccgatgtattcgtgatcaggggatcggaagtgagacagatcgcaccaggacagacaggagaaatcgcagactacaattataagctgcctgacgatttcaccggctgcgtgatcgcctggaactccaacaatctggattctacggtgggcggcaactacaattatctgtacaggctgtttcgcaagtccaatatgaagccattcgagcgggacatctccacagaggcttaccaggccggctgtaccccctgcaatggcgtggagggctttaactgttatttccctctgcagtcttacggcttccagccaacaaacggcgtgggctatcagccctacagagtggtggtgctgaaatttgagctgctgcacgcaccagcaacagtgtgcggcccaaaggattctaccaatctggtgaagaacaagtgcgtggactataacttcaacggaagaaccggcacaggcgtgctgaccgagagcaataagaagttcctgccttttcagcagttcggcagggacatctcagataccacagacgccgtgcgcgaccctacgaccggagagatcctgtgtatcacaccatgcagcttcggcggcgtgtccgtgatcacaccaggcaccaatacatccaaccaggtggccgtgctgtatcaggacgtgaattgtaccgaggtgcccgaagcaatccacagtaatcagctgcgtcctacatggcgggtgtactctaccggcagcaacgtgttccagacaagagccggatgcctgatcggagcagagcacgtgaacaatagctatgagtgcgacatccctatcggcaatggcatctgtgccagctaccagacccagacaaactccccatctggaagtggctccgtgagtagccagtccatcatcgcctataccatgagcctgggcgccgagaacactgtggcctactccaacaatgaaatcgccatccctaccaacttcacaatcagcgtgcaaacagagatcctgccagtgtctatgaccaaggtaagcgtggactgcacaatgtatatctgtggcgatagcacccggtgcctcaacctgctgtcacagtacggctccttttgtagtcagctggaaagagccctgaatggcatcgcccgtgagcaggataagaaccttcttaacgtgttcgcccaggtgaagcagatctacaagaccccacccatcaaggactttggcggcttcaacttcagccagatcctgcctgatccaagcaagccctccaagaggtcttttatcgaggacctgctgttcaacaaggtgaccctggccgatctcggcttcgtcaagcagtataaagattgcctgggagatcaagcagcccgcgacctgatctgtgcccagaagtacaatggcataatggtgctgcctccactgctgacagatgagatgatcgcccagtacacagcgtcactgctggccggcaccatcacagctggatggaccttcggcgcaggagccgccctgcagatcccttttgccatgcagatggcctataggttcaacggcatcggcgtgcaacagaatgtgctgtacgagaaccagaagattatcgccaatcagtttaacaacgccatcggcaatatccaggacgggctgtccactacagccagcgccctgtcaaagctgcaggatgtggtgaatcagcaagcccaggccctgaatgaactggtgaagcagctgagctccaacttcggcgccatctctagcgtgataaatgacatctacaaccggctggacccccctgaggcagaggcgcagatcgacaggctgatcacaggccgcctgcagagcctgcagacctacgtgacacagcagctgatcagggcaacggagatcagagcctccgcccaactggccgccgaaaagatgagcgagtgcgtgaaaggacagtccaacaggtatgggttttgtggcaacggctatcacctgatgtctttcccacagagcgcccctcacggcgtggtgtttctgcacgtgacctacgtgccaacgcagtttaagaacttcaccacagcaccaggtatctgccacgatggaaaggcatattttcctagggagggcgtgttcgtgtctaacggcaccgaatggtacattacacagcgcaatttctacgagccacgaatcatcaccacagacaatacattcgtgagcggcaactgtgatgtggtgatcggcatcgtgaacaataccgtgtatgatccactgcagcccgagctggactcctttaaggaggagctggataagtacttcaagaatcacacctctcccgacgtggatctgggcgacatctccggcatcaatgcctctgtggtgaacatccagaaggagatcgaccggctgaacgaggtggccaagaatctgaacgagagcctgatcgatctgcaggagctgggcaagtatgagcagtacatcaagggctctggcagagagaacctgtatttccagggaggaggaggcagcggatacatccctgaggcaccaagggacggacaggcctacgtgcgcaaggatggcgagtgggtgctgctgtccacctttctgggccatcatcaccaccaccaccaccactga

SEQ ID NO: 1282 - DNA, 3846 bp, Artificial Sequence
  Description of Artificial Sequence: Synthetic polynucleotide
atgggcatcctgccaagcccaggaatgcccgccctgctgtctctggtgagcctgctgtccgtgctgctgatgggatgcgtggcagagacaggcacacagtgcgtgaacctgaccacaaggacccagctgccccctgcctataccaattctttcacacggggcgtgtactatcccgacaaggtgtttagaagctccgtgctgcactccacacaggatctgtttctgcctttcttttctaacgtgacctggttccacgccatccacgtgtccggcaccaatggcacaaagcggttcgacaatcccgtgctgccttttaacgatggcgtgtacttcgccagcaccgagaagtccaacatcatcagaggctggatctttggcaccacactggactctaagacacagagcctgctgatcgtgaacaatgccaccaacgtggtgatcaaggtgtgcgagttccagttttgtaatgatccattcctgggcgtgtactatcacaagaacaataagtcctggatggagtctgagtttcgcgtgtattctagcgccaacaattgcacatttgagtacgtgagccagcccttcctgatggacctggagggcaagcagggcaatttcaagaacctgagggagttcgtgtttaagaatatcgatggctacttcaagatctacagcaagcacaccccaatcaacctggtgcgcgacctgccacagggattctccgccctggagccactggtggatctgcccatcggcatcaacatcacccggtttcagacactgctggccctgcacagatcctacctgacaccaggcgactcctctagcggatggaccgcaggagctgccgcctactatgtgggctatctgcagccccggaccttcctgctgaagtacaacgagaatggcaccatcacagacgcagtggattgcgccctggaccccctgtctgagacaaagtgtacactgaagagctttaccgtggagaagggcatctatcagacaagcaatttcagggtgcagcctaccgagtccatcgtgcgctttcccaatatcacaaacctgtgcccttttggcgaggtgttcaacgccaccagattcgccagcgtgtacgcctggaatcggaagagaatctccaactgcgtggccgactattctgtgctgtacaactccgcctctttcagcacctttaagtgctatggcgtgtctcccacaaagctgaatgatctgtgctttaccaacgtgtacgccgatagcttcgtgatcaggggagacgaagtgagacagatcgcaccaggacagacaggaaagatcgcagactacaattataagctgcctgacgatttcaccggctgcgtgatcgcctggaactccaacaatctggattctaaagtgggcggcaactacaattatctgtacaggctgtttcgcaagtccaatctgaagccattcgagcgggacatctccacagagatctaccaggccggctctaccccctgcaatggcgtggagggctttaactgttatttccctctgcagtcttacggcttccagccaacaaacggcgtgggctatcagccctacagagtggtggtgctgtcctttgagctgctgcacgcaccagcaacagtgtgcggcccaaagaagtctaccaatctggtgaagaacaagtgcgtgaacttcaacttcaacggactgaccggcacaggcgtgctgaccgagagcaataagaagttcctgccttttcagcagttcggcagggacatcgcagataccacagacgccgtgcgcgaccctcagaccctggagatcctggacatcacaccatgcagcttcggcggcgtgtccgtgatcacaccaggcaccaatacatccaaccaggtggccgtgctgtatcaggacgtgaattgtaccgaggtgcccgtggcaatccacgcagatcagctgacccctacatggcgggtgtactctaccggcagcaacgtgttccagacaagagccggatgcctgatcggagcagagcacgtgaacaatagctatgagtgcgacatccctatcggcgccggcatctgtgccagctaccagacccagacaaactccccatctggagcaggctccgtggccagccagtccatcatcgcctataccatgagcctgggcgccgagaacagcgtggcctactccaacaattctatcgccatccctaccaacttcacaatcagcgtgaccacagagatcctgccagtgtctatgaccaagacaagcgtggactgcacaatgtatatctgtggcgatagcaccgagtgctccaacctgctgctgcagtacggctccttttgtacccagctgaatagagccctgacaggcatcgccgtggagcaggataagaacacacaggaggtgttcgcccaggtgaagcagatctacaagaccccacccatcaaggactttggcggcttcaacttcagccagatcctgcctgatccaagcaagccctccaagaggtcttttatcgaggacctgctgttcaacaaggtgaccctggccgatgccggcttcatcaagcagtatggagattgcctgggagacatcgcagcccgcgacctgatctgtgcccagaagtttaatggcctgaccgtgctgcctccactgctgacagatgagatgatcgcccagtacacatctgccctgctggccggcaccatcacaagcggatggaccttcggcgcaggagccgccctgcagatcccttttgccatgcagatggcctataggttcaacggcatcggcgtgacccagaatgtgctgtacgagaaccagaagaaaatcgccaatcagtttaacagcgccatcggcaagatccaggactctctgtcctctacagccagcgccctgggcaagctgcaggatgtggtgaatcagaacgcccaggccctgaataccctggtgaagcagctgagctccaacttcggcgccatctctagcgtgctgaatgacatcctgagccggctggacccccctgaggcagaggtgcagatcgacaggctgatcacaggccgcctgcagagcctgcagacctacgtgacacagcagctgatcagggcagcagagatcagagcctccgccaatctggccgccaccaagatgagcgagtgcgtgctgggacagtccaagagggtggacttttgtggcaagggctatcacctgatgtctttcccacagagcgcccctcacggcgtggtgtttctgcacgtgacctacgtgccagcccaggagaagaacttcaccacagcaccagccatctgccacgatggaaaggcacactttcctagggagggcgtgttcgtgtctaacggcacccactggtttgtgacacagcgcaatttctacgagccacagatcatcaccacagacaatacattcgtgagcggcaactgtgatgtggtgatcggcatcgtgaacaataccgtgtatgatccactgcagcccgagctggactcctttaaggaggagctggataagtacttcaagaatcacacctctcccgacgtggatctgggcgacatctccggcatcaatgcctctgtggtgaacatccagaaggagatcgaccggctgaacgaggtggccaagaatctgaacgagagcctgatcgatctgcaggagctgggcaagtatgagcagtacatcaagggctctggcagagagaacctgtatttccagggaggaggaggcagcggatacatccctgaggcaccaagggacggacaggcctacgtgcgcaaggatggcgagtgggtgctgctgtccacctttctgggccatcatcaccaccaccaccaccactga

SEQ ID NO: 1283 - DNA, 3846 bp, Artificial Sequence
  Description of Artificial Sequence: Synthetic polynucleotide
atgggcatcctgccaagcccaggaatgcccgccctgctgtctctggtgagcctgctgtccgtgctgctgatgggatgcgtggcagagacaggcacacagtgcgtgaacctgaccacaaggacccagctgccccctgcctataccaattctttcacacggggcgtgtactatcccgacaagatatttagaagcaacgtgctgcactccacacaggatctgtttctgcctttcttttctaacgtgacctggttccacgccctacacgtgaaaggcaccaatggcacaaagcggttcgacaatcccgtgctgccttttaacgatggcgtgtacttcgccgctatcgagaagtccaacatcatcagaggctggatctttggcaccacactggactctaagacacagagcctgctgatcgtgaacaatgccaccaacgtggtgatccgcgtgtgcgagttccagttttgtgaaaatccattcctgggcgtgtactatcacaagaacaataagtcctggagggaggaagagtttcgctggtattctagcgccaacaattgcacatttgagtacgtgagccagcccttcctgtacgacctgaatggcaagcagggcaatttccatcatctgagggagttcgtgtttaagaatatcgatggctacttcaagatctacagcaagtgggaaccaatcaacctggtgcgcgacctgccacagggattctccgccctggagccactgatggatctgcccatcggcatcaacatcacccattttcagacaatactgtcactgtcgagatcctaccgtacaccaggcgactcctctagcggatggaccgcaggagctgccgcctactatgtgggctatctgcagccccggaccttcctgctgaagtacgatgagaatggctatatcacagacgcagtggattgcagtctggaccccctgtctgagacaaagtgtaaactgaagagctttaccgtggagaagggcatctatcagacaagcaatttcagggtgcagcctacctacgaaatcgtgcgctttcccaatatcacaaacgcgtgcccttttgacgaggtgttcaacgccaccagattcgccagcgtgtacaactgggaacggcaaagaatctccaactgcgtggccgactattctgtgctgtacaactccgcctctttcagcacctttcaatgctatggcgtgtctcccacaaagctgaatgatctgtgctttaccaacgtgtacgccgatatattcgtgatcaggggatcagaagtgagacagatcgcaccaggacagacaggagaaatcgcagactacaattataagctgcctgacgatttcaccggctgcgtgatcgcctggaactccaacaatctggattctacggtgggcggcaactacaattatctgtacaggctgtttcgcaagtccaatatgaagccattcgagcgggacatctccacagagcaataccaggccggctgtaccccctgcaatggcgtggagggctttaactgttatttccctctgcagtcttacggcttccagccaacaaacggcgtgggctatcagccctacagagtggtggtgctgaaatttgagctgctgcacgcaccagcaacagtgtgcggcccaaaggactctaccaatctggtgaagaacaagtgcgtggattataacttcaacggacgaaccggcacaggcgtgctgaccgagagcaataagaagttcctgccttttcagcagttcggcagggacatctcagataccacagacgccgtgcgcgaccctactaccggtgagatcctgtgtatcacaccatgcagcttcggcggcgtgtccgtgatcacaccaggcaccaatacatccaaccaggtggccgtgctgtatcaggacgtgaattgtaccgaggtgcccgaagcaatccacagtaatcagctgcgacctacatggcgggtgtactctaccggcagcaacgtgttccagacaagagccggatgcctgatcggagcagagcacgtgaacaatagctatgagtgcgacatccctatcggcaacggcatctgtgccagctaccagacccagacaaactccccatctggatcaggctccgtgtcaagccagtccatcatcgcctataccatgagcctgggcgccgagaacactgtggcctactccaacaatgaaatcgccatccctaccaacttcacaatcagcgtgcaaacagagatcctgccagtgtctatgaccaaggtaagcgtggactgcacaatgtatatctgtggcgatagcacccgttgcttaaacctgctgtcacagtacggctccttttgttcacagctggaaagagccctgaatggcatcgcccgagagcaggataagaacctcttgaacgtgttcgcccaggtgaagcagatctacaagaccccacccatcaaggactttggcggcttcaacttcagccagatcctgcctgatccaagcaagccctccaagaggtcttttatcgaggacctgctgttcaacaaggtgaccctggccgatcttggcttcgtaaagcagtataaagattgcctgggagatcaagcagcccgcgacctgatctgtgcccagaagtacaatggcattatggtgctgcctccactgctgacagatgagatgatcgcccagtacacagcgagtctgctggccggcaccatcacagctggatggaccttcggcgcaggagccgccctgcagatcccttttgccatgcagatggcctataggttcaacggcatcggcgtgcaacagaatgtgctgtacgagaaccagaagattatcgccaatcagtttaacaatgccatcggcaatatccaggacggactgtccacgacagccagcgccctgagtaagctgcaggatgtggtgaatcagcaagcccaggccctgaatgaactggtgaagcagctgagctccaacttcggcgccatctctagcgtgattaatgacatctataatcggctggacccccctgaggcagaggcgcagatcgacaggctgatcacaggccgcctgcagagcctgcagacctacgtgacacagcagctgatcagggcaacggagatcagagcctccgcccaactggccgccgaaaagatgagcgagtgcgtgaaaggacagtccaacaggtatggtttttgtggcaatggctatcacctgatgtctttcccacagagcgcccctcacggcgtggtgtttctgcacgtgacctacgtgccaacgcagtttaagaacttcaccacagcaccaggtatctgccacgatggaaaggcatactttcctagggagggcgtgttcgtgtctaacggcaccgaatggtacattacacagcgcaatttctacgagccacggatcatcaccacagacaatacattcgtgagcggcaactgtgatgtggtgatcggcatcgtgaacaataccgtgtatgatccactgcagcccgagctggactcctttaaggaggagctggataagtacttcaagaatcacacctctcccgacgtggatctgggcgacatctccggcatcaatgcctctgtggtgaacatccagaaggagatcgaccggctgaacgaggtggccaagaatctgaacgagagcctgatcgatctgcaggagctgggcaagtatgagcagtacatcaagggctctggcagagagaacctgtatttccagggaggaggaggcagcggatacatccctgaggcaccaagggacggacaggcctacgtgcgcaaggatggcgagtgggtgctgctgtccacctttctgggccatcatcaccaccaccaccaccactga

SEQ ID NO: 1284 - DNA, 3846 bp, Artificial Sequence
  Description of Artificial Sequence: Synthetic polynucleotide
atgggcatcctgccaagcccaggaatgcccgccctgctgtctctggtgagcctgctgtccgtgctgctgatgggatgcgtggcagagacaggcacacagtgcgtgaacctgaccacaaggacccagctgccccctgcctataccaattctttcacacggggcgtgtactatcccgacaaggtgtttagaagctccgtgctgcactccacacaggatctgtttctgcctttcttttctaacgtgacctggttccacgccatccacgtgtccggcaccaatggcacaaagcggttcgacaatcccgtgctgccttttaacgatggcgtgtacttcgccagcaccgagaagtccaacatcatcagaggctggatctttggcaccacactggactctaagacacagagcctgctgatcgtgaacaatgccaccaacgtggtgatcaaggtgtgcgagttccagttttgtaatgatccattcctgggcgtgtactatcacaagaacaataagtcctggatggagtctgagtttcgcgtgtattctagcgccaacaattgcacatttgagtacgtgagccagcccttcctgatggacctggagggcaagcagggcaatttcaagaacctgagggagttcgtgtttaagaatatcgatggctacttcaagatctacagcaagcacaccccaatcaacctggtgcgcgacctgccacagggattctccgccctggagccactggtggatctgcccatcggcatcaacatcacccggtttcagacactgctggccctgcacagatcctacctgacaccaggcgactcctctagcggatggaccgcaggagctgccgcctactatgtgggctatctgcagccccggaccttcctgctgaagtacaacgagaatggcaccatcacagacgcagtggattgcgccctggaccccctgtctgagacaaagtgtacactgaagagctttaccgtggagaagggcatctatcagacaagcaatttcagggtgcagcctaccgagtccatcgtgcgctttcccaatatcacaaacctgtgcccttttggcgaggtgttcaacgccaccagattcgccagcgtgtacgcctggaatcggaagagaatctccaactgcgtggccgactattctgtgctgtacaactccgcctctttcagcacctttaagtgctatggcgtgtctcccacaaagctgaatgatctgtgctttaccaacgtgtacgccgatagcttcgtgatcaggggagacgaagtgagacagatcgcaccaggacagacaggaaagatcgcagactacaattataagctgcctgacgatttcaccggctgcgtgatcgcctggaactccaacaatctggattctaaagtgggcggcaactacaattatctgtacaggctgtttcgcaagtccaatctgaagccattcgagcgggacatctccacagagatctaccaggccggctctaccccctgcaatggcgtggagggctttaactgttatttccctctgcagtcttacggcttccagccaacaaacggcgtgggctatcagccctacagagtggtggtgctgtcctttgagctgctgcacgcaccagcaacagtgtgcggcccaaagaagtctaccaatctggtgaagaacaagtgcgtgaacttcaacttcaacggactgaccggcacaggcgtgctgaccgagagcaataagaagttcctgccttttcagcagttcggcagggacatcgcagataccacagacgccgtgcgcgaccctcagaccctggagatcctggacatcacaccatgcagcttcggcggcgtgtccgtgatcacaccaggcaccaatacatccaaccaggtggccgtgctgtatcaggacgtgaattgtaccgaggtgcccgtggcaatccacgcagatcagctgacccctacatggcgggtgtactctaccggcagcaacgtgttccagacaagagccggatgcctgatcggagcagagtatgtgaacaatagctatgagtgcgacatccctatcggcgccggcatctgtgccagctaccagacccagacaaactccccatctggagcaggctccgtggccagccagtccatcatcgcctataccatgagcctgggcgccgagaacagcgtggcctactccaacaattctatcgccatccctaccaacttcacaatcagcgtgaccacagagatcctgccagtgtctatgaccaagacaagcgtggactgcacaatgtatatctgtggcgatagcaccgagtgctccaacctgctgctgcagtacggctccttttgtacccagctgaatagagccctgacaggcatcgccgtggagcaggataagaacacacaggaggtgttcgcccaggtgaagcagatctacaagaccccacccatcaaggactttggcggcttcaacttcagccagatcctgcctgatccaagcaagccctccaagaggtcttttatcgaggacctgctgttcaacaaggtgaccctggccgatgccggcttcatcaagcagtatggagattgcctgggagacatcgcagcccgcgacctgatctgtgcccagaagtttaatggcctgaccgtgctgcctccactgctgacagatgagatgatcgcccagtacacatctgccctgctggccggcaccatcacaagcggatggaccttcggcgcaggagccgccctgcagatcccttttgccatgcagatggcctataggttcaacggcatcggcgtgacccagaatgtgctgtacgagaaccagaagctgatcgccaatcagtttaacagcgccatcggcaagatccaggactctctgtcctctacagccagcgccctgggcaagctgcaggatgtggtgaatcagaacgcccaggccctgaataccctggtgaagcagctgagctccaacttcggcgccatctctagcgtgctgaatgacatcctgagccggctggacccccctgaggcagaggtgcagatcgacaggctgatcacaggccgcctgcagagcctgcagacctacgtgacacagcagctgatcagggcagcagagatcagagcctccgccaatctggccgccaccaagatgagcgagtgcgtgctgggacagtccaagagggtggacttttgtggcaagggctatcacctgatgtctttcccacagagcgcccctcacggcgtggtgtttctgcacgtgacctacgtgccagcccaggagaagaacttcaccacagcaccagccatctgccacgatggaaaggcacactttcctagggagggcgtgttcgtgtctaacggcacccactggtttgtgacacagcgcaatttctacgagccacagatcatcaccacagacaatacattcgtgagcggcaactgtgatgtggtgatcggcatcgtgaacaataccgtgtatgatccactgcagcccgagctggactcctttaaggaggagctggataagtacttcaagaatcacacctctcccgacgtggatctgggcgacatctccggcatcaatgcctctgtggtgaacatccagaaggagatcgaccggctgaacgaggtggccaagaatctgaacgagagcctgatcgatctgcaggagctgggcaagtatgagcagtacatcaagggctctggcagagagaacctgtatttccagggaggaggaggcagcggatacatccctgaggcaccaagggacggacaggcctacgtgcgcaaggatggcgagtgggtgctgctgtccacctttctgggccatcatcaccaccaccaccaccactga

SEQ ID NO: 1285 - DNA, 3846 bp, Artificial Sequence
  Description of Artificial Sequence: Synthetic polynucleotide
atgggcatcctgccaagcccaggaatgcccgccctgctgtctctggtgagcctgctgtccgtgctgctgatgggatgcgtggcagagacaggcacacagtgcgtgaacctgaccacaaggacccagctgccccctgcctataccaattctttcacacggggcgtgtactatcccgacaaggtgtttagaagctccgtgctgcactccacacaggatctgtttctgcctttcttttctaacgtgacctggttccacgccatccacgtgtccggcaccaatggcacaaagcggttcgacaatcccgtgctgccttttaacgatggcgtgtacttcgccagcaccgagaagtccaacatcatcagaggctggatctttggcaccacactggactctaagacacagagcctgctgatcgtgaacaatgccaccaacgtggtgatcaaggtgtgcgagttccagttttgtaatgatccattcctgggcgtgtactatcacaagaacaataagtcctggatggagtctgagtttcgcgtgtattctagcgccaacaattgcacatttgagtacgtgagccagcccttcctgatggacctggagggcaagcagggcaatttcaagaacctgagggagttcgtgtttaagaatatcgatggctacttctacatctacagcaagcacaccccaatcaacctggtgcgcgacctgccacagggattctccgccctggagccactggtggatctgcccatcggcatcaacatcacccggtttcagacactgctggccctgcacagatcctacctgacaccaggcgactcctctagcggatggaccgcaggagctgccgcctactatgtgggctatctgcagccccggaccttcctgctgaagtacaacgagaatggcaccatcacagacgcagtggattgcgccctggaccccctgtctgagacaaagtgtacactgaagagctttaccgtggagaagggcatctatcagacaagcaatttcagggtgcagcctaccgagtccatcgtgcgctttcccaatatcacaaacctgtgcccttttggcgaggtgttcaacgccaccagattcgccagcgtgtacgcctggaatcggaagagaatctccaactgcgtggccgactattctgtgctgtacaactccgcctctttcagcacctttaagtgctatggcgtgtctcccacaaagctgaatgatctgtgctttaccaacgtgtacgccgatagcttcgtgatcaggggagacgaagtgagacagatcgcaccaggacagacaggaaagatcgcagactacaattataagctgcctgacgatttcaccggctgcgtgatcgcctggaactccaacaatctggattctaaagtgggcggcaactacaattatctgtacaggctgtttcgcaagtccaatctgaagccattcgagcgggacatctccacagagatctaccaggccggctctaccccctgcaatggcgtggagggctttaactgttatttccctctgcagtcttacggcttccagccaacaaacggcgtgggctatcagccctacagagtggtggtgctgtcctttgagctgctgcacgcaccagcaacagtgtgcggcccaaagaagtctaccaatctggtgaagaacaagtgcgtgaacttcaacttcaacggactgaccggcacaggcgtgctgaccgagagcaataagaagttcctgccttttcagcagttcggcagggacatcgcagataccacagacgccgtgcgcgaccctcagaccctggagatcctggacatcacaccatgcagcttcggcggcgtgtccgtgatcacaccaggcaccaatacatccaaccaggtggccgtgctgtatcaggacgtgaattgtaccgaggtgcccgtggcaatccacgcagatcagctgacccctacatggcgggtgtactctaccggcagcaacgtgttccagacaagagccggatgcctgatcggagcagagcacgtgaacaatagctatgagtgcgacatccctatcggcgccggcatctgtgccagctaccagacccagacaaactccccatctggagcaggctccgtggccagccagtccatcatcgcctataccatgagcctgggcgccgagaacagcgtggcctactccaacaattctatcgccatccctaccaacttcacaatcagcgtgaccacagagatcctgccagtgtctatgaccaagacaagcgtggactgcacaatgtatatctgtggcgatagcaccgagtgctccaacctgctgctgcagtacggctccttttgtacccagctgaatagagccctgacaggcatcgccgtggagcaggataagaacacacaggaggtgttcgcccaggtgaagcagatctacaagaccccacccatcaaggactttggcggcttcaacttcagccagatcctgcctgatccaagcaagccctccaagaggtcttttatcgaggacctgctgttcaacaaggtgaccctggccgatgccggcttcatcaagcagtatggagattgcctgggagacatcgcagcccgcgacctgatctgtgcccagaagtttaatggcctgaccgtgctgcctccactgctgacagatgagatgatcgcccagtacacatctgccctgctggccggcaccatcacaagcggatggaccttcggcgcaggagccgccctgcagatcccttttgccatgcagatggcctataggttcaacggcatcggcgtgacccagaatgtgctgtacgagaaccagaagctgatcgccaatcagtttaacagcgccatcggcaagatccaggactctctgtcctctacagccagcgccctgggcaagctgcaggatgtggtgaatcagaacgcccaggccctgaataccctggtgaagcagctgagctccaacttcggcgccatctctagcgtgctgaatgacatcctgagccggctggacccccctgaggcagaggtgcagatcgacaggctgatcacaggccgcctgcagagcctgcagacctacgtgacacagcagctgatcagggcagcagagatcagagcctccgccaatctggccgccaccaagatgagcgagtgcgtgctgggacagtccaagagggtggacttttgtggcaagggctatcacctgatgtctttcccacagagcgcccctcacggcgtggtgtttctgcacgtgacctacgtgccagcccaggagaagaacttcaccacagcaccagccatctgccacgatggaaaggcacactttcctagggagggcgtgttcgtgtctaacggcacccactggtttgtgacacagcgcaatttctacgagccacagatcatcaccacagacaatacattcgtgagcggcaactgtgatgtggtgatcggcatcgtgaacaataccgtgtatgatccactgcagcccgagctggactcctttaaggaggagctggataagtacttcaagaatcacacctctcccgacgtggatctgggcgacatctccggcatcaatgcctctgtggtgaacatccagaaggagatcgaccggctgaacgaggtggccaagaatctgaacgagagcctgatcgatctgcaggagctgggcaagtatgagcagtacatcaagggctctggcagagagaacctgtatttccagggaggaggaggcagcggatacatccctgaggcaccaagggacggacaggcctacgtgcgcaaggatggcgagtgggtgctgctgtccacctttctgggccatcatcaccaccaccaccaccactga

SEQ ID NO: 1286 - DNA, 3846 bp, Artificial Sequence
  Description of Artificial Sequence: Synthetic polynucleotide
atgggcatcctgccaagcccaggaatgcccgccctgctgtctctggtgagcctgctgtccgtgctgctgatgggatgcgtggcagagacaggcacacagtgcgtgaacctgaccacaaggacccagctgccccctgcctataccaattctttcacacggggcgtgtactatcccgacaaggtgtttagaagctccgtgctgcactccacacaggatctgtttctgcctttcttttctaacgtgacctggttccacgccatccacgtgtccggcaccaatggcacaaagcggttcgacaatcccgtgctgccttttaacgatggcgtgtacttcgccagcaccgagaagtccaacatcatcagaggctggatctttggcaccacactggactctaagacacagagcctgctgatcgtgaacaatgccaccaacgtggtgatcaaggtgtgcgagttccagttttgtaatgatccattcctgggcgtgtactatcacaagaacaataagtcctggatggagtctgagtttcgcgtgtattctagcgccaacaattgcacatttgagtacgtgagccagcccttcctgatggacctggagggcaagcagggcaatttcaagtggctgagggagttcgtgtttaagaatatcgatggctacttcaagatctacagcaagcacaccccaatcaacctggtgcgcgacctgccacagggattctccgccctggagccactggtggatctgcccatcggcatcaacatcacccggtttcagacactgctggccctgcacagatcctacctgacaccaggcgactcctctagcggatggaccgcaggagctgccgcctactatgtgggctatctgcagccccggaccttcctgctgaagtacaacgagaatggcaccatcacagacgcagtggattgcgccctggaccccctgtctgagacaaagtgtacactgaagagctttaccgtggagaagggcatctatcagacaagcaatttcagggtgcagcctaccgagtccatcgtgcgctttcccaatatcacaaacctgtgcccttttggcgaggtgttcaacgccaccagattcgccagcgtgtacgcctggaatcggaagagaatctccaactgcgtggccgactattctgtgctgtacaactccgcctctttcagcacctttaagtgctatggcgtgtctcccacaaagctgaatgatctgtgctttaccaacgtgtacgccgatagcttcgtgatcaggggagacgaagtgagacagatcgcaccaggacagacaggaaagatcgcagactacaattataagctgcctgacgatttcaccggctgcgtgatcgcctggaactccaacaatctggattctaaagtgggcggcaactacaattatctgtacaggctgtttcgcaagtccaatctgaagccattcgagcgggacatctccacagagatctaccaggccggctctaccccctgcaatggcgtggagggctttaactgttatttccctctgcagtcttacggcttccagccaacaaacggcgtgggctatcagccctacagagtggtggtgctgtcctttgagctgctgcacgcaccagcaacagtgtgcggcccaaagaagtctaccaatctggtgaagaacaagtgcgtgaacttcaacttcaacggactgaccggcacaggcgtgctgaccgagagcaataagaagttcctgccttttcagcagttcggcagggacatcgcagataccacagacgccgtgcgcgaccctcagaccctggagatcctggacatcacaccatgcagcttcggcggcgtgtccgtgatcacaccaggcaccaatacatccaaccaggtggccgtgctgtatcaggacgtgaattgtaccgaggtgcccgtggcaatccacgcagatcagctgacccctacatggcgggtgtactctaccggcagcaacgtgttccagacaagagccggatgcctgatcggagcagagcacgtgaacaatagctatgagtgcgacatccctatcggcgccggcatctgtgccagctaccagacccagacaaactccccatctggagcaggctccgtggccagccagtccatcatcgcctataccatgagcctgggcgccgagaacagcgtggcctactccaacaattctatcgccatccctaccaacttcacaatcagcgtgaccacagagatcctgccagtgtctatgaccaagacaagcgtggactgcacaatgtatatctgtggcgatagcaccgagtgctccaacctgctgctgcagtacggctccttttgtacccagctgaatagagccctgacaggcatcgccgtggagcaggataagaacacacaggaggtgttcgcccaggtgaagcagatctacaagaccccacccatcaaggactttggcggcttcaacttcagccagatcctgcctgatccaagcaagccctccaagaggtcttttatcgaggacctgctgttcaacaaggtgaccctggccgatgccggcttcatcaagcagtatggagattgcctgggagacatcgcagcccgcgacctgatctgtgcccagaagtttaatggcctgaccgtgctgcctccactgctgacagatgagatgatcgcccagtacacatctgccctgctggccggcaccatcacaagcggatggaccttcggcgcaggagccgccctgcagatcccttttgccatgcagatggcctataggttcaacggcatcggcgtgacccagaatgtgctgtacgagaaccagaagctgatcgccaatcagtttaacagcgccatcggcaagatccaggactctctgtcctctacagccagcgccctgggcaagctgcaggatgtggtgaatcagaacgcccaggccctgaataccctggtgaagcagctgagctccaacttcggcgccatctctagcgtgctgaatgacatcctgagccggctggacccccctgaggcagaggtgcagatcgacaggctgatcacaggccgcctgcagagcctgcagacctacgtgacacagcagctgatcagggcagcagagatcagagcctccgccaatctggccgccaccaagatgagcgagtgcgtgctgggacagtccaagagggtggacttttgtggcaagggctatcacctgatgtctttcccacagagcgcccctcacggcgtggtgtttctgcacgtgacctacgtgccagcccaggagaagaacttcaccacagcaccagccatctgccacgatggaaaggcacactttcctagggagggcgtgttcgtgtctaacggcacccactggtttgtgacacagcgcaatttctacgagccacagatcatcaccacagacaatacattcgtgagcggcaactgtgatgtggtgatcggcatcgtgaacaataccgtgtatgatccactgcagcccgagctggactcctttaaggaggagctggataagtacttcaagaatcacacctctcccgacgtggatctgggcgacatctccggcatcaatgcctctgtggtgaacatccagaaggagatcgaccggctgaacgaggtggccaagaatctgaacgagagcctgatcgatctgcaggagctgggcaagtatgagcagtacatcaagggctctggcagagagaacctgtatttccagggaggaggaggcagcggatacatccctgaggcaccaagggacggacaggcctacgtgcgcaaggatggcgagtgggtgctgctgtccacctttctgggccatcatcaccaccaccaccaccactga

SEQ ID NO: 1287 - DNA, 3846 bp, Artificial Sequence
  Description of Artificial Sequence: Synthetic polynucleotide
atgggcatcctgccaagcccaggaatgcccgccctgctgtctctggtgagcctgctgtccgtgctgctgatgggatgcgtggcagagacaggcacacagtgcgtgaacctgaccacaaggacccagctgccccctgcctataccaattctttcacacggggcgtgtactatcccgacaaggtgtttagaagcgatgtgctgcactccacacaggatctgtttctgcctttcttttctaacgtgacctggttccacgccatccacgtgtccggcaccaatggcacaaagcggttcgacaatcccgtgctgccttttaacgatggcgtgtacttcgccagcaccgagaagtccaacatcatcagaggctggatctttggcaccacactggactctaagacacagagcctgctgatcgtgaacaatgccaccaacgtggtgatcaaggtgtgcgagttccagttttgtgacgatccattcctgggcgtgtactatcacaagaacaataagtcctggatggagaaagagtttcgcgtgtattctagcgccaacaattgcacatttgagtacgtgagccagcccttcctgatggacctggggggcaagcagggcaatttcaagtggctgagggagttcgtgtttaagaatatcgatggctacttcaagatctacagcaagcacaccccaatcaacctggtgcgcgacctgccacagggattctccgccctggagccactgatggatctgcccatcggcatcaacatcacccggtttcagacactgctggccctgcacagatcctacctgacaccaggcgactcctctagcggatggaccgcaggagctgccgcctactatgtgggctatctgcagccccggaccttcctgctgaagtacaacgagaatggcaccatcacagacgcagtggattgcgcctatgaccccctgtctgagacaaagtgtacactgaagagctttaccgtggagaagggcatctatcagacaagcaatttcagggtgcagcctaccgagtccatcgtgcgctttcccaatatcacaaacctgtgcccttttggcgaggtgttcaacgccaccagattcgccagcgtgtacgcctggaatcggaagagaatctccaactgcgtggccgactattctgtgctgtacaactccgcctctttcagcacctttaagtgctatggcgtgtctcccacaaagctgaatgatctgtgctttaccaacgtgtacgccgatagcttcgtgatcaggggagacgaagtgagacagatcgcaccaggacagacaggaaagatcgcagactacaattataagctgcctgacgatttcaccggctgcgtgatcgcctggaactccaacaatctggattctaaagtgggcggcaactacaattatctgtacaggctgtttcgcaagtccaatctgaagccattcgagcgggacatctccacagagatctaccaggccggctctaccccctgcaatggcgtggagggctttaactgttatttccctctgcagtcttacggcttccagccaacaaacggcgtgggctatcagccctacagagtggtggtgctgtcctttgagctgctgcacgcaccagcaacagtgtgcggcccaaagaagtctaccaatctggtgaagaacaagtgcgtgaacttcaacttcaacggactgaccggcacaggcgtgctgaccgagagcaataagaagttcctgccttttcagcagttcggcagggacatcgcagataacacagacgccgtgcgcgaccctcagaccctggagatcctggacatcacaccatgcagcttcggcggcgtgtccgtgatcacaccaggcaccaatacatccaaccaggtggccgtgctgtatcaggacgtgaattgtaccgaggtgcccaatgcaatccacgcagatcagctgacccctacatggcgggtgtactctaccggcagcaacgtgttccagacaagagccggatgcctgatcggagcagagcacgtgaacaatagctatgagtgcgacatccctatcggcgccggcatctgtgccagctaccagacccagacaaactccccatctggagcaggctccgtggccagccagtccatcatcgcctataccatgagcctgggcgccgagaacagcgtggcctactccaacaattctatcgccatccctaccaacttcacaatcagcgtgaccacagagatcctgccagtgtctatgaccaagacaagcgtggactgcacaatgtatatctgtggcgatagcaccgagtgctccaacctgctgctgcagtacggctccttttgtacccagctgaatagagccctgcatggcatcgcccgtgagcaggataagaacacacaggaggtgttcgcccaggtgaagcagatctacaagaccccacccatcaaggactttggcggcttcaacttcagccagatcctgcctgatccaagcaagccctccaagaggtcttttatcgaggacctgctgttcaacaaggtgaccctggccgatgccggcttcatcaagcagtatggagattgcctgggagacatcgcagcccgcgacctgatctgtgcccagaagtttaatggcctgaccgtgctgcctccactgctgacagatgagatgatcgcccagtacacatctgccctgctggccggcaccatcacaagcggatggaccttcggcgcaggagccgccctgcagatcccttttgccatgcagatggcctataggttcaacggcatcggcgtgacccagaatgtgctgtacgagaaccagaagctgatcgccaatcagtttaacaaagccatcggcaagatccaggactctctgtcctctacagccagcgccctgggcaagctgcaggatgtggtgaatcagaacgcccaggccctgaataccctggtgaagcagctgagctccaacttcggcgccatctctagcgtgctgaatgacatcctgagccggctggacccccctgaggcagaggtgcagatcgacaggctgatcacaggccgcctgcagagcctgcagacctacgtgacacagcagctgatcagggcagcagagatcagagcctccgccaatctggccgccaccaagatgagcgagtgcgtgctgggacagtccaagagggtggacttttgtggcaagggctatcacctgatgtctttcccacagagcgcccctcacggcgtggtgtttctgcacgtgacctacgtgccagcccaggagaagaacttcaccacagcaccagccatctgccacgatggaaaggcattttttcctagggagggcgtgttcgtgtctaacggcacccaatggtttgtgacacagcgcaatttctacgagccacagatcatcaccacagacaatacattcgtgagcggcaactgtgatgtggtgatcggcatcgtgaacaataccgtgtatgatccactgcagcccgagctggactcctttaaggaggagctggataagtacttcaagaatcacacctctcccgacgtggatctgggcgacatctccggcatcaatgcctctgtggtgaacatccagaaggagatcgaccggctgaacgaggtggccaagaatctgaacgagagcctgatcgatctgcaggagctgggcaagtatgagcagtacatcaagggctctggcagagagaacctgtatttccagggaggaggaggcagcggatacatccctgaggcaccaagggacggacaggcctacgtgcgcaaggatggcgagtgggtgctgctgtccacctttctgggccatcatcaccaccaccaccaccactga

SEQ ID NO: 1288 - DNA, 3846 bp, Artificial Sequence
  Description of Artificial Sequence: Synthetic polynucleotide
atgggcatcctgccaagcccaggaatgcccgccctgctgtctctggtgagcctgctgtccgtgctgctgatgggatgcgtggcagagacaggcacacagtgcgtgaacctgaccacaaggacccagctgccccctgcctataccaattctttcacacggggcgtgtactatcccgacaaggtgtttagaagctccgtgctgcactccacacaggatctgtttctgcctttcttttctaacgtgacctggttccacgccatccacgtgtccggcaccaatggcacaaagcggttcgacaatcccgtgctgccttttaacgatggcgtgtacttcgccagcaccgagaagtccaacatcatcagaggctggatctttggcaccacactggactctaagacacagagcctgctgatcgtgaacaatgccaccaacgtggtgatcaaggtgtgcgagttccagttttgtaatgatccattcctgggcgtgtactatcacaagaacaataagtcctggatggagtctgagtttcgcgtgtattctagcgccaacaattgcacatttgagtacgtgagccagcccttcctgatggacctggagggcaagcagggcaatttcaagaacctgagggagttcgtgtttaagaatatcgatggctacttcaagatctacagcaagcacaccccaatcaacctggtgcgcgacctgccacagggattctccgccctggagccactggtggatctgcccatcggcatcaacatcacccggtttcagacactgctggccctgcacagatcctacctgacaccaggcgactcctctagcggatggaccgcaggagctgccgcctactatgtgggctatctgcagccccggaccttcctgctgaagtacaacgagaatggcaccatcacagacgcagtggattgcgccctggaccccctgtctgagacaaagtgtacactgaagagctttaccgtggagaagggcatctatcagacaagcaatttcagggtgcagcctaccgagtccatcgtgcgctttcccaatatcacaaacctgtgcccttttggcgaggtgttcaacgccaccagattcgccagcgtgtacgcctggaatcggaagagaatctccaactgcgtggccgactattctgtgctgtacaactccgcctctttcagcacctttaagtgctatggcgtgtctcccacaaagctgaatgatctgtgctttaccaacgtgtacgccgatagcttcgtgatcaggggagacgaagtgagacagatcgcaccaggacagacaggaaagatcgcagactacaattataagctgcctgacgatttcaccggctgcgtgatcgcctggaactccaacaatctggattctaaagtgggcggcaactacaattatctgtacaggctgtttcgcaagtccaatctgaagccattcgagcgggacatctccacagagatctaccaggccggctctaccccctgcaatggcgtggagggctttaactgttatttccctctgcagtcttacggcttccagccaacaaacggcgtgggctatcagccctacagagtggtggtgctgtcctttgagctgctgcacgcaccagcaacagtgtgcggcccaaagaagtctaccaatctggtgaagaacaagtgcgtgaacttcaacttcaacggactgaccggcacaggcgtgctgaccgagagcaataagaagttcctgccttttcagcagttcggcagggacatcgcagataccacagacgccgtgcgcgaccctcagaccctggagatcctggacatcacaccatgcagcttcggcggcgtgtccgtgatcacaccaggcaccaatacatccaaccaggtggccgtgctgtatcaggacgtgaattgtaccgaggtgcccgtggcaatccacgcagatcagctgacccctacatggcgggtgtactctaccggcagcaacgtgttccagacaagagccggatgcctgatcggagcagagcacgtgaacaatagctatgagtgcgacatccctatcggcgccggcatctgtgccagctaccagacccagacaaactccccatctggagcaggctccgtggccagccagtccatcatcgcctataccatgagcctgggcgccgagaacagcgtggcctactccaacaattctatcgccatccctaccaacttcacaatcagcgtgaccacagagatcctgccagtgtctatgaccaagacaagcgtggactgcacaatgtatatctgtggcgatagcaccgagtgctccaacctgctgctgcagtacggctccttttgtacccagctgaatagagccctgacaggcatcgccgtggagcaggataagaacacacaggaggtgttcgcccaggtgaagcagatctacaagaccccacccatcaaggactttggcggcttcaacttcagccagatcctgcctgatccaagcaagccctccaagaggtcttttatcgaggacctgctgttcaacaaggtgaccctggccgatgccggcttcatcaagcagtatggagattgcctgggagacatcgcagcccgcgacctgatctgtgcccagaagtttaatggcctgaccgtgctgcctccactgctgacagatgagatgatcgcccagtacacatctgccctgctggccggcaccatcacaagcggatggaccttcggcgcaggagccgccctgcagatcccttttgccatgcagatggcctataggttcaacggcatcggcgtgacccagaatgtgctgtacgagaaccagcaactgatcgccaatcagtttaacagcgccatcggcaagatccaggactctctgtcctctacagccagcgccctgggcaagctgcaggatgtggtgaatcagaacgcccaggccctgaataccctggtgaagcagctgagctccaacttcggcgccatctctagcgtgctgaatgacatcctgagccggctggacccccctgaggcagaggtgcagatcgacaggctgatcacaggccgcctgcagagcctgcagacctacgtgacacagcagctgatcagggcagcagagatcagagcctccgccaatctggccgccaccaagatgagcgagtgcgtgctgggacagtccaagagggtggacttttgtggcaagggctatcacctgatgtctttcccacagagcgcccctcacggcgtggtgtttctgcacgtgacctacgtgccagcccaggagaagaacttcaccacagcaccagccatctgccacgatggaaaggcacactttcctagggagggcgtgttcgtgtctaacggcacccactggtttgtgacacagcgcaatttctacgagccacagatcatcaccacagacaatacattcgtgagcggcaactgtgatgtggtgatcggcatcgtgaacaataccgtgtatgatccactgcagcccgagctggactcctttaaggaggagctggataagtacttcaagaatcacacctctcccgacgtggatctgggcgacatctccggcatcaatgcctctgtggtgaacatccagaaggagatcgaccggctgaacgaggtggccaagaatctgaacgagagcctgatcgatctgcaggagctgggcaagtatgagcagtacatcaagggctctggcagagagaacctgtatttccagggaggaggaggcagcggatacatccctgaggcaccaagggacggacaggcctacgtgcgcaaggatggcgagtgggtgctgctgtccacctttctgggccatcatcaccaccaccaccaccactga

SEQ ID NO: 1289 - DNA, 3846 bp, Artificial Sequence
  Description of Artificial Sequence: Synthetic polynucleotide
atgggcatcctgccaagcccaggaatgcccgccctgctgtctctggtgagcctgctgtccgtgctgctgatgggatgcgtggcagagacaggcacacagtgcgtgaacctgaccacaaggacccagctgccccctgcctataccaattctttcacacggggcgtgtactatcccgacaaggtgtttagaagctccgtgctgcactccacacaggatctgtttctgcctttcttttctaacgtgacctggttccacgccatccacgtgtccggcaccaatggcacaaagcggttcgacaatcccgtgctgccttttaacgatggcgtgtacttcgccagcaccgagaagtccaacatcatcagaggctggatctttggcaccacactggactctaagacacagagcctgctgatcgtgaacaatgccaccaacgtggtgatcaaggtgtgcgagttccagttttgtaatgatccattcctgggcgtgtactatcacaagaacaataagtcctggatggagtctgagtttcgcgtgtattctagcgccaacaattgcacatttgagtacgtgagccagcccttccaaatggacctggagggcaagcagggcaatttcaagaacctgagggagttcgtgtttaagaatatcgatggctacttcaagatctacagcaagcacaccccaatcaacctggtgcgcgacctgccacagggattctccgccctggagccactggtggatctgcccatcggcatcaacatcacccggtttcagacactgctggccctgcacagatcctacctgacaccaggcgactcctctagcggatggaccgcaggagctgccgcctactatgtgggctatctgcagccccggaccttcctgctgaagtacaacgagaatggcaccatcacagacgcagtggattgcgccctggaccccctgtctgagacaaagtgtacactgaagagctttaccgtggagaagggcatctatcagacaagcaatttcagggtgcagcctaccgagtccatcgtgcgctttcccaatatcacaaacctgtgcccttttggcgaggtgttcaacgccaccagattcgccagcgtgtacgcctggaatcggaagagaatctccaactgcgtggccgactattctgtgctgtacaactccgcctctttcagcacctttaagtgctatggcgtgtctcccacaaagctgaatgatctgtgctttaccaacgtgtacgccgatagcttcgtgatcaggggagacgaagtgagacagatcgcaccaggacagacaggaaagatcgcagactacaattataagctgcctgacgatttcaccggctgcgtgatcgcctggaactccaacaatctggattctaaagtgggcggcaactacaattatctgtacaggctgtttcgcaagtccaatctgaagccattcgagcgggacatctccacagagatctaccaggccggctctaccccctgcaatggcgtggagggctttaactgttatttccctctgcagtcttacggcttccagccaacaaacggcgtgggctatcagccctacagagtggtggtgctgtcctttgagctgctgcacgcaccagcaacagtgtgcggcccaaagaagtctaccaatctggtgaagaacaagtgcgtgaacttcaacttcaacggactgaccggcacaggcgtgctgaccgagagcaataagaagttcctgccttttcagcagttcggcagggacatcgcagataccacagacgccgtgcgcgaccctcagaccctggagatcctggacatcacaccatgcagcttcggcggcgtgtccgtgatcacaccaggcaccaatacatccaaccaggtggccgtgctgtatcaggacgtgaattgtaccgaggtgcccgtggcaatccacgcagatcagctgacccctacatggcgggtgtactctaccggcagcaacgtgttccagacaagagccggatgcctgatcggagcagagcacgtgaacaatagctatgagtgcgacatccctatcggcgccggcatctgtgccagctaccagacccagacaaactccccatctggagcaggctccgtggccagccagtccatcatcgcctataccatgagcctgggcgccgagaacagcgtggcctactccaacaattctatcgccatccctaccaacttcacaatcagcgtgaccacagagatcctgccagtgtctatgaccaagacaagcgtggactgcacaatgtatatctgtggcgatagcaccgagtgctccaacctgctgctgcagtacggctccttttgtacccagctgaatagagccctgacaggcatcgccgtggagcaggataagaacacacaggaggtgttcgcccaggtgaagcagatctacaagaccccacccatcaaggactttggcggcttcaacttcagccagatcctgcctgatccaagcaagccctccaagaggtcttttatcgaggacctgctgttcaacaaggtgaccctggccgatgccggcttcatcaagcagtatggagattgcctgggagacatcgcagcccgcgacctgatctgtgcccagaagtttaatggcctgaccgtgctgcctccactgctgacagatgagatgatcgcccagtacacatctgccctgctggccggcaccatcacaagcggatggaccttcggcgcaggagccgccctgcagatcccttttgccatgcagatggcctataggttcaacggcatcggcgtgacccagaatgtgctgtacgagaaccagaagctgatcgccaatcagtttaacagcgccatcggcaagatccaggactctctgtcctctacagccagcgccctgggcaagctgcaggatgtggtgaatcagaacgcccaggccctgaataccctggtgaagcagctgagctccaacttcggcgccatctctagcgtgctgaatgacatcctgagccggctggacccccctgaggcagaggtgcagatcgacaggctgatcacaggccgcctgcagagcctgcagacctacgtgacacagcagctgatcagggcagcagagatcagagcctccgccaatctggccgccaccaagatgagcgagtgcgtgctgggacagtccaagagggtggacttttgtggcaagggctatcacctgatgtctttcccacagagcgcccctcacggcgtggtgtttctgcacgtgacctacgtgccagcccaggagaagaacttcaccacagcaccagccatctgccacgatggaaaggcacactttcctagggagggcgtgttcgtgtctaacggcacccactggtttgtgacacagcgcaatttctacgagccacagatcatcaccacagacaatacattcgtgagcggcaactgtgatgtggtgatcggcatcgtgaacaataccgtgtatgatccactgcagcccgagctggactcctttaaggaggagctggataagtacttcaagaatcacacctctcccgacgtggatctgggcgacatctccggcatcaatgcctctgtggtgaacatccagaaggagatcgaccggctgaacgaggtggccaagaatctgaacgagagcctgatcgatctgcaggagctgggcaagtatgagcagtacatcaagggctctggcagagagaacctgtatttccagggaggaggaggcagcggatacatccctgaggcaccaagggacggacaggcctacgtgcgcaaggatggcgagtgggtgctgctgtccacctttctgggccatcatcaccaccaccaccaccactga

SEQ ID NO: 1290 - DNA, 3846 bp, Artificial Sequence
  Description of Artificial Sequence: Synthetic polynucleotide
atgggcatcctgccaagcccaggaatgcccgccctgctgtctctggtgagcctgctgtccgtgctgctgatgggatgcgtggcagagacaggcacacagtgcgtgaacctgaccacaaggacccagctgccccctgcctataccaattctttcacacggggcgtgtactatcccgacaaggtgtttagaagctccgtgctgcactccacacaggatctgtttctgcctttcttttctaacgtgacctggttccacgccatccacgtgtccggcaccaatggcacaaagcggttcgacaatcccgtgctgccttttaacgatggcgtgtacttcgccagcaccgagaagtccaacatcatcagaggctggatctttggcaccacactggactctaagacacagagcctgctgatcgtgaacaatgccaccaacgtggtgatcaaggtgtgcgagttccagttttgtaatgatccattcctgggcgtgtactatcacaagaacaataagtcctggatggagtctgagtttcgcgtgtattctagcgccaacaattgcacatttgagtacgtgagccagcccttcctgatggacctggagggcaagcagggcaatttcaagaacctgagggagttcgtgtttaagaatatcgatggctacttcaagatctacagcaagcacaccccaatcaacctggtgcgcgacctgccacagggattctccgccctggagccactggtggatctgcccatcggcatcaacatcacccggtttcagacactgctggccctgcacagatcctacctgacaccaggcgactcctctagcggatggaccgcaggagctgccgcctactatgtgggctatctgcagccccggaccttcctgctgaagtacaacgagaatggcaccatcacagacgcagtggattgcgccctggaccccctgtctgagacaaagtgtacactgaagagctttaccgtggagaagggcatctatcagacaagcaatttcagggtgcagcctaccgagtccatcgtgcgctttcccaatatcacaaacctgtgcccttttggcgaggtgttcaacgccaccagattcgccagcgtgtacgcctggaatcggaagagaatctccaactgcgtggccgactattctgtgctgtacaactccgcctctttcagcacctttaagtgctatggcgtgtctcccacaaagctgaatgatctgtgctttaccaacgtgtacgccgatagcttcgtgatcaggggagacgaagtgagacagatcgcaccaggacagacaggaaagatcgcagactacaattataagctgcctgacgatttcaccggctgcgtgatcgcctggaactccaacaatctggattctaaagtgggcggcaactacaattatctgtacaggctgtttcgcaagtccaatctgaagccattcgagcgggacatctccacagagatctaccaggccggctctaccccctgcaatggcgtggagggctttaactgttatttccctctgcagtcttacggcttccagccaacaaacggcgtgggctatcagccctacagagtggtggtgctgtcctttgagctgctgcacgcaccagcaacagtgtgcggcccaaagaagtctaccaatctggtgaagaacaagtgcgtgaacttcaacttcaacggactgaccggcacaggcgtgctgaccgagagcaataagaagttcctgccttttcagcagttcggcagggacatcgcagataccacagacgccgtgcgcgaccctcagaccctggagatcctggacatcacaccatgcagcttcggcggcgtgtccgtgatcacaccaggcaccaatacatccaaccaggtggccgtgctgtatcaggacgtgaattgtaccgaggtgcccgtgactatccacgcagatcagctgacccctacatggcgggtgtactctaccggcagcaacgtgttccagacaagagccggatgcctgatcggagcagagcacgtgaacaatagctatgagtgcgacatccctatcggcgccggcatctgtgccagctaccagacccagacaaactccccatctggagcaggctccgtggccagccagtccatcatcgcctataccatgagcctgggcgccgagaacagcgtggcctactccaacaattctatcgccatccctaccaacttcacaatcagcgtgaccacagagatcctgccagtgtctatgaccaagacaagcgtggactgcacaatgtatatctgtggcgatagcaccgagtgctccaacctgctgctgcagtacggctccttttgtacccagctgaatagagccctgacaggcatcgccgtggagcaggataagaacacacaggaggtgttcgcccaggtgaagcagatctacaagaccccacccatcaaggactttggcggcttcaacttcagccagatcctgcctgatccaagcaagccctccaagaggtcttttatcgaggacctgctgttcaacaaggtgaccctggccgatgccggcttcatcaagcagtatggagattgcctgggagacatcgcagcccgcgacctgatctgtgcccagaagtttaatggcctgaccgtgctgcctccactgctgacagatgagatgatcgcccagtacacatctgccctgctggccggcaccatcacaagcggatggaccttcggcgcaggagccgccctgcagatcccttttgccatgcagatggcctataggttcaacggcatcggcgtgacccagaatgtgctgtacgagaaccagaagctgatcgccaatcagtttaacagcgccatcggcaagatccaggactctctgtcctctacagccagcgccctgggcaagctgcaggatgtggtgaatcagaacgcccaggccctgaataccctggtgaagcagctgagctccaacttcggcgccatctctagcgtgctgaatgacatcctgagccggctggacccccctgaggcagaggtgcagatcgacaggctgatcacaggccgcctgcagagcctgcagacctacgtgacacagcagctgatcagggcagcagagatcagagcctccgccaatctggccgccaccaagatgagcgagtgcgtgctgggacagtccaagagggtggacttttgtggcaagggctatcacctgatgtctttcccacagagcgcccctcacggcgtggtgtttctgcacgtgacctacgtgccagcccaggagaagaacttcaccacagcaccagccatctgccacgatggaaaggcacactttcctagggagggcgtgttcgtgtctaacggcacccactggtttgtgacacagcgcaatttctacgagccacagatcatcaccacagacaatacattcgtgagcggcaactgtgatgtggtgatcggcatcgtgaacaataccgtgtatgatccactgcagcccgagctggactcctttaaggaggagctggataagtacttcaagaatcacacctctcccgacgtggatctgggcgacatctccggcatcaatgcctctgtggtgaacatccagaaggagatcgaccggctgaacgaggtggccaagaatctgaacgagagcctgatcgatctgcaggagctgggcaagtatgagcagtacatcaagggctctggcagagagaacctgtatttccagggaggaggaggcagcggatacatccctgaggcaccaagggacggacaggcctacgtgcgcaaggatggcgagtgggtgctgctgtccacctttctgggccatcatcaccaccaccaccaccactga

SEQ ID NO: 1291 - DNA, 3846 bp, Artificial Sequence
  Description of Artificial Sequence: Synthetic polynucleotide
atgggcatcctgccaagcccaggaatgcccgccctgctgtctctggtgagcctgctgtccgtgctgctgatgggatgcgtggcagagacaggcacacagtgcgtgaacctgaccacaaggacccagctgccccctgcctataccaattctttcacacggggcgtgtactatcccgacaagatttttagaagcaatgtgctgcactccacacaggatctgtttctgcctttcttttctaacgtgacctggttccacgcccttcacgtgaaaggcaccaatggcacaaaggacttcgacaatcccgtgctgccttttaacgatggcgtgtacttcgccgcaatagagaagtccaacatcatcagaggctggatctttggcaccacactggactctaagacacagagcctgctgatcgtgaacaatgccaccaacgtggtgatccgagtgtgcgagttccagttttgtgaaaacccattcctgggcgtgtactatcacaagaacaataagtcctggcgtgaggaagagtggcgcgtgtattctagcgccaacaattgcacatttgagtacgtgagccagcccttcctgtacgacctgaatggcaagcagggcaatttccatcatctgagggagttcgtgtttaagaatatcgatggctacttcaagatctacagcaagtgggaaccaatcaacctggtgcgcgacctgccacagggattctccccgctggagccactgatggatctgcccatcggcatcaacatcacccattttcagacaattctgagtctgtcaagatcctaccgcacaccaggcgactcctctagcggatggaccgcaggagctgccgcctactatgtgggctatctgcagccccggaccttcctgctgaagtacgatgagaatggctatatcacagacgcagtggattgcagtctggaccccctgtctgagacaaagtgtaaactgaagagctttaccgtggagaagggcatctatcagacaagcaatttcagggtgcagcctacctatgaaatcgtgcgctttcccaatatcacaaacgaatgcccttttgatgaggtgttcaacgccaccagattcgccagcgtgtacaactggaatcggcaaagaatctccaactgcgtggccgactattctgtgctgtacaactccgcctctttcagcacctttcaatgctatggcgtgtctcccacaaagctgaatgatctgtgctttaccaacgtgtacgccgatattttcgtgatcaggggatcagaagtgagacagatcgcaccaggacagacaggacctatcgcagactacaattataagctgcctgacgatttcaccggctgcgtgatcgcctggaactccaacaatctggattctacggtgggcggcaactacaattatctgtacaggctgtttcgcaagtccaatatgaagccattcgagcgggacatctccacagaggcgtaccaggccggctgtaccccctgcaatggcgtggagggctttaactgttatttccctctgcagtcttacggcttccagccaacaaacggcgtgggctatcagccctacagagtggtggtgctgaaatttgagctgctgcacgcaccagcaacagtgtgcggcccaaaggatccgaccaatctggtgaagaacaagtgcgtggactacaacttcaacggacgcaccggcacaggcgtgctgaccgagagcaataagaagttcctgccttttcagcagttcggcagggacatctcagataatttagacgccgtgcgcgaccctactaccggtgagatcctgtgtatcacaccatgcagcttcggcggcgtgtccgtgatcacaccaggcaccaatacatccaaccaggtggccgtgctgtatcaggacgtgaattgtaccgaggtgcccgaagcaatccacagtaatcagctgaggcctacatggcgggtgtactctaccggcagcaacgtgttccagacaagagccggatgcctgatcggagcagagcacgtgaacaatagctatgagtgcgacatccctatcggcaacggcatctgtgccagctaccagacccagacaaactccccatctggaagtggctccgtgagtagccagtccatcatcgcctataccatgagcctgggcgccgagaaccctgtgccgtactccaacaataatatcgccatccctaccaacttcacaatcagcgtgcaaacagagatcctgccagtgtctatgccaaaggtaagcgtggactgcacaatgtatatctgtggcgatagcaccgagtgcctaaacctgctgaaacagtacggctccttttgttcacagctggaaagagccctgaatggcatcgcccgagagcaggataagaacctcttgaatgtgttcgcccaggtgaagcagatctacaagaccccacccatcaaggactttggcggcttcaacttcagccagatcctgcctgatccaagcaagccctccaagaggtcttttatcgaggacctgctgttcaacaaggtgaccctggccgatcttggcttcgttaagcagtataaagattgcctgggagatcaagcagcccgcgacctgatctgtgcccagaagtttaatggcattatggtgctgcctccactgctgacagatgagatgatcgcccagtacacagcgtcgctgctggccggcaccatcacagctggatggaccttcggcgcaggagccgccctggttatcccttttgccatgcagatggcctataggttcaacggcatcggcgtgcaacagaatgtgctgtacgagaaccagaagataatcgccaatcagtttaacaacgccatcggcaacatccaggacggactgtccactacagccagcgccctgagtaagctgcaggatgtggtgaatcagcaagcccaggccctgaatgaactggtgaagcagctgagctccaacttcggcgccatctctagcgtgataaatgacatctataatcggctggacaaacctgaggcacaagctcagatcgacaggctgatcacaggccgcctgcagagcctgcagacctacgtgacacagcagctgatcagggcaacggagatcagagcctccgcccaactggccgccgaaaagatgagcgagtgcgtgaaaggacagtccaataggtatgggttttgtggcaacggctatcacctgatgtctttcccacagagcgcccctcacggcgtggtgtttctgcacgtgacctacgtgccaactcagtttaagaacttcaccacagcaccaggtatctgccacgatggaaaggcatattttcctagggagggcgtgttcgtgtctaacggcaccgaatggtacataacacagcgcaatttctacgagccacgtccgatcaccacagacaatacattcgtgagcggcaactgtgatgtggtgatcggcatcgtgaacaataccgtgtatgatccactgcagcccgagctggactcctttaaggaggagctggataagtacttcaagaatcacacctctcccgacgtggatctgggcgacatctccggcatcaatgcctctgtggtgaacatccagaaggagatcgaccggctgaacgaggtggccaagaatctgaacgagagcctgatcgatctgcaggagctgggcaagtatgagcagtacatcaagggctctggcagagagaacctgtatttccagggaggaggaggcagcggatacatccctgaggcaccaagggacggacaggcctacgtgcgcaaggatggcgagtgggtgctgctgtccacctttctgggccatcatcaccaccaccaccaccactga

SEQ ID NO: 1292 - DNA, 3846 bp, Artificial Sequence
  Description of Artificial Sequence: Synthetic polynucleotide
atgggcatcctgccaagcccaggaatgcccgccctgctgtctctggtgagcctgctgtccgtgctgctgatgggatgcgtggcagagacaggcacacagtgcgtgaacctgaccacaaggacccagctgccccctgcctataccaattctttcacacggggcgtgtactatcccgacaaggtgtttagaagctccgtgctgcactccacacaggatctgtttctgcctttcttttctaacgtgacctggttccacgccatccacgtgtccggcaccaatggcacaaagcggttcgacaatcccgtgctgccttttaacgatggcgtgtacttcgccagcaccgagaagtccaacatcatcagaggctggatctttggcaccacactggactctaagacacagagcctgctgatcgtgaacaatgccaccaacgtggtgatcaaggtgtgcgagttccagttttgtaatgatccattcctgggcgtgtactatcacaagaacaataagtcctggatggagtctgagtttcgcgtgtattctagcgccaacaattgcacatttgagtacgtgagccaggcattcctgatggacctggagggcaagcagggcaatttcaagaacctgagggagttcgtgtttaagaatatcgatggctacttcaagatctacagcaagcacaccccaatcaacctggtgcgcgacctgccacagggattctccgccctggagccactggtggatctgcccatcggcatcaacatcacccggtttcagacactgctggccctgcacagatcctacctgacaccaggcgactcctctagcggatggaccgcaggagctgccgcctactatgtgggctatctgcagccccggaccttcctgctgaagtacaacgagaatggcaccatcacagacgcagtggattgcgccctggaccccctgtctgagacaaagtgtacactgaagagctttaccgtggagaagggcatctatcagacaagcaatttcagggtgcagcctaccgagtccatcgtgcgctttcccaatatcacaaacctgtgcccttttggcgaggtgttcaacgccaccagattcgccagcgtgtacgcctggaatcggaagagaatctccaactgcgtggccgactattctgtgctgtacaactccgcctctttcagcacctttaagtgctatggcgtgtctcccacaaagctgaatgatctgtgctttaccaacgtgtacgccgatagcttcgtgatcaggggagacgaagtgagacagatcgcaccaggacagacaggaaagatcgcagactacaattataagctgcctgacgatttcaccggctgcgtgatcgcctggaactccaacaatctggattctaaagtgggcggcaactacaattatctgtacaggctgtttcgcaagtccaatctgaagccattcgagcgggacatctccacagagatctaccaggccggctctaccccctgcaatggcgtggagggctttaactgttatttccctctgcagtcttacggcttccagccaacaaacggcgtgggctatcagccctacagagtggtggtgctgtcctttgagctgctgcacgcaccagcaacagtgtgcggcccaaagaagtctaccaatctggtgaagaacaagtgcgtgaacttcaacttcaacggactgaccggcacaggcgtgctgaccgagagcaataagaagttcctgccttttcagcagttcggcagggacatcgcagataccacagacgccgtgcgcgaccctcagaccctggagatcctggacatcacaccatgcagcttcggcggcgtgtccgtgatcacaccaggcaccaatacatccaaccaggtggccgtgctgtatcaggacgtgaattgtaccgaggtgcccgtggcaatccacgcagatcagctgacccctacatggcgggtgtactctaccggcagcaacgtgttccagacaagagccggatgcctgatcggagcagagcacgtgaacaatagctatgagtgcgacatccctatcggcgccggcatctgtgccagctaccagacccagacaaactccccatctggagcaggctccgtggccagccagtccatcatcgcctataccatgagcctgggcgccgagaacagcgtggcctactccaacaattctatcgccatccctaccaacttcacaatcagcgtgaccacagagatcctgccagtgtctatgaccaagacaagcgtggactgcacaatgtatatctgtggcgatagcaccgagtgctccaacctgctgctgcagtacggctccttttgtacccagctgaatagagccctgacaggcatcgccgtggagcaggataagaacacacaggaggtgttcgcccaggtgaagcagatctacaagaccccacccatcaaggactttggcggcttcaacttcagccagatcctgcctgatccaagcaagccctccaagaggtcttttatcgaggacctgctgttcaacaaggtgaccctggccgatgccggcttcatcaagcagtatggagattgcctgggagacatcgcagcccgcgacctgatctgtgcccagaagtttaatggcctgaccgtgctgcctccactgctgacagatgagatgatcgcccagtacacatctgccctgctggccggcaccatcacaagcggatggaccttcggcgcaggagccgccctgcagatcccttttgccatgcagatggcctataggttcaacggcatcggcgtgacccagaatgtgctgtacgagaaccagaagctgatcgccaatcagtttaacagcgccatcggcaagatccaggactctctgtcctctacagccagcgccctgggcaagctgcaggatgtggtgaatcagaacgcccaggccctgaataccctggtgaagcagctgagctccaacttcggcgccatctctagcgtgctgaatgacatcctgagccggctggacccccctgaggcagaggtgcagatcgacaggctgatcacaggccgcctgcagagcctgcagacctacgtgacacagcagctgatcagggcagcagagatcagagcctccgccaatctggccgccaccaagatgagcgagtgcgtgctgggacagtccaagagggtggacttttgtggcaagggctatcacctgatgtctttcccacagagcgcccctcacggcgtggtgtttctgcacgtgacctacgtgccagcccaggagaagaacttcaccacagcaccagccatctgccacgatggaaaggcacactttcctagggagggcgtgttcgtgtctaacggcacccactggtttgtgacacagcgcaatttctacgagccacagatcatcaccacagacaatacattcgtgagcggcaactgtgatgtggtgatcggcatcgtgaacaataccgtgtatgatccactgcagcccgagctggactcctttaaggaggagctggataagtacttcaagaatcacacctctcccgacgtggatctgggcgacatctccggcatcaatgcctctgtggtgaacatccagaaggagatcgaccggctgaacgaggtggccaagaatctgaacgagagcctgatcgatctgcaggagctgggcaagtatgagcagtacatcaagggctctggcagagagaacctgtatttccagggaggaggaggcagcggatacatccctgaggcaccaagggacggacaggcctacgtgcgcaaggatggcgagtgggtgctgctgtccacctttctgggccatcatcaccaccaccaccaccactga

SEQ ID NO: 1293 - DNA, 3846 bp, Artificial Sequence
  Description of Artificial Sequence: Synthetic polynucleotide
atgggcatcctgccaagcccaggaatgcccgccctgctgtctctggtgagcctgctgtccgtgctgctgatgggatgcgtggcagagacaggcacacagtgcgtgaacctgaccacaaggacccagctgccccctgcctataccaattctttcacacggggcgtgtactatcccgacaaggtgtttagaagctccgtgctgcactccacacaggatctgtttctgcctttcttttctaacgtgacctggttccacgccatccacgtgtccggcaccaatggcacaaagcggttcgacaatcccgtgctgccttttaacgatggcgtgtacttcgccagcaccgagaagtccaacatcatcagaggctggatctttggcaccacactggactctaagacacagagcctgctgatcgtgaacaatgccaccaacgtggtgatcaaggtgtgcgagttccagttttgtaatgatccattcctgggcgtgtactatcacaagaacaataagtcctggatggagtctgagtttcgcgtgtattctagcgccaacaattgcacatttgagtacgtgagccagcccttcctgatggacctggagggcaagcagggcaatttcaagaacctgagggagttcgtgtttaagaatatcgatggctacttcaagatctacagcaagcacaccccaatcaacctggtgcgcgacctgccacagggattctccgccctggagccaacggtggatctgcccatcggcatcaacatcacccggtttcagacactgctggccctgcacagatcctacctgacaccaggcgactcctctagcggatggaccgcaggagctgccgcctactatgtgggctatctgcagccccggaccttcctgctgaagtacaacgagaatggcaccatcacagacgcagtggattgcgccctggaccccctgtctgagacaaagtgtacactgaagagctttaccgtggagaagggcatctatcagacaagcaatttcagggtgcagcctaccgagtccatcgtgcgctttcccaatatcacaaacctgtgcccttttggcgaggtgttcaacgccaccagattcgccagcgtgtacgcctggaatcggaagagaatctccaactgcgtggccgactattctgtgctgtacaactccgcctctttcagcacctttaagtgctatggcgtgtctcccacaaagctgaatgatctgtgctttaccaacgtgtacgccgatagcttcgtgatcaggggagacgaagtgagacagatcgcaccaggacagacaggaaagatcgcagactacaattataagctgcctgacgatttcaccggctgcgtgatcgcctggaactccaacaatctggattctaaagtgggcggcaactacaattatctgtacaggctgtttcgcaagtccaatctgaagccattcgagcgggacatctccacagagatctaccaggccggctctaccccctgcaatggcgtggagggctttaactgttatttccctctgcagtcttacggcttccagccaacaaacggcgtgggctatcagccctacagagtggtggtgctgtcctttgagctgctgcacgcaccagcaacagtgtgcggcccaaagaagtctaccaatctggtgaagaacaagtgcgtgaacttcaacttcaacggactgaccggcacaggcgtgctgaccgagagcaataagaagttcctgccttttcagcagttcggcagggacatcgcagataccacagacgccgtgcgcgaccctcagaccctggagatcctggacatcacaccatgcagcttcggcggcgtgtccgtgatcacaccaggcaccaatacatccaaccaggtggccgtgctgtatcaggacgtgaattgtaccgaggtgcccgtggcaatccacgcagatcagctgacccctacatggcgggtgtactctaccggcagcaacgtgttccagacaagagccggatgcctgatcggagcagagcacgtgaacaatagctatgagtgcgacatccctatcggcgccggcatctgtgccagctaccagacccagacaaactccccatctggagcaggctccgtggccagccagtccatcatcgcctataccatgagcctgggcgccgagaacagcgtggcctactccaacaattctatcgccatccctaccaacttcacaatcagcgtgaccacagagatcctgccagtgtctatgaccaagacaagcgtggactgcacaatgtatatctgtggcgatagcaccgagtgctccaacctgctgctgcagtacggctccttttgtacccagctgaatagagccctgacaggcatcgccgtggagcaggataagaacacacaggaggtgttcgcccaggtgaagcagatctacaagaccccacccatcaaggactttggcggcttcaacttcagccagatcctgcctgatccaagcaagccctccaagaggtcttttatcgaggacctgctgttcaacaaggtgaccctggccgatgccggcttcatcaagcagtatggagattgcctgggagacatcgcagcccgcgacctgatctgtgcccagaagtttaatggcctgaccgtgctgcctccactgctgacagatgagatgatcgcccagtacacatctgccctgctggccggcaccatcacaagcggatggaccttcggcgcaggagccgccctgcagatcccttttgccatgcagatggcctataggttcaacggcatcggcgtgacccagaatgtgctgtacgagaaccagaagctgatcgccaatcagtttaacagcgccatcggcaagatccaggactctctgtcctctacagccagcgccctgggcaagctgcaggatgtggtgaatcagaacgcccaggccctgaataccctggtgaagcagctgagctccaacttcggcgccatctctagcgtgctgaatgacatcctgagccggctggacccccctgaggcagaggtgcagatcgacaggctgatcacaggccgcctgcagagcctgcagacctacgtgacacagcagctgatcagggcagcagagatcagagcctccgccaatctggccgccaccaagatgagcgagtgcgtgctgggacagtccaagagggtggacttttgtggcaagggctatcacctgatgtctttcccacagagcgcccctcacggcgtggtgtttctgcacgtgacctacgtgccagcccaggagaagaacttcaccacagcaccagccatctgccacgatggaaaggcacactttcctagggagggcgtgttcgtgtctaacggcacccactggtttgtgacacagcgcaatttctacgagccacagatcatcaccacagacaatacattcgtgagcggcaactgtgatgtggtgatcggcatcgtgaacaataccgtgtatgatccactgcagcccgagctggactcctttaaggaggagctggataagtacttcaagaatcacacctctcccgacgtggatctgggcgacatctccggcatcaatgcctctgtggtgaacatccagaaggagatcgaccggctgaacgaggtggccaagaatctgaacgagagcctgatcgatctgcaggagctgggcaagtatgagcagtacatcaagggctctggcagagagaacctgtatttccagggaggaggaggcagcggatacatccctgaggcaccaagggacggacaggcctacgtgcgcaaggatggcgagtgggtgctgctgtccacctttctgggccatcatcaccaccaccaccaccactga

SEQ ID NO: 1294 - DNA, 3846 bp, Artificial Sequence
  Description of Artificial Sequence: Synthetic polynucleotide
atgggcatcctgccaagcccaggaatgcccgccctgctgtctctggtgagcctgctgtccgtgctgctgatgggatgcgtggcagagacaggcacacagtgcgtgaacctgaccacaaggacccagctgccccctgcctataccaattctttcacacggggcgtgtactatcccgacaaggtgtttagaagctccgtgctgcactccacacaggatctgtttctgcctttcttttctaacgtgacctggttccacgccatccacgtgtccggcaccaatggcacaaagcggttcgacaatcccgtgctgccttttaacgatggcgtgtacttcgccagcaccgagaagtccaacatcatcagaggctggatctttggcaccacactggactctaagacacagagcctgctgatcgtgaacaatgccaccaacgtggtgatcaaggtgtgcgagttccagttttgtaatgatccattcctgggcgtgtactatcacaagaacaataagtcctggatggagtctgagtttcgcgtgtattctagcgccaacaattgcacatttgagtacgtgagccagcccttcctgatggacctggagggcaagcagggcaatttcaagaacctgagggagttcgtgtttaagaatatcgatggctacttcaagatctacagcaagcacaccccaatcaacctggtgcgcgacctgccacagggattctccgccctggagccactggtggatctgcccatcggcatcaacatcacccggtttcagacactgctggccctgcacagatcctacctgacaccaggcgactcctctagcggatggaccgcaggagctgccgcctactatgtgggctatctgcagccccggaccttcctgctgaagtacaacgagaatggcaccatcacagacgcagtggattgcgccctggaccccctgtctgagacaaagtgtacactgaagagctttaccgtggagaagggcatctatcagacaagcaatttcagggtgcagcctaccgagtccatcgtgcgctttcccaatatcacaaacctgtgcccttttggcgaggtgttcaacgccaccagattcgccagcgtgtacgcctggaatcggaagagaatctccaactgcgtggccgactattctgtgctgtacaactccgcctctttcagcacctttaagtgctatggcgtgtctcccacaaagctgaatgatctgtgctttaccaacgtgtacgccgatagcttcgtgatcaggggagacgaagtgagacagatcgcaccaggacagacaggaaagatcgcagactacaattataagctgcctgacgatttcaccggctgcgtgatcgcctggaactccaacaatctggattctaaagtgggcggcaactacaattatctgtacaggctgtttcgcaagtccaatctgaagccattcgagcgggacatctccacagagatctaccaggccggctctaccccctgcaatggcgtggagggctttaactgttatttccctctgcagtcttacggcttccagccaacaaacggcgtgggctatcagccctacagagtggtggtgctgtcctttgagctgctgcacgcaccagcaacagtgtgcggcccaaagaagtctaccaatctggtgaagaacaagtgcgtgaacttcaacttcaacggactgaccggcacaggcgtgctgaccgagagcaataagaagttcctgccttttcagcagttcggcagggacatcgcagataccacagacgccgtgcgcgaccctcagaccctggagatcctggacatcacaccatgcagcttcggcggcgtgtccgtgatcacaccaggcaccaatacatccaaccaggtggccgtgctgtatcaggacgtgaattgtaccgaggtgcccgtggcaatccacgcagatcagctgacccctacatggcgggtgtactctaccggcagcaacgtgttccagacaagagccggatgcctgatcggagcagagcacgtgaacaatagctatgagtgcgacatccctatcggcgccggcatctgtgccagctaccagacccagacaaactccccatctggagcaggctccgtggccagccagtccatcatcgcctataccatgagcctgggcgccgagaacagcgtggcctactccaacaattctatcgccatccctaccaacttcacaatcagcgtgaccacagagatcctgccagtgtctatgaccaagacaagcgtggactgcacaatgtatatctgtggcgatagcaccgagtgctccaacctgctgctgcagtacggctccttttgtacccagctgaatagagccctgacaggcatcgccgtggagcaggataagaacacacaggaggtgttcgcccaggtgaagcagatctacaagaccccacccatcaaggactttggcggcttcaacttcagccagatcctgcctgatccaagcaagccctccaagaggtcttttatcgaggacctgctgttcaacaaggtgaccctggccgatgccggcttcatcaagcagtatggagattgcctgggagacatcgcagcccgcgacctgatctgtgcccagaagtttaatggcctgaccgtgctgcctccactgctgacagatgagatgatcgcccagtacacatctgccctgctggccggcaccatcacaagcggatggaccttcggcgcaggagccgccctgcagatcccttttgccatgcagatggcctataggttcaacggcatcggcgtgacccagaatgtgctgtacgagaaccagaagctgatcgccaatcagtttaacagcgccatcggcaagatccaggactctctgtcctctacagccagcgccctgggcaagctgcaggatgtggtgaatcagaacgcccaggccctgattaccctggtgaagcagctgagctccaacttcggcgccatctctagcgtgctgaatgacatcctgagccggctggacccccctgaggcagaggtgcagatcgacaggctgatcacaggccgcctgcagagcctgcagacctacgtgacacagcagctgatcagggcagcagagatcagagcctccgccaatctggccgccaccaagatgagcgagtgcgtgctgggacagtccaagagggtggacttttgtggcaagggctatcacctgatgtctttcccacagagcgcccctcacggcgtggtgtttctgcacgtgacctacgtgccagcccaggagaagaacttcaccacagcaccagccatctgccacgatggaaaggcacactttcctagggagggcgtgttcgtgtctaacggcacccactggtttgtgacacagcgcaatttctacgagccacagatcatcaccacagacaatacattcgtgagcggcaactgtgatgtggtgatcggcatcgtgaacaataccgtgtatgatccactgcagcccgagctggactcctttaaggaggagctggataagtacttcaagaatcacacctctcccgacgtggatctgggcgacatctccggcatcaatgcctctgtggtgaacatccagaaggagatcgaccggctgaacgaggtggccaagaatctgaacgagagcctgatcgatctgcaggagctgggcaagtatgagcagtacatcaagggctctggcagagagaacctgtatttccagggaggaggaggcagcggatacatccctgaggcaccaagggacggacaggcctacgtgcgcaaggatggcgagtgggtgctgctgtccacctttctgggccatcatcaccaccaccaccaccactga

SEQ ID NO: 1295 - DNA, 3846 bp, Artificial Sequence
  Description of Artificial Sequence: Synthetic polynucleotide
atgggcatcctgccaagcccaggaatgcccgccctgctgtctctggtgagcctgctgtccgtgctgctgatgggatgcgtggcagagacaggcacacagtgcgtgaacctgaccacaaggacccagctgccccctgcctataccaattctttcacacggggcgtgtactatcccgacaaggtgtttagaagctccgtgctgcactccacacaggatctgtttctgcctttcttttctaacgtgacctggttccacgccatccacgtgtccggcaccaatggcacaaagcggttcgacaatcccgtgctgccttttaacgatggcgtgtacttcgccagcaccgagaagtccaacatcatcagaggctggatctttggcaccacactggactctaagacacagagcctgctgatcgtgaacaatgccaccaacgtggtgatcaaggtgtgcgagttccagttttgtaatgatccattcctgggcgtgtactatcacaagaacaataagtcctggatggagtctgagtttcgcgtgtattctagcgccaacaattgcacatttgagtacgtgagccagcccttcctgatggacctggagggcaagcagggcaatttcaagaacctgagggagttcgtgtttaagaatatcgatggctacttcaagatctacagcaagcacaccccaatcaacctggtgcgcgacctgccacagggattctccgccctggagccactggtggatctgcccatcggcatcaacatcacccggtttcagacactgctggccctgcacagatcctacctgacaccaggcgactcctctagcggatggaccgcaggagctgccgcctactatgtgggctatctgcagccccggaccttcctgctgaagtacaacgagaatggcaccatcacagacgcagtggattgcgccctggaccccctgtctgagacaaagtgtacactgaagagctttaccgtggagaagggcatctatcagacaagcaatttcagggtgcagcctaccgagtccatcgtgcgctttcccaatatcacaaacctgtgcccttttggcgaggtgttcaacgccaccagattcgccagcgtgtacgcctggaatcggaagagaatctccaactgcgtggccgactattctgtgctgtacaactccgcctctttcagcacctttaagtgctatggcgtgtctcccacaaagctgaatgatctgtgctttaccaacgtgtacgccgatagcttcgtgatcaggggagacgaagtgagacagatcgcaccaggacagacaggaaagatcgcagactacaattataagctgcctgacgatttcaccggctgcgtgatcgcctggaactccaacaatctggattctaaagtgggcggcaactacaattatctgtacaggctgtttcgcaagtccaatctgaagccattcgagcgggacatctccacagagatctaccaggccggctctaccccctgcaatggcgtggagggctttaactgttatttccctctgcagtcttacggcttccagccaacaaacggcgtgggctatcagccctacagagtggtggtgctgtcctttgagctgctgcacgcaccagcaacagtgtgcggcccaaagaagtctaccaatctggtgaagaacaagtgcgtgaacttcaacttcaacggactgaccggcacaggcgtgctgaccgagagcaataagaagttcctgccttttcagcagttcggcagggacatcgcagataccacagacgccgtgcgcgaccctcagaccctggagatcctggacatcacaccatgcagcttcggcggcgtgtccgtgatcacaccaggcaccaatacatccaaccaggtggccgtgctgtatcaggacgtgaattgtaccgaggtgcccgtggcaatccacgcagatcagctgacccctacatggcgggtgtactctaccggcagcaacgtgttccagacaagagccggatgcctgatcggagcagagcacgtgaacaatagctatgagtgcgacatccctatcggcgccggcatctgtgccagctaccagacccagacaaactccccatctggagcaggctccgtggccagccagtccatcatcgcctataccatgagcctgggcgccgagaacagcgtggcctactccaacaattctatcgccatccctaccaacttcacaatcagcgtgaccacagagatcctgccagtgtctatgaccaagacaagcgtggactgcacaatgtatatctgtggcgatagcaccgagtgctccaacctgctgctgcagtacggctccttttgtacccagctgaatagagccctgacaggcatcgccgtggagcaggataagaacacacaggaggtgttcgcccaggtgaagcagatctacaagaccccacccatcaaggactttggcggcttcaacttcagccagatcctgcctgatccaagcaagccctccaagaggtcttttatcgaggacctgctgttcaacaaggtgaccctggccgatgccggcttcatcaagcagtatggagattgcctgggagacatcgcagcccgcgacctgatctgtgcccagaagtttaatggcctgaccgtgctgcctccactgctgacagatgagatgatcgcccagtacacatctgccctgctggccggcaccatcacaagcggatggaccttcggcgcaggagccgccctgcagatcccttttgccatgcagatggcctataggttcaacggcatcggcgtgacccagaatgtgctgtacgagaaccagaagctgatcgccaatcagtttaacagcgccatcggcaagatccaggactctctgtcctctacagccagcgccctgagtaagctgcaggatgtggtgaatcagaacgcccaggccctgaataccctggtgaagcagctgagctccaacttcggcgccatctctagcgtgctgaatgacatcctgagccggctggacccccctgaggcagaggtgcagatcgacaggctgatcacaggccgcctgcagagcctgcagacctacgtgacacagcagctgatcagggcagcagagatcagagcctccgccaatctggccgccaccaagatgagcgagtgcgtgctgggacagtccaagagggtggacttttgtggcaagggctatcacctgatgtctttcccacagagcgcccctcacggcgtggtgtttctgcacgtgacctacgtgccagcccaggagaagaacttcaccacagcaccagccatctgccacgatggaaaggcacactttcctagggagggcgtgttcgtgtctaacggcacccactggtttgtgacacagcgcaatttctacgagccacagatcatcaccacagacaatacattcgtgagcggcaactgtgatgtggtgatcggcatcgtgaacaataccgtgtatgatccactgcagcccgagctggactcctttaaggaggagctggataagtacttcaagaatcacacctctcccgacgtggatctgggcgacatctccggcatcaatgcctctgtggtgaacatccagaaggagatcgaccggctgaacgaggtggccaagaatctgaacgagagcctgatcgatctgcaggagctgggcaagtatgagcagtacatcaagggctctggcagagagaacctgtatttccagggaggaggaggcagcggatacatccctgaggcaccaagggacggacaggcctacgtgcgcaaggatggcgagtgggtgctgctgtccacctttctgggccatcatcaccaccaccaccaccactga

SEQ ID NO: 1296 - DNA, 3846 bp, Artificial Sequence
  Description of Artificial Sequence: Synthetic polynucleotide
atgggcatcctgccaagcccaggaatgcccgccctgctgtctctggtgagcctgctgtccgtgctgctgatgggatgcgtggcagagacaggcacacagtgcgtgaacctgaccacaaggacccagctgccccctgcctataccaattctttcacacggggcgtgtactatcccgacaaggtgtttagaagctccgtgctgcactccacacaggatctgtttctgcctttcttttctaacgtgacctggttccacgccatccacgtgtccggcaccaatggcacaaagcggttcgacaatcccgtgctgccttttaacgatggcgtgtacttcgccagcaccgagaagtccaacatcatcagaggctggatctttggcaccacactggactctaagacacagagcctgctgatcgtgaacaatgccaccaacgtggtgatcaaggtgtgcgagttccagttttgtaatgatccattcctgggcgtgtactatcacaagaacaataagtcctggatggagtttgagtttcgcgtgtattctagcgccaacaattgcacatttgagtacgtgagccagcccttcctgatggacctggagggcaagcagggcaatttcaagaacctgagggagttcgtgtttaagaatatcgatggctacttcaagatctacagcaagcacaccccaatcaacctggtgcgcgacctgccacagggattctccgccctggagccactggtggatctgcccatcggcatcaacatcacccggtttcagacactgctggccctgcacagatcctacctgacaccaggcgactcctctagcggatggaccgcaggagctgccgcctactatgtgggctatctgcagccccggaccttcctgctgaagtacaacgagaatggcaccatcacagacgcagtggattgcgccctggaccccctgtctgagacaaagtgtacactgaagagctttaccgtggagaagggcatctatcagacaagcaatttcagggtgcagcctaccgagtccatcgtgcgctttcccaatatcacaaacctgtgcccttttggcgaggtgttcaacgccaccagattcgccagcgtgtacgcctggaatcggaagagaatctccaactgcgtggccgactattctgtgctgtacaactccgcctctttcagcacctttaagtgctatggcgtgtctcccacaaagctgaatgatctgtgctttaccaacgtgtacgccgatagcttcgtgatcaggggagacgaagtgagacagatcgcaccaggacagacaggaaagatcgcagactacaattataagctgcctgacgatttcaccggctgcgtgatcgcctggaactccaacaatctggattctaaagtgggcggcaactacaattatctgtacaggctgtttcgcaagtccaatctgaagccattcgagcgggacatctccacagagatctaccaggccggctctaccccctgcaatggcgtggagggctttaactgttatttccctctgcagtcttacggcttccagccaacaaacggcgtgggctatcagccctacagagtggtggtgctgtcctttgagctgctgcacgcaccagcaacagtgtgcggcccaaagaagtctaccaatctggtgaagaacaagtgcgtgaacttcaacttcaacggactgaccggcacaggcgtgctgaccgagagcaataagaagttcctgccttttcagcagttcggcagggacatcgcagataccacagacgccgtgcgcgaccctcagaccctggagatcctggacatcacaccatgcagcttcggcggcgtgtccgtgatcacaccaggcaccaatacatccaaccaggtggccgtgctgtatcaggacgtgaattgtaccgaggtgcccgtggcaatccacgcagatcagctgacccctacatggcgggtgtactctaccggcagcaacgtgttccagacaagagccggatgcctgatcggagcagagcacgtgaacaatagctatgagtgcgacatccctatcggcgccggcatctgtgccagctaccagacccagacaaactccccatctggagcaggctccgtggccagccagtccatcatcgcctataccatgagcctgggcgccgagaacagcgtggcctactccaacaattctatcgccatccctaccaacttcacaatcagcgtgaccacagagatcctgccagtgtctatgaccaagacaagcgtggactgcacaatgtatatctgtggcgatagcaccgagtgctccaacctgctgctgcagtacggctccttttgtacccagctgaatagagccctgacaggcatcgccgtggagcaggataagaacacacaggaggtgttcgcccaggtgaagcagatctacaagaccccacccatcaaggactttggcggcttcaacttcagccagatcctgcctgatccaagcaagccctccaagaggtcttttatcgaggacctgctgttcaacaaggtgaccctggccgatgccggcttcatcaagcagtatggagattgcctgggagacatcgcagcccgcgacctgatctgtgcccagaagtttaatggcctgaccgtgctgcctccactgctgacagatgagatgatcgcccagtacacatctgccctgctggccggcaccatcacaagcggatggaccttcggcgcaggagccgccctgcagatcccttttgccatgcagatggcctataggttcaacggcatcggcgtgacccagaatgtgctgtacgagaaccagaagctgatcgccaatcagtttaacagcgccatcggcaagatccaggactctctgtcctctacagccagcgccctgggcaagctgcaggatgtggtgaatcagaacgcccaggccctgaataccctggtgaagcagctgagctccaacttcggcgccatctctagcgtgctgaatgacatcctgagccggctggacccccctgaggcagaggtgcagatcgacaggctgatcacaggccgcctgcagagcctgcagacctacgtgacacagcagctgatcagggcagcagagatcagagcctccgccaatctggccgccaccaagatgagcgagtgcgtgctgggacagtccaagagggtggacttttgtggcaagggctatcacctgatgtctttcccacagagcgcccctcacggcgtggtgtttctgcacgtgacctacgtgccagcccaggagaagaacttcaccacagcaccagccatctgccacgatggaaaggcacactttcctagggagggcgtgttcgtgtctaacggcacccactggtttgtgacacagcgcaatttctacgagccacagatcatcaccacagacaatacattcgtgagcggcaactgtgatgtggtgatcggcatcgtgaacaataccgtgtatgatccactgcagcccgagctggactcctttaaggaggagctggataagtacttcaagaatcacacctctcccgacgtggatctgggcgacatctccggcatcaatgcctctgtggtgaacatccagaaggagatcgaccggctgaacgaggtggccaagaatctgaacgagagcctgatcgatctgcaggagctgggcaagtatgagcagtacatcaagggctctggcagagagaacctgtatttccagggaggaggaggcagcggatacatccctgaggcaccaagggacggacaggcctacgtgcgcaaggatggcgagtgggtgctgctgtccacctttctgggccatcatcaccaccaccaccaccactga

SEQ ID NO: 1297 - DNA, 3846 bp, Artificial Sequence
  Description of Artificial Sequence: Synthetic polynucleotide
atgggcatcctgccaagcccaggaatgcccgccctgctgtctctggtgagcctgctgtccgtgctgctgatgggatgcgtggcagagacaggcacacagtgcgtgaacctgaccacaaggacccagctgccccctgcctataccaattctttcacacggggcgtgtactatcccgacaaggtgtttagaagctccgtgctgcactccacacaggatctgtttctgcctttcttttctaacgtgacctggttccacgccatccacgtgtccggcaccaatggcacaaagcggttcgacaatcccgtgctgccttttaacgatggcgtgtacttcgccagcaccgagaagtccaacatcatcagaggctggatctttggcaccacactggactctaagacacagagcctgctgatcgtgaacaatgccaccaacgtggtgatcaaggtgtgcgagttccagttttgtaatgatccattcctgggcgtgtactatcacaagaacaataagtcctggatggagtctgagtttcgcgtgtattctagcgccaacaattgcacatttgagtacgtgagccagcccttcctgatggacctggagggcaagcagggcaatttcaagaacctgagggagttcgtgtttaagaatatcgatggctacttcaagatctacagcaagcacaccccaatcaacctggtgcgcgacctgccacagggattctccgccctggagccactggtggatctgcccatcggcatcaacatcacccggtttcagacactgctggccctgcacagatcctacctgacaccaggcgactcctctagcggatggaccgcaggagctgccgcctactatgtgggctatctgcagccccggaccttcctgctgaagtacaacgagaatggcaccatcacagacgcagtggattgcagttatgaccccctgtctgagacaaagtgtacactgaagagctttaccgtggagaagggcatctatcagacaagcaatttcagggtgcagcctaccgagtccatcgtgcgctttcccaatatcacaaacctgtgcccttttggcgaggtgttcaacgccaccagattcgccagcgtgtacgcctggaatcggaagagaatctccaactgcgtggccgactattctgtgctgtacaactccgcctctttcagcacctttaagtgctatggcgtgtctcccacaaagctgaatgatctgtgctttaccaacgtgtacgccgatagcttcgtgatcaggggagacgaagtgagacagatcgcaccaggacagacaggaaagatcgcagactacaattataagctgcctgacgatttcaccggctgcgtgatcgcctggaactccaacaatctggattctaaagtgggcggcaactacaattatctgtacaggctgtttcgcaagtccaatctgaagccattcgagcgggacatctccacagagatctaccaggccggctctaccccctgcaatggcgtggagggctttaactgttatttccctctgcagtcttacggcttccagccaacaaacggcgtgggctatcagccctacagagtggtggtgctgtcctttgagctgctgcacgcaccagcaacagtgtgcggcccaaagaagtctaccaatctggtgaagaacaagtgcgtgaacttcaacttcaacggactgaccggcacaggcgtgctgaccgagagcaataagaagttcctgccttttcagcagttcggcagggacatcgcagataccacagacgccgtgcgcgaccctcagaccctggagatcctggacatcacaccatgcagcttcggcggcgtgtccgtgatcacaccaggcaccaatacatccaaccaggtggccgtgctgtatcaggacgtgaattgtaccgaggtgcccgaagcaatccacgcagatcagctgacccctacatggcgggtgtactctaccggcagcaacgtgttccagacaagagccggatgcctgatcggagcagagcacgtgaacaatagctatgagtgcgacatccctatcggcgccggcatctgtgccagctaccagacccagacaaactccccatctggagcaggctccgtggccagccagtccatcatcgcctataccatgagcctgggcgccgagaacagcgtggcctactccaacaattctatcgccatccctaccaacttcacaatcagcgtgaccacagagatcctgccagtgtctatgaccaagacaagcgtggactgcacaatgtatatctgtggcgatagcaccgagtgctccaacctgctgctgcagtacggctccttttgtacccagctgaatagagccctgacaggcatcgccgtggagcaggataagaacacacaggaggtgttcgcccaggtgaagcagatctacaagaccccacccatcaaggactttggcggcttcaacttcagccagatcctgcctgatccaagcaagccctccaagaggtcttttatcgaggacctgctgttcaacaaggtgaccctggccgatgccggcttcatcaagcagtatggagattgcctgggagacatcgcagcccgcgacctgatctgtgcccagaagtttaatggcctgaccgtgctgcctccactgctgacagatgagatgatcgcccagtacacatctgccctgctggccggcaccatcacaagcggatggaccttcggcgcaggagccgccctgcagatcccttttgccatgcagatggcctataggttcaacggcatcggcgtgacccagaatgtgctgtacgagaaccagaagctgatcgccaatcagtttaacagcgccatcggcaagatccaggactctctgtcctctacagccagcgccctgggcaagctgcaggatgtggtgaatcagaacgcccaggccctgaataccctggtgaagcagctgagctccaacttcggcgccatctctagcgtgctgaatgacatcctgagccggctggacccccctgaggcagaggtgcagatcgacaggctgatcacaggccgcctgcagagcctgcagacctacgtgacacagcagctgatcagggcagcagagatcagagcctccgccaatctggccgccaccaagatgagcgagtgcgtgctgggacagtccaagagggtggacttttgtggcaagggctatcacctgatgtctttcccacagagcgcccctcacggcgtggtgtttctgcacgtgacctacgtgccagcccaggagaagaacttcaccacagcaccagccatctgccacgatggaaaggcacactttcctagggagggcgtgttcgtgtctaacggcacccactggtttgtgacacagcgcaatttctacgagccacagatcatcaccacagacaatacattcgtgagcggcaactgtgatgtggtgatcggcatcgtgaacaataccgtgtatgatccactgcagcccgagctggactcctttaaggaggagctggataagtacttcaagaatcacacctctcccgacgtggatctgggcgacatctccggcatcaatgcctctgtggtgaacatccagaaggagatcgaccggctgaacgaggtggccaagaatctgaacgagagcctgatcgatctgcaggagctgggcaagtatgagcagtacatcaagggctctggcagagagaacctgtatttccagggaggaggaggcagcggatacatccctgaggcaccaagggacggacaggcctacgtgcgcaaggatggcgagtgggtgctgctgtccacctttctgggccatcatcaccaccaccaccaccactga

SEQ ID NO: 1298 - DNA, 3846 bp, Artificial Sequence
  Description of Artificial Sequence: Synthetic polynucleotide
atgggcatcctgccaagcccaggaatgcccgccctgctgtctctggtgagcctgctgtccgtgctgctgatgggatgcgtggcagagacaggcacacagtgcgtgaacctgaccacaaggacccagctgccccctgcctataccaattctttcacacggggcgtgtactatcccgacaaggtgtttagaagctccgtgctgcactccacacaggatctgtttctgcctttcttttctaacgtgacctggttccacgccatccacgtgtccggcaccaatggcacaaagcggttcgacaatcccgtgctgccttttaacgatggcgtgtacttcgccagcaccgagaagtccaacatcatcagaggctggatctttggcaccacactggactctaagacacagagcctgctgatcgtgaacaatgccaccaacgtggtgatcaaggtgtgcgagttccagttttgtaatgatccattcctgggcgtgtactatcacaagaacaataagtcctggatggagtctgagtttcgcgtgtattctagcgccaacaattgcacatttgagtacgtgagccagcccttcctgatggacctggagggcaagcagggcaatttcaagaacctgagggagttcgtgtttaagaatatcgatggctacttcaagatctacagcaagcacaccccaatcaacctggtgcgcgacctgccacagggattctccgccctggagccactggtggatctgcccatcggcatcaacatcacccggtttcagacactgctggccctgcacagatcctacctgacaccaggcgactcctctagcggatggaccgcaggagctgccgcctactatgtgggctatctgcagccccggaccttcctgctgaagtacaacgagaatggcaccatcacagacgcagtggattgcgccctggaccccctgtctgagacaaagtgtacactgaagagctttaccgtggagaagggcatctatcagacaagcaatttcagggtgcagcctaccgagtccatcgtgcgctttcccaatatcacaaacctgtgcccttttggcgaggtgttcaacgccaccagattcgccagcgtgtacgcctggaatcggaagagaatctccaactgcgtggccgactattctgtgctgtacaactccgcctctttcagcacctttaagtgctatggcgtgtctcccacaaagctgaatgatctgtgctttaccaacgtgtacgccgatagcttcgtgatcaggggagacgaagtgagacagatcgcaccaggacagacaggaaagatcgcagactacaattataagctgcctgacgatttcaccggctgcgtgatcgcctggaactccaacaatctggattctaaagtgggcggcaactacaattatctgtacaggctgtttcgcaagtccaatctgaagccattcgagcgggacatctccacagagatctaccaggccggctctaccccctgcaatggcgtggagggctttaactgttatttccctctgcagtcttacggcttccagccaacaaacggcgtgggctatcagccctacagagtggtggtgctgtcctttgagctgctgcacgcaccagcaacagtgtgcggcccaaagaagtctaccaatctggtgaagaacaagtgcgtgaacttcaacttcaacggactgaccggcacaggcgtgctgaccgagagcaataagaagttcctgccttttcagcagttcggcagggacatcgcagataccacagacgccgtgcgcgaccctcagaccctggagatcctggacatcacaccatgcagcttcggcggcgtgtccgtgatcacaccaggcaccaatacatccaaccaggtggccgtgctgtatcaggacgtgaattgtaccgaggtgcccgtgggaatccacgcagatcagctgacccctacatggcgggtgtactctaccggcagcaacgtgttccagacaagagccggatgcctgatcggagcagagcacgtgaacaatagctatgagtgcgacatccctatcggcgccggcatctgtgccagctaccagacccagacaaactccccatctggagcaggctccgtggccagccagtccatcatcgcctataccatgagcctgggcgccgagaacagcgtggcctactccaacaattctatcgccatccctaccaacttcacaatcagcgtgaccacagagatcctgccagtgtctatgaccaagacaagcgtggactgcacaatgtatatctgtggcgatagcaccgagtgctccaacctgctgctgcagtacggctccttttgtacccagctgaatagagccctgacaggcatcgccgtggagcaggataagaacacacaggaggtgttcgcccaggtgaagcagatctacaagaccccacccatcaaggactttggcggcttcaacttcagccagatcctgcctgatccaagcaagccctccaagaggtcttttatcgaggacctgctgttcaacaaggtgaccctggccgatgccggcttcatcaagcagtatggagattgcctgggagacatcgcagcccgcgacctgatctgtgcccagaagtttaatggcctgaccgtgctgcctccactgctgacagatgagatgatcgcccagtacacatctgccctgctggccggcaccatcacaagcggatggaccttcggcgcaggagccgccctgcagatcccttttgccatgcagatggcctataggttcaacggcatcggcgtgacccagaatgtgctgtacgagaaccagaagctgatcgccaatcagtttaacagcgccatcggcaagatccaggactctctgtcctctacagccagcgccctgggcaagctgcaggatgtggtgaatcagaacgcccaggccctgaataccctggtgaagcagctgagctccaacttcggcgccatctctagcgtgctgaatgacatcctgagccggctggacccccctgaggcagaggtgcagatcgacaggctgatcacaggccgcctgcagagcctgcagacctacgtgacacagcagctgatcagggcagcagagatcagagcctccgccaatctggccgccaccaagatgagcgagtgcgtgctgggacagtccaagagggtggacttttgtggcaagggctatcacctgatgtctttcccacagagcgcccctcacggcgtggtgtttctgcacgtgacctacgtgccagcccaggagaagaacttcaccacagcaccagccatctgccacgatggaaaggcacactttcctagggagggcgtgttcgtgtctaacggcacccactggtttgtgacacagcgcaatttctacgagccacagatcatcaccacagacaatacattcgtgagcggcaactgtgatgtggtgatcggcatcgtgaacaataccgtgtatgatccactgcagcccgagctggactcctttaaggaggagctggataagtacttcaagaatcacacctctcccgacgtggatctgggcgacatctccggcatcaatgcctctgtggtgaacatccagaaggagatcgaccggctgaacgaggtggccaagaatctgaacgagagcctgatcgatctgcaggagctgggcaagtatgagcagtacatcaagggctctggcagagagaacctgtatttccagggaggaggaggcagcggatacatccctgaggcaccaagggacggacaggcctacgtgcgcaaggatggcgagtgggtgctgctgtccacctttctgggccatcatcaccaccaccaccaccactga

SEQ ID NO: 1299 - DNA, 3846 bp, Artificial Sequence
  Description of Artificial Sequence: Synthetic polynucleotide
atgggcatcctgccaagcccaggaatgcccgccctgctgtctctggtgagcctgctgtccgtgctgctgatgggatgcgtggcagagacaggcacacagtgcgtgaacctgaccacaaggacccagctgccccctgcctataccaattctttccggcggggcgtgtactatcccgacaagatatttagaagcaatgtgctgcactccacacaggatctgtttctgcctttcttttctaacgtgacctggttccacgccatccacgtgtccggcaccaatggcacaaagcggttcgacaatcccgtgctgccttttaacgatggcgtgtacttcgccagcaccgagaagtccaacatcatcagaggctggatctttggcaccacactggactctaagacacagagcctgctgatcgtgaacaatgccaccaacgtggtgatcaaggtgtgcgagttccagttttgtaatgatccattcctgggcgtgtactatcacaagaacaataagtcctggatggagtctgagtttcgcgtgtattctagcgccaacaattgcacatttgagtacgtgagccagcccttcctgatggacctggagggcaagcagggcaatttcaagaacctgagggagttcgtgtttaagaatatcgatggctacttcaagatctacagcaagcacaccccaatcaacctggtgcgcgacctgccacagggattctccgccctggagccactgatgaaactgcccatcggcatcaacatcacccggtttcagacactgctggccctgcacagatcctacctgacaccaggcgactcctctagcggatggaccgcaggagctgccgcctactatgtgggctatctgcagccccggaccttcctgctgaagtacaacgagaatggcaccatcacagacgcagtggattgcagtctggaccccctgtctgagacaaagtgtacactgaagagctttaccgtggagaagggcatctatcagacaagcaatttcagggtgcagcctaccgagtccatcgtgcgctttcccaatatcacaaacctgtgcccttttggcgaggtgttcaacgccaccagattcgccagcgtgtacgcctggaatcggaagagaatctccaactgcgtggccgactattctgtgctgtacaactccgcctctttcagcacctttaagtgctatggcgtgtctcccacaaagctgaatgatctgtgctttaccaacgtgtacgccgatagcttcgtgatcaggggagacgaagtgagacagatcgcaccaggacagacaggaaagatcgcagactacaattataagctgcctgacgatttcaccggctgcgtgatcgcctggaactccaacaatctggattctaaagtgggcggcaactacaattatctgtacaggctgtttcgcaagtccaatctgaagccattcgagcgggacatctccacagagatctaccaggccggctctaccccctgcaatggcgtggagggctttaactgttatttccctctgcagtcttacggcttccagccaacaaacggcgtgggctatcagccctacagagtggtggtgctgtcctttgagctgctgcacgcaccagcaacagtgtgcggcccaaagaagtctaccaatctggtgaagaacaagtgcgtgaacttcaacttcaacggactgaccggcacaggcgtgctgaccgagagcaataagaagttcctgccttttcagcagttcggcagggacatcgcagataccacagacgccgtgcgcgaccctcagaccctggagatcctggacatcacaccatgcagcttcggcggcgtgtccgtgatcacaccaggcaccaatacatccaaccaggtggccgtgctgtatcaggacgtgaattgtaccgaggtgcccgtggcaatccacgcagatcagctgacccctacatggcgggtgtactctaccggcagcaacgtgttccagacaagagccggatgcctgatcggagcagagcacgtgaacaatagctatgagtgcgacatccctatcggcgccggcatctgtgccagctaccagacccagacaaactccccatctggagcaggctccgtggccagccagtccatcatcgcctataccatgagcctgggcgccgagaacagcgtggcctactccaacaattctatcgccatccctaccaacttcacaatcagcgtgaccacagagatcctgccagtgtctatgaccaagacaagcgtggactgcacaatgtatatctgtggcgatagcaccgagtgctccaacctgctgctgcagtacggctccttttgtacccagctgaatagagccctgacaggcatcgccgtggagcaggataagaacacacaggaggtgttcgcccaggtgaagcagatctacaagaccccacccatcaaggactttggcggcttcaacttcagccagatcctgcctgatccaagcaagccctccaagaggtcttttatcgaggacctgctgttcaacaaggtgaccctggccgatgccggcttcatcaagcagtatggagattgcctgggagacatcgcagcccgcgacctgatctgtgcccagaagtttaatggcctgaccgtgctgcctccactgctgacagatgagatgatcgcccagtacacatctgccctgctggccggcaccatcacaagcggatggaccttcggcgcaggagccgccctgcagatcccttttgccatgcagatggcctataggttcaacggcatcggcgtgacccagaatgtgctgtacgagaaccagaagctgatcgccaatcagtttaacagcgccatcggcaagatccaggactctctgtcctctacagccagcgccctgggcaagctgcaggatgtggtgaatcagaacgcccaggccctgaataccctggtgaagcagctgagctccaacttcggcgccatctctagcgtgctgaatgacatcctgagccggctggacccccctgaggcagaggtgcagatcgacaggctgatcacaggccgcctgcagagcctgcagacctacgtgacacagcagctgatcagggcagcagagatcagagcctccgccaatctggccgccaccaagatgagcgagtgcgtgctgggacagtccaagagggtggacttttgtggcaagggctatcacctgatgtctttcccacagagcgcccctcacggcgtggtgtttctgcacgtgacctacgtgccagcccaggagaagaacttcaccacagcaccagccatctgccacgatggaaaggcacactttcctagggagggcgtgttcgtgtctaacggcacccactggtttgtgacacagcgcaatttctacgagccacagatcatcaccacagacaatacattcgtgagcggcaactgtgatgtggtgatcggcatcgtgaacaataccgtgtatgatccactgcagcccgagctggactcctttaaggaggagctggataagtacttcaagaatcacacctctcccgacgtggatctgggcgacatctccggcatcaatgcctctgtggtgaacatccagaaggagatcgaccggctgaacgaggtggccaagaatctgaacgagagcctgatcgatctgcaggagctgggcaagtatgagcagtacatcaagggctctggcagagagaacctgtatttccagggaggaggaggcagcggatacatccctgaggcaccaagggacggacaggcctacgtgcgcaaggatggcgagtgggtgctgctgtccacctttctgggccatcatcaccaccaccaccaccactga

SEQ ID NO: 1300 - DNA, 3846 bp, Artificial Sequence
  Description of Artificial Sequence: Synthetic polynucleotide
atgggcatcctgccaagcccaggaatgcccgccctgctgtctctggtgagcctgctgtccgtgctgctgatgggatgcgtggcagagacaggcacacagtgcgtgaacctgaccacaaggacccagctgccccctgcctataccaattctttcacacggggcgtgtactatcccgacaaggtgtttagaagctccgtgctgcactccacacaggatctgtttctgcctttcttttctaacgtgacctggttccacgccatccacgtgtccggcaccaatggcacaaagcggttcgacaatcccgtgctgccttttaacgatggcgtgtacttcgccagcaccgagaagtccaacatcatcagaggctggatctttggcaccacactggactctaagacacagagcctgctgatcgtgaacaatgccaccaacgtggtgatcaaggtgtgcgagttccagttttgtaatgatccattcctgggcgtgtactatcacaagaacaataagtcctggatggagtctgagtttcgcgtgtattctagcgccaacaattgcacatttgagtacgtgagccagcccttcgcaatggacctggagggcaagcagggcaatttcaagaacctgagggagttcgtgtttaagaatatcgatggctacttcaagatctacagcaagcacaccccaatcaacctggtgcgcgacctgccacagggattctccgccctggagccactggtggatctgcccatcggcatcaacatcacccggtttcagacactgctggccctgcacagatcctacctgacaccaggcgactcctctagcggatggaccgcaggagctgccgcctactatgtgggctatctgcagccccggaccttcctgctgaagtacaacgagaatggcaccatcacagacgcagtggattgcgccctggaccccctgtctgagacaaagtgtacactgaagagctttaccgtggagaagggcatctatcagacaagcaatttcagggtgcagcctaccgagtccatcgtgcgctttcccaatatcacaaacctgtgcccttttggcgaggtgttcaacgccaccagattcgccagcgtgtacgcctggaatcggaagagaatctccaactgcgtggccgactattctgtgctgtacaactccgcctctttcagcacctttaagtgctatggcgtgtctcccacaaagctgaatgatctgtgctttaccaacgtgtacgccgatagcttcgtgatcaggggagacgaagtgagacagatcgcaccaggacagacaggaaagatcgcagactacaattataagctgcctgacgatttcaccggctgcgtgatcgcctggaactccaacaatctggattctaaagtgggcggcaactacaattatctgtacaggctgtttcgcaagtccaatctgaagccattcgagcgggacatctccacagagatctaccaggccggctctaccccctgcaatggcgtggagggctttaactgttatttccctctgcagtcttacggcttccagccaacaaacggcgtgggctatcagccctacagagtggtggtgctgtcctttgagctgctgcacgcaccagcaacagtgtgcggcccaaagaagtctaccaatctggtgaagaacaagtgcgtgaacttcaacttcaacggactgaccggcacaggcgtgctgaccgagagcaataagaagttcctgccttttcagcagttcggcagggacatcgcagataccacagacgccgtgcgcgaccctcagaccctggagatcctggacatcacaccatgcagcttcggcggcgtgtccgtgatcacaccaggcaccaatacatccaaccaggtggccgtgctgtatcaggacgtgaattgtaccgaggtgcccgtggcaatccacgcagatcagctgacccctacatggcgggtgtactctaccggcagcaacgtgttccagacaagagccggatgcctgatcggagcagagcacgtgaacaatagctatgagtgcgacatccctatcggcgccggcatctgtgccagctaccagacccagacaaactccccatctggagcaggctccgtggccagccagtccatcatcgcctataccatgagcctgggcgccgagaacagcgtggcctactccaacaattctatcgccatccctaccaacttcacaatcagcgtgaccacagagatcctgccagtgtctatgaccaagacaagcgtggactgcacaatgtatatctgtggcgatagcaccgagtgctccaacctgctgctgcagtacggctccttttgtacccagctgaatagagccctgacaggcatcgccgtggagcaggataagaacacacaggaggtgttcgcccaggtgaagcagatctacaagaccccacccatcaaggactttggcggcttcaacttcagccagatcctgcctgatccaagcaagccctccaagaggtcttttatcgaggacctgctgttcaacaaggtgaccctggccgatgccggcttcatcaagcagtatggagattgcctgggagacatcgcagcccgcgacctgatctgtgcccagaagtttaatggcctgaccgtgctgcctccactgctgacagatgagatgatcgcccagtacacatctgccctgctggccggcaccatcacaagcggatggaccttcggcgcaggagccgccctgcagatcccttttgccatgcagatggcctataggttcaacggcatcggcgtgacccagaatgtgctgtacgagaaccagaagctgatcgccaatcagtttaacagcgccatcggcaagatccaggactctctgtcctctacagccagcgccctgggcaagctgcaggatgtggtgaatcagaacgcccaggccctgaataccctggtgaagcagctgagctccaacttcggcgccatctctagcgtgctgaatgacatcctgagccggctggacccccctgaggcagaggtgcagatcgacaggctgatcacaggccgcctgcagagcctgcagacctacgtgacacagcagctgatcagggcagcagagatcagagcctccgccaatctggccgccaccaagatgagcgagtgcgtgctgggacagtccaagagggtggacttttgtggcaagggctatcacctgatgtctttcccacagagcgcccctcacggcgtggtgtttctgcacgtgacctacgtgccagcccaggagaagaacttcaccacagcaccagccatctgccacgatggaaaggcacactttcctagggagggcgtgttcgtgtctaacggcacccactggtttgtgacacagcgcaatttctacgagccacagatcatcaccacagacaatacattcgtgagcggcaactgtgatgtggtgatcggcatcgtgaacaataccgtgtatgatccactgcagcccgagctggactcctttaaggaggagctggataagtacttcaagaatcacacctctcccgacgtggatctgggcgacatctccggcatcaatgcctctgtggtgaacatccagaaggagatcgaccggctgaacgaggtggccaagaatctgaacgagagcctgatcgatctgcaggagctgggcaagtatgagcagtacatcaagggctctggcagagagaacctgtatttccagggaggaggaggcagcggatacatccctgaggcaccaagggacggacaggcctacgtgcgcaaggatggcgagtgggtgctgctgtccacctttctgggccatcatcaccaccaccaccaccactga

SEQ ID NO: 1301 - DNA, 3846 bp, Artificial Sequence
  Description of Artificial Sequence: Synthetic polynucleotide
atgggcatcctgccaagcccaggaatgcccgccctgctgtctctggtgagcctgctgtccgtgctgctgatgggatgcgtggcagagacaggcacacagtgcgtgaacctgaccacaaggacccagctgccccctgcctataccaattctttcacacggggcgtgtactatcccgacaaggtgtttagaagctccgtgctgcactccacacaggatctgtttctgcctttcttttctaacgtgacctggttccacgccatccacgtgtccggcaccaatggcacaaagcggttcgacaatcccgtgctgccttttaacgatggcgtgtacttcgccagcaccgagaagtccaacatcatcagaggctggatctttggcaccacactggactctaagacacagagcctgctgatcgtgaacaatgccaccaacgtggtgatcaaggtgtgcgagttccagttttgtaatgatccattcctgggcgtgtactatcacaagaacaataagtcctggatggagtctgagtttcgcgtgtattctagcgccaacaattgcacatttgagtacgtgagccagcccttcctgatggacctggagggcaagcagggcaatttcaagaacctgagggagttcgtgtttaagaatatcgatggctacttcaagatctacagcaagcacaccccaatcaacctggtgcgcgacctgccacagggattctccgccctggagccactggtggatctgcccatcggcatcaacatcacccggtttcagacactgctggccctgcacagatcctacctgacaccaggcgactcctctagcggatggaccgcaggagctgccgcctactatgtgggctatctgcagccccggaccttcctgctgaagtacaacgagaatggcaccatcacagacgcagtggattgcgccctggaccccctgtctgagacaaagtgtacactgaagagctttaccgtggagaagggcatctatcagacaagcaatttcagggtgcagcctaccgagtccatcgtgcgctttcccaatatcacaaacctgtgcccttttggcgaggtgttcaacgccaccagattcgccagcgtgtacgcctggaatcggaagagaatctccaactgcgtggccgactattctgtgctgtacaactccgcctctttcagcacctttaagtgctatggcgtgtctcccacaaagctgaatgatctgtgctttaccaacgtgtacgccgatagcttcgtgatcaggggagacgaagtgagacagatcgcaccaggacagacaggaaagatcgcagactacaattataagctgcctgacgatttcaccggctgcgtgatcgcctggaactccaacaatctggattctaaagtgggcggcaactacaattatctgtacaggctgtttcgcaagtccaatctgaagccattcgagcgggacatctccacagagatctaccaggccggctctaccccctgcaatggcgtggagggctttaactgttatttccctctgcagtcttacggcttccagccaacaaacggcgtgggctatcagccctacagagtggtggtgctgtcctttgagctgctgcacgcaccagcaacagtgtgcggcccaaagaagtctaccaatctggtgaagaacaagtgcgtgaacttcaacttcaacggactgaccggcacaggcgtgctgaccgagagcaataagaagttcctgccttttcagcagttcggcagggacatcgcagataccacagacgccgtgcgcgaccctcagaccctggagatcctggacatcacaccatgcagcttcggcggcgtgtccgtgatcacaccaggcaccaatacatccaaccaggtggccgtgctgtatcaggacgtgaattgtaccgaggtgcccgtggcaatccacgcagatcagctgacccctacatggcgggtgtactctaccggcagcaacgtgttccagacaagagccggatgcctgatcggagcagagcacgtgaacaatagctatgagtgcgacatccctatcggcgccggcatctgtgccagctaccagacccagacaaactccccatctggagcaggctccgtggccagccagtccatcatcgcctataccatgagcctgggcgccgagaacagcgtggcctactccaacaattctatcgccatccctaccaacttcacaatcagcgtgcaaacagagatcctgccagtgtctatgaccaagacaagcgtggactgcacaatgtatatctgtggcgatagcaccgagtgctccaacctgctgctgcagtacggctccttttgtacccagctgaatagagccctgacaggcatcgccgtggagcaggataagaacacacaggaggtgttcgcccaggtgaagcagatctacaagaccccacccatcaaggactttggcggcttcaacttcagccagatcctgcctgatccaagcaagccctccaagaggtcttttatcgaggacctgctgttcaacaaggtgaccctggccgatgccggcttcatcaagcagtatggagattgcctgggagacatcgcagcccgcgacctgatctgtgcccagaagtttaatggcctgaccgtgctgcctccactgctgacagatgagatgatcgcccagtacacatctgccctgctggccggcaccatcacaagcggatggaccttcggcgcaggagccgccctgcagatcccttttgccatgcagatggcctataggttcaacggcatcggcgtgacccagaatgtgctgtacgagaaccagaagctgatcgccaatcagtttaacagcgccatcggcaagatccaggactctctgtcctctacagccagcgccctgggcaagctgcaggatgtggtgaatcagaacgcccaggccctgaataccctggtgaagcagctgagctccaacttcggcgccatctctagcgtgctgaatgacatcctgagccggctggacccccctgaggcagaggtgcagatcgacaggctgatcacaggccgcctgcagagcctgcagacctacgtgacacagcagctgatcagggcagcagagatcagagcctccgccaatctggccgccaccaagatgagcgagtgcgtgctgggacagtccaagagggtggacttttgtggcaagggctatcacctgatgtctttcccacagagcgcccctcacggcgtggtgtttctgcacgtgacctacgtgccagcccaggagaagaacttcaccacagcaccagccatctgccacgatggaaaggcacactttcctagggagggcgtgttcgtgtctaacggcacccactggtttgtgacacagcgcaatttctacgagccacagatcatcaccacagacaatacattcgtgagcggcaactgtgatgtggtgatcggcatcgtgaacaataccgtgtatgatccactgcagcccgagctggactcctttaaggaggagctggataagtacttcaagaatcacacctctcccgacgtggatctgggcgacatctccggcatcaatgcctctgtggtgaacatccagaaggagatcgaccggctgaacgaggtggccaagaatctgaacgagagcctgatcgatctgcaggagctgggcaagtatgagcagtacatcaagggctctggcagagagaacctgtatttccagggaggaggaggcagcggatacatccctgaggcaccaagggacggacaggcctacgtgcgcaaggatggcgagtgggtgctgctgtccacctttctgggccatcatcaccaccaccaccaccactga

SEQ ID NO: 1302 - DNA, 3846 bp, Artificial Sequence
  Description of Artificial Sequence: Synthetic polynucleotide
atgggcatcctgccaagcccaggaatgcccgccctgctgtctctggtgagcctgctgtccgtgctgctgatgggatgcgtggcagagacaggcacacagtgcgtgaacctgaccacaaggacccagctgccccctgcctataccaattctttcacacggggcgtgtactatcccgacaaggtgtttagaagctccgtgctgcactccacacaggatctgtttctgcctttcttttctaacgtgacctggttccacgccatccacgtgtccggcaccaatggcacaaagcggttcgacaatcccgtgctgccttttaacgatggcgtgtacttcgccagcaccgagaagtccaacatcatcagaggctggatctttggcaccacactggactctaagacacagagcctgctgatcgtgaacaatgccaccaacgtggtgatcaaggtgtgcgagttccagttttgtaatgatccattcctgggcgtgtactatcacaagaacaataagtcctggatggagtctgagtttcgcgtgtattctagcgccaacaattgcacatttgagtacgtgagccagcccttcctgatggacctggagggcaagcagggcaatttcaagaacctgagggagttcgtgtttaagaatatcgatggctacttcaagatctacagcaagcacaccccaatcaacctggtgcgcgacctgccacagggattctccgccctggagccactggtggatctgcccatcggcatcaacatcacccggtttcagacactgctggccctgcacagatcctacctgacaccaggcgactcctctagcggatggaccgcaggagctgccgcctactatgtgggctatctgcagccccggaccttcctgctgaagtacgatgagaatggcaccatcacagacgcagtggattgcgccctggaccccctgtctgagacaaagtgtacactgaagagctttaccgtggagaagggcatctatcagacaagcaatttcagggtgcagcctaccgagtccatcgtgcgctttcccaatatcacaaacctgtgcccttttggcgaggtgttcaacgccaccagattcgccagcgtgtacgcctggaatcggaagagaatctccaactgcgtggccgactattctgtgctgtacaactccgcctctttcagcacctttaagtgctatggcgtgtctcccacaaagctgaatgatctgtgctttaccaacgtgtacgccgatagcttcgtgatcaggggagacgaagtgagacagatcgcaccaggacagacaggaaagatcgcagactacaattataagctgcctgacgatttcaccggctgcgtgatcgcctggaactccaacaatctggattctaaagtgggcggcaactacaattatctgtacaggctgtttcgcaagtccaatctgaagccattcgagcgggacatctccacagagatctaccaggccggctctaccccctgcaatggcgtggagggctttaactgttatttccctctgcagtcttacggcttccagccaacaaacggcgtgggctatcagccctacagagtggtggtgctgtcctttgagctgctgcacgcaccagcaacagtgtgcggcccaaagaagtctaccaatctggtgaagaacaagtgcgtgaacttcaacttcaacggactgaccggcacaggcgtgctgaccgagagcaataagaagttcctgccttttcagcagttcggcagggacatcgcagataccacagacgccgtgcgcgaccctcagaccctggagatcctggacatcacaccatgcagcttcggcggcgtgtccgtgatcacaccaggcaccaatacatccaaccaggtggccgtgctgtatcaggacgtgaattgtaccgaggtgcccgtggcaatccacgcagatcagctgacccctacatggcgggtgtactctaccggcagcaacgtgttccagacaagagccggatgcctgatcggagcagagcacgtgaacaatagctatgagtgcgacatccctatcggcgccggcatctgtgccagctaccagacccagacaaactccccatctggagcaggctccgtggccagccagtccatcatcgcctataccatgagcctgggcgccgagaacagcgtggcctactccaacaattctatcgccatccctaccaacttcacaatcagcgtgaccacagagatcctgccagtgtctatgaccaagacaagcgtggactgcacaatgtatatctgtggcgatagcaccgagtgctccaacctgctgctgcagtacggctccttttgtacccagctgaatagagccctgacaggcatcgccgtggagcaggataagaacacacaggaggtgttcgcccaggtgaagcagatctacaagaccccacccatcaaggactttggcggcttcaacttcagccagatcctgcctgatccaagcaagccctccaagaggtcttttatcgaggacctgctgttcaacaaggtgaccctggccgatgccggcttcatcaagcagtatggagattgcctgggagacatcgcagcccgcgacctgatctgtgcccagaagtttaatggcctgaccgtgctgcctccactgctgacagatgagatgatcgcccagtacacatctgccctgctggccggcaccatcacaagcggatggaccttcggcgcaggagccgccctgcagatcccttttgccatgcagatggcctataggttcaacggcatcggcgtgacccagaatgtgctgtacgagaaccagaagctgatcgccaatcagtttaacagcgccatcggcaagatccaggactctctgtcctctacagccagcgccctgggcaagctgcaggatgtggtgaatcagaacgcccaggccctgaataccctggtgaagcagctgagctccaacttcggcgccatctctagcgtgctgaatgacatcctgagccggctggacccccctgaggcagaggtgcagatcgacaggctgatcacaggccgcctgcagagcctgcagacctacgtgacacagcagctgatcagggcagcagagatcagagcctccgccaatctggccgccaccaagatgagcgagtgcgtgctgggacagtccaagagggtggacttttgtggcaagggctatcacctgatgtctttcccacagagcgcccctcacggcgtggtgtttctgcacgtgacctacgtgccagcccaggagaagaacttcaccacagcaccagccatctgccacgatggaaaggcacactttcctagggagggcgtgttcgtgtctaacggcacccactggtttgtgacacagcgcaatttctacgagccacagatcatcaccacagacaatacattcgtgagcggcaactgtgatgtggtgatcggcatcgtgaacaataccgtgtatgatccactgcagcccgagctggactcctttaaggaggagctggataagtacttcaagaatcacacctctcccgacgtggatctgggcgacatctccggcatcaatgcctctgtggtgaacatccagaaggagatcgaccggctgaacgaggtggccaagaatctgaacgagagcctgatcgatctgcaggagctgggcaagtatgagcagtacatcaagggctctggcagagagaacctgtatttccagggaggaggaggcagcggatacatccctgaggcaccaagggacggacaggcctacgtgcgcaaggatggcgagtgggtgctgctgtccacctttctgggccatcatcaccaccaccaccaccactga

SEQ ID NO: 1303 - DNA, 3846 bp, Artificial Sequence
  Description of Artificial Sequence: Synthetic polynucleotide
atgggcatcctgccaagcccaggaatgcccgccctgctgtctctggtgagcctgctgtccgtgctgctgatgggatgcgtggcagagacaggcacacagtgcgtgaacctgaccacaaggacccagctgccccctgcctataccaattctttcacacggggcgtgtactatcccgacaaggtgtttagaagctccgtgctgcactccacacaggatctgtttctgcctttcttttctaacgtgacctggttccacgccatccacgtgtccggcaccaatggcacaaagcggttcgacaatcccgtgctgccttttaacgatggcgtgtacttcgccagcaccgagaagtccaacatcatcagaggctggatctttggcaccacactggactctaagacacagagcctgctgatcgtgaacaatgccaccaacgtggtgatcaaggtgtgcgagttccagttttgtaatgatccattcctgggcgtgtactatcacaagaacaataagtcctggatggagtctgagtttcgcgtgtattctagcgccaacaattgcacatttgagtacgtgagccagcccttcctgatggacctggagggcaagcagggcaatttcaagaacctgagggagttcgtgtttaagaatatcgatggctacttcaagatctacagcaagcacaccccaatcaacctggtgcgcgacctgccacagggattctccgccctggagccactggtggatctgcccatcggcatcaacatcacccggtttcagacactgctggccctgcacagatcctacctgacaccaggcgactcctctagcggatggaccgcaggagctgccgcctactatgtgggctatctgcagccccggaccttcctgctgaagtacaacgagaatggcaccatcacagacgcagtggattgcgccctggaccccctgtctgagacaaagtgttcgctgaagagctttaccgtggagaagggcatctatcagacaagcaatttcagggtgcagcctaccgagtccatcgtgcgctttcccaatatcacaaacctgtgcccttttggcgaggtgttcaacgccaccagattcgccagcgtgtacgcctggaatcggaagagaatctccaactgcgtggccgactattctgtgctgtacaactccgcctctttcagcacctttaagtgctatggcgtgtctcccacaaagctgaatgatctgtgctttaccaacgtgtacgccgatagcttcgtgatcaggggagacgaagtgagacagatcgcaccaggacagacaggaaagatcgcagactacaattataagctgcctgacgatttcaccggctgcgtgatcgcctggaactccaacaatctggattctaaagtgggcggcaactacaattatctgtacaggctgtttcgcaagtccaatctgaagccattcgagcgggacatctccacagagatctaccaggccggctctaccccctgcaatggcgtggagggctttaactgttatttccctctgcagtcttacggcttccagccaacaaacggcgtgggctatcagccctacagagtggtggtgctgtcctttgagctgctgcacgcaccagcaacagtgtgcggcccaaagaagtctaccaatctggtgaagaacaagtgcgtgaacttcaacttcaacggactgaccggcacaggcgtgctgaccgagagcaataagaagttcctgccttttcagcagttcggcagggacatcgcagataccacagacgccgtgcgcgaccctcagaccctggagatcctggacatcacaccatgcagcttcggcggcgtgtccgtgatcacaccaggcaccaatacatccaaccaggtggccgtgctgtatcaggacgtgaattgtaccgaggtgcccgtggcaatccacgcagatcagctgacccctacatggcgggtgtactctaccggcagcaacgtgttccagacaagagccggatgcctgatcggagcagagcacgtgaacaatagctatgagtgcgacatccctatcggcgccggcatctgtgccagctaccagacccagacaaactccccatctggagcaggctccgtggccagccagtccatcatcgcctataccatgagcctgggcgccgagaacagcgtggcctactccaacaattctatcgccatccctaccaacttcacaatcagcgtgaccacagagatcctgccagtgtctatgaccaagacaagcgtggactgcacaatgtatatctgtggcgatagcaccgagtgctccaacctgctgctgcagtacggctccttttgtacccagctgaatagagccctgacaggcatcgccgtggagcaggataagaacacacaggaggtgttcgcccaggtgaagcagatctacaagaccccacccatcaaggactttggcggcttcaacttcagccagatcctgcctgatccaagcaagccctccaagaggtcttttatcgaggacctgctgttcaacaaggtgaccctggccgatgccggcttcatcaagcagtatggagattgcctgggagacatcgcagcccgcgacctgatctgtgcccagaagtttaatggcctgaccgtgctgcctccactgctgacagatgagatgatcgcccagtacacatctgccctgctggccggcaccatcacaagcggatggaccttcggcgcaggagccgccctgcagatcccttttgccatgcagatggcctataggttcaacggcatcggcgtgacccagaatgtgctgtacgagaaccagaagctgatcgccaatcagtttaacagcgccatcggcaagatccaggactctctgtcctctacagccagcgccctgggcaagctgcaggatgtggtgaatcagaacgcccaggccctgaataccctggtgaagcagctgagctccaacttcggcgccatctctagcgtgctgaatgacatcctgagccggctggacccccctgaggcagaggtgcagatcgacaggctgatcacaggccgcctgcagagcctgcagacctacgtgacacagcagctgatcagggcagcagagatcagagcctccgccaatctggccgccaccaagatgagcgagtgcgtgctgggacagtccaagagggtggacttttgtggcaagggctatcacctgatgtctttcccacagagcgcccctcacggcgtggtgtttctgcacgtgacctacgtgccagcccaggagaagaacttcaccacagcaccagccatctgccacgatggaaaggcacactttcctagggagggcgtgttcgtgtctaacggcacccactggtttgtgacacagcgcaatttctacgagccacagatcatcaccacagacaatacattcgtgagcggcaactgtgatgtggtgatcggcatcgtgaacaataccgtgtatgatccactgcagcccgagctggactcctttaaggaggagctggataagtacttcaagaatcacacctctcccgacgtggatctgggcgacatctccggcatcaatgcctctgtggtgaacatccagaaggagatcgaccggctgaacgaggtggccaagaatctgaacgagagcctgatcgatctgcaggagctgggcaagtatgagcagtacatcaagggctctggcagagagaacctgtatttccagggaggaggaggcagcggatacatccctgaggcaccaagggacggacaggcctacgtgcgcaaggatggcgagtgggtgctgctgtccacctttctgggccatcatcaccaccaccaccaccactga

SEQ ID NO: 1304 - DNA, 3846 bp, Artificial Sequence
  Description of Artificial Sequence: Synthetic polynucleotide
atgggcatcctgccaagcccaggaatgcccgccctgctgtctctggtgagcctgctgtccgtgctgctgatgggatgcgtggcagagacaggcacacagtgcgtgaacctgaccacaaggacccagctgccccctgcctataccaattctttcacacggggcgtgtactatcccgacaaggtgtttagaagctccgtgctgcactccacacaggatctgtttctgcctttcttttctaacgtgacctggttccacgccatccacgtgtccggcaccaatggcacaaagcggttcgacaatcccgtgctgccttttaacgatggcgtgtacttcgccagcaccgagaagtccaacatcatcagaggctggatctttggcaccacactggactctaagacacagagcctgctgatcgtgaacaatgccaccaacgtggtgatcaaggtgtgcgagttccagttttgtaatgatccattcctgggcgtgtactatcacaagaacaataagtcctggatggagtctgagtttcgcgtgtattctagcgccaacaattgcacatttgagtacgtgagccagcccttcctgatggacctggagggcaagcagggcaatttcaagaacctgagggagttcgtgtttaagaatatcgatggctacttcaagatctacagcaagcacaccccaatcaacctggtgcgcgacctgccacagggattctccgccctggagccactggtggatctgcccatcggcatcaacatcacccggtttcagacactgctggccctgcacagatcctacctgacaccaggcgactcctctagcggatggaccgcaggagctgccgcctactatgtgggctatctgcagccccggaccttcctgctgaagtacaacgagaatggcaccatcacagacgcagtggattgcgccctggaccccctgtctgagacaaagtgtacactgaagagctttaccgtggagaagggcatctatcagacaagcaatttcagggtgcagcctaccgagtccatcgtgcgctttcccaatatcacaaacctgtgcccttttggcgaggtgttcaacgccaccagattcgccagcgtgtacgcctggaatcggaagagaatctccaactgcgtggccgactattctgtgctgtacaactccgcctctttcagcacctttaagtgctatggcgtgtctcccacaaagctgaatgatctgtgctttaccaacgtgtacgccgatagcttcgtgatcaggggagacgaagtgagacagatcgcaccaggacagacaggaaagatcgcagactacaattataagctgcctgacgatttcaccggctgcgtgatcgcctggaactccaacaatctggattctaaagtgggcggcaactacaattatctgtacaggctgtttcgcaagtccaatctgaagccattcgagcgggacatctccacagagatctaccaggccggctctaccccctgcaatggcgtggagggctttaactgttatttccctctgcagtcttacggcttccagccaacaaacggcgtgggctatcagccctacagagtggtggtgctgtcctttgagctgctgcacgcaccagcaacagtgtgcggcccaaagaagtctaccaatctggtgaagaacaagtgcgtgaacttcaacttcaacggactgaccggcacaggcgtgctgaccgagagcaataagaagttcctgccttttcagcagttcggcagggacatcgcagataccacagacgccgtgcgcgaccctcagaccctggagatcctggacatcacaccatgcagcttcggcggcgtgtccgtgatcacaccaggcaccaatacatccaaccaggtggccgtgctgtatcaggacgtgaattgtaccgaggtgcccgtggcaatccacgcagatcagctgacccctacatggcgggtgtactctaccggcagcaacgtgttccagacaagagccggatgcctgatcggagcagagcacgtgaacaatagctatgagtgcgacatccctatcggcgccggcatctgtgccagctaccagacccagacaaactccccatctggagcaggctccgtggccagccagtccatcatcgcctataccatgagcctgggcgccgagaacagcgtggcctactccaacaattctatcgccatccctaccaacttcacaatcagcgtgaccacagagatcctgccagtgtctatgaccaagacaagcgtggactgcacaatgtatatctgtggcgatagcaccgagtgctccaacctgctgctgcagtacggctccttttgtacccagctgaatagagccctgacaggcatcgccgtggagcaggataagaacacacaggaggtgttcgcccaggtgaagcagatgtacaagaccccacccatcaaggactttggcggcttcaacttcagccagatcctgcctgatccaagcaagccctccaagaggtcttttatcgaggacctgctgttcaacaaggtgaccctggccgatgccggcttcatcaagcagtatggagattgcctgggagacatcgcagcccgcgacctgatctgtgcccagaagtttaatggcctgaccgtgctgcctccactgctgacagatgagatgatcgcccagtacacatctgccctgctggccggcaccatcacaagcggatggaccttcggcgcaggagccgccctgcagatcccttttgccatgcagatggcctataggttcaacggcatcggcgtgacccagaatgtgctgtacgagaaccagaagctgatcgccaatcagtttaacagcgccatcggcaagatccaggactctctgtcctctacagccagcgccctgggcaagctgcaggatgtggtgaatcagaacgcccaggccctgaataccctggtgaagcagctgagctccaacttcggcgccatctctagcgtgctgaatgacatcctgagccggctggacccccctgaggcagaggtgcagatcgacaggctgatcacaggccgcctgcagagcctgcagacctacgtgacacagcagctgatcagggcagcagagatcagagcctccgccaatctggccgccaccaagatgagcgagtgcgtgctgggacagtccaagagggtggacttttgtggcaagggctatcacctgatgtctttcccacagagcgcccctcacggcgtggtgtttctgcacgtgacctacgtgccagcccaggagaagaacttcaccacagcaccagccatctgccacgatggaaaggcacactttcctagggagggcgtgttcgtgtctaacggcacccactggtttgtgacacagcgcaatttctacgagccacagatcatcaccacagacaatacattcgtgagcggcaactgtgatgtggtgatcggcatcgtgaacaataccgtgtatgatccactgcagcccgagctggactcctttaaggaggagctggataagtacttcaagaatcacacctctcccgacgtggatctgggcgacatctccggcatcaatgcctctgtggtgaacatccagaaggagatcgaccggctgaacgaggtggccaagaatctgaacgagagcctgatcgatctgcaggagctgggcaagtatgagcagtacatcaagggctctggcagagagaacctgtatttccagggaggaggaggcagcggatacatccctgaggcaccaagggacggacaggcctacgtgcgcaaggatggcgagtgggtgctgctgtccacctttctgggccatcatcaccaccaccaccaccactga

SEQ ID NO: 1305 - DNA, 3846 bp, Artificial Sequence
  Description of Artificial Sequence: Synthetic polynucleotide
atgggcatcctgccaagcccaggaatgcccgccctgctgtctctggtgagcctgctgtccgtgctgctgatgggatgcgtggcagagacaggcacacagtgcgtgaacctgaccacaaggacccagctgccccctgcctataccaattctttcacacggggcgtgtactatcccgacaaggtgtttagaagctccgtgctgcactccacacaggatctgtttctgcctttcttttctaacgtgacctggttccacgccatccacgtgtccggcaccaatggcacaaagcggttcgacaatcccgtgctgccttttaacgatggcgtgtacttcgccagcaccgagaagtccaacatcatcagaggctggatctttggcaccacactggactctaagacacagagcctgctgatcgtgaacaatgccaccaacgtggtgatcaaggtgtgcgagttccagttttgtaatgatccattcctgggcgtgtactatcacaagaacaataagtcctggatggagtctgagtttcgcgtgtattctagcgccaacaattgcacatttgagtacgtgagccagcccttcctgatggacctggagggcaagcagggcaatttcaagaacctgagggagttcgtgtttaagaatatcgatggctacttcaagatctacagcaagcacaccccaatcaacctggtgcgcgacctgccacagggattctccgccctggagccactggtggatctgcccatcggcatcaacatcacccggtttcagacactgctggccctgcacagatcctacctgacaccaggcgactcctctagcggatggaccgcaggagctgccgcctactatgtgggctatctgcagccccggaccttcctgctgaagtacaacgagaatggcaccatcacagacgcagtggattgcgccctggaccccctgtctgagacaaagtgtacactgaagagctttaccgtggagaagggcatctatcagacaagcaatttcagggtgcagcctaccgagtccatcgtgcgctttcccaatatcacaaacctgtgcccttttggcgaggtgttcaacgccaccagattcgccagcgtgtacgcctggaatcggaagagaatctccaactgcgtggccgactattctgtgctgtacaactccgcctctttcagcacctttaagtgctatggcgtgtctcccacaaagctgaatgatctgtgctttaccaacgtgtacgccgatagcttcgtgatcaggggagacgaagtgagacagatcgcaccaggacagacaggaaagatcgcagactacaattataagctgcctgacgatttcaccggctgcgtgatcgcctggaactccaacaatctggattctaaagtgggcggcaactacaattatctgtacaggctgtttcgcaagtccaatctgaagccattcgagcgggacatctccacagagatctaccaggccggctctaccccctgcaatggcgtggagggctttaactgttatttccctctgcagtcttacggcttccagccaacaaacggcgtgggctatcagccctacagagtggtggtgctgtcctttgagctgctgcacgcaccagcaacagtgtgcggcccaaagaagtctaccaatctggtgaagaacaagtgcgtgaacttcaacttcaacggactgaccggcacaggcgtgctgaccgagagcaataagaagttcctgccttttcagcagttcggcagggacatcgcagataccacagacgccgtgcgcgaccctcagaccctggagatcctggacatcacaccatgcagcttcggcggcgtgtccgtgatcacaccaggcaccaatacatccaaccaggtggccgtgctgtatcaggacgtgaattgtaccgaggtgcccgtggcaatccacgcagatcagctgacccctacatggcgggtgtactctaccggcagcaacgtgttccagacaagagccggatgcctgatcggagcagagcacgtgaacaatagctatgagtgcgacatccctatcggcgccggcatctgtgccagctaccagacccagacaaactccccatctggagcaggctccgtggccagccagtccatcatcgcctataccatgagcctgggcgccgagaacagcgtggcctactccaacaattctatcgccatccctaccaacttcacaatcagcgtgaccacagagatcctgccagtgtctatgaccaagacaagcgtggactgcacaatgtatatctgtggcgatagcaccgagtgctccaacctgctgctgcagtacggctccttttgtacccagctgaatagagccctgacaggcatcgccgtggagcaggataagaacacacaggaggtgttcgcccaggtgaagcagatctacaagaccccacccatcaaggactttggcggcttcaacttcagccagatcctgcctgatccaagcaagccctccaagaggtcttttatcgaggacctgctgttcaacaaggtgaccctggccgatgccggcttcatcaagcagtatggagattgcctgggagacatcgcagcccgcgacctgatctgtgcccagaagtttaatggcctgaccgtgctgcctccactgctgacagatgagatgatcgcccagtacacatctgccctgctggccggcaccatcacaagcggatggaccttcggcgcaggagccgccctgcagatcccttttgccatgcagatggcctataggttcaacggcatcggcgtgacccagaatgtgctgtacgagaaccagaagctgatcgccaatcagtttaacagcgccatcggcaagatccaggactctctgtcctctacagccagcgccctgggcaagctgcaggatgtggtgaatcagaacgcccaggccctgaataccctggtgaagcagctgagctccaacttcggcgccatctctagcgtgctgaatgacatcctgagccggctggacccccctgaggcagaggtgcagatcgacaggctgatcacaggccgcctgcagagcctgcagacctacgtgacacagcagctgatcagggcagcagagatcagagcctccgccaatctggccgccaccaagatgagcgagtgcgtgctgggacagtccaagagggtggacttttgtggcaagggctatcacctgatgtctttcccacagagcgcccctcacggcgtggtgtttctgcacgtgacctacgtgccagcccaggagaagaacttcaccacagcaccagccatctgccacgatggaaaggcacactttcctagggagggcgtgttcgtgtctaacggcacccactggtttgtgacacagcgcaatttctacgagccacagatcatcaccacagacaatacattcgtgagcggcaactgtgatgtggtgtatggcatcgtgaacaataccgtgtatgatccactgcagcccgagctggactcctttaaggaggagctggataagtacttcaagaatcacacctctcccgacgtggatctgggcgacatctccggcatcaatgcctctgtggtgaacatccagaaggagatcgaccggctgaacgaggtggccaagaatctgaacgagagcctgatcgatctgcaggagctgggcaagtatgagcagtacatcaagggctctggcagagagaacctgtatttccagggaggaggaggcagcggatacatccctgaggcaccaagggacggacaggcctacgtgcgcaaggatggcgagtgggtgctgctgtccacctttctgggccatcatcaccaccaccaccaccactga

SEQ ID NO: 1306 - DNA, 3846 bp, Artificial Sequence
  Description of Artificial Sequence: Synthetic polynucleotide
atgggcatcctgccaagcccaggaatgcccgccctgctgtctctggtgagcctgctgtccgtgctgctgatgggatgcgtggcagagacaggcacacagtgcgtgaacctgaccacaaggacccagctgccccctgcctataccaattctttcacacggggcgtgtactatcccgacaaggtgtttagaagctccgtgctgcactccacacaggatctgtttctgcctttcttttctaacgtgacctggttccacgccatccacgtgtccggcaccaatggcacaaagcggttcgacaatcccgtgctgccttttaacgatggcgtgtacttcgccagcaccgagaagtccaacatcatcagaggctggatctttggcaccacactggactctaagacacagagcctgctgatcgtgaacaatgccaccaacgtggtgatcaaggtgtgcgagttccagttttgtaatgatccattcctgggcgtgtactatcacaagaacaataagtcctggatggagtctgagtttcgcgtgtattctagcgccaacaattgcacatttgagtacgtgagccagcccttcctgatggacctggagggcaagcagggcaatttcaagaacctgagggagttcgtgtttaagaatatcgatggctacttcaagatctacagcaagcacaccccaatcaacctggtgcgcgacctgccacagggattctccgccctggagccactggtggatctgcccatcggcatcaacatcacccggtttcagacactgctggccctgcacagatcctacctgacaccaggcgactcctctagcggatggaccgcaggagctgccgcctactatgtgggctatctgcagccccggaccttcctgctgaagtacaacgagaatggcaccatcacagacgcagtggattgcagtctggaccccctgtctgagacaaagtgtacactgaagagctttaccgtggagaagggcatctatcagacaagcaatttcagggtgcagcctaccgagtccatcgtgcgctttcccaatatcacaaacctgtgcccttttggcgaggtgttcaacgccaccagattcgccagcgtgtacgcctggaatcggaagagaatctccaactgcgtggccgactattctgtgctgtacaactccgcctctttcagcacctttaagtgctatggcgtgtctcccacaaagctgaatgatctgtgctttaccaacgtgtacgccgatagcttcgtgatcaggggagacgaagtgagacagatcgcaccaggacagacaggaaagatcgcagactacaattataagctgcctgacgatttcaccggctgcgtgatcgcctggaactccaacaatctggattctaaagtgggcggcaactacaattatctgtacaggctgtttcgcaagtccaatctgaagccattcgagcgggacatctccacagagatctaccaggccggctctaccccctgcaatggcgtggagggctttaactgttatttccctctgcagtcttacggcttccagccaacaaacggcgtgggctatcagccctacagagtggtggtgctgtcctttgagctgctgcacgcaccagcaacagtgtgcggcccaaagaagtctaccaatctggtgaagaacaagtgcgtgaacttcaacttcaacggactgaccggcacaggcgtgctgaccgagagcaataagaagttcctgccttttcagcagttcggcagggacatcgcagataccacagacgccgtgcgcgaccctcagaccctggagatcctggacatcacaccatgcagcttcggcggcgtgtccgtgatcacaccaggcaccaatacatccaaccaggtggccgtgctgtatcaggacgtgaattgtaccgaggtgcccgaagcaatccactcaaaccagctgcgtcctacatggcgggtgtactctaccggcagcaacgtgttccagacaagagccggatgcctgatcggagcagagcacgtgaacaatagctatgagtgcgacatccctatcggcaacggcatctgtgccagctaccagacccagacaaactccccatctggaagtggctccgtgtcaagccagtccatcatcgcctataccatgagcctgggcgccgagaacagcgtggcctactccaacaattctatcgccatccctaccaacttcacaatcagcgtgaccacagagatcctgccagtgtctatgaccaagacaagcgtggactgcacaatgtatatctgtggcgatagcaccgagtgctccaacctgctgctgcagtacggctccttttgtacccagctgaatagagccctgacaggcatcgccgtggagcaggataagaacacacaggaggtgttcgcccaggtgaagcagatctacaagaccccacccatcaaggactttggcggcttcaacttcagccagatcctgcctgatccaagcaagccctccaagaggtcttttatcgaggacctgctgttcaacaaggtgaccctggccgatgccggcttcatcaagcagtatggagattgcctgggagacatcgcagcccgcgacctgatctgtgcccagaagtttaatggcctgaccgtgctgcctccactgctgacagatgagatgatcgcccagtacacatctgccctgctggccggcaccatcacaagcggatggaccttcggcgcaggagccgccctgcagatcccttttgccatgcagatggcctataggttcaacggcatcggcgtgacccagaatgtgctgtacgagaaccagaagctgatcgccaatcagtttaacagcgccatcggcaagatccaggactctctgtcctctacagccagcgccctgggcaagctgcaggatgtggtgaatcagaacgcccaggccctgaataccctggtgaagcagctgagctccaacttcggcgccatctctagcgtgctgaatgacatcctgagccggctggacccccctgaggcagaggtgcagatcgacaggctgatcacaggccgcctgcagagcctgcagacctacgtgacacagcagctgatcagggcagcagagatcagagcctccgccaatctggccgccaccaagatgagcgagtgcgtgctgggacagtccaagagggtggacttttgtggcaagggctatcacctgatgtctttcccacagagcgcccctcacggcgtggtgtttctgcacgtgacctacgtgccagcccaggagaagaacttcaccacagcaccagccatctgccacgatggaaaggcacactttcctagggagggcgtgttcgtgtctaacggcacccactggtttgtgacacagcgcaatttctacgagccacagatcatcaccacagacaatacattcgtgagcggcaactgtgatgtggtgatcggcatcgtgaacaataccgtgtatgatccactgcagcccgagctggactcctttaaggaggagctggataagtacttcaagaatcacacctctcccgacgtggatctgggcgacatctccggcatcaatgcctctgtggtgaacatccagaaggagatcgaccggctgaacgaggtggccaagaatctgaacgagagcctgatcgatctgcaggagctgggcaagtatgagcagtacatcaagggctctggcagagagaacctgtatttccagggaggaggaggcagcggatacatccctgaggcaccaagggacggacaggcctacgtgcgcaaggatggcgagtgggtgctgctgtccacctttctgggccatcatcaccaccaccaccaccactga

SEQ ID NO: 1307 - DNA, 3846 bp, Artificial Sequence
  Description of Artificial Sequence: Synthetic polynucleotide
atgggcatcctgccaagcccaggaatgcccgccctgctgtctctggtgagcctgctgtccgtgctgctgatgggatgcgtggcagagacaggcacacagtgcgtgaacctgaccacaaggacccagctgccccctgcctataccaattctttcacacggggcgtgtactatcccgacaaggtgtttagaagctccgtgctgcactccacacaggatctgtttctgcctttcttttctaacgtgacctggttccacgccatccacgtgtccggcaccaatggcacaaagcggttcgacaatcccgtgctgccttttaacgatggcgtgtacttcgccagcaccgagaagtccaacatcatcagaggctggatctttggcaccacactggactctaagacacagagcctgctgatcgtgaacaatgccaccaacgtggtgatcaaggtgtgcgagttccagttttgtaatgatccattcctgggcgtgtactatcacaagaacaataagtcctggatggagtctgagtttcgcgtgtattctagcgccaacaattgcacatttgagtacgtgagccagcccttcctgatggacctggagggcaagcagggcaatttcaagaacctgagggagttcgtgtttaagaatatcgatggctacttcaagatctacagcaagcacaccccaatcaacctggtgcgcgacctgccacagggattctccgccctggagccactggtggatctgcccatcggcatcaacatcacccggtttcagacactgctggccctgcacagatcctacctgacaccaggcgactcctctagcggatggaccgcaggagctgccgcctactatgtgggctatctgcagccccggaccttcctgctgaagtacaacgagaatggcaccatcacagacgcagtggattgcgcctttgaccccctgtctgagacaaagtgtacactgaagagctttaccgtggagaagggcatctatcagacaagcaatttcagggtgcagcctaccgagtccatcgtgcgctttcccaatatcacaaacctgtgcccttttggcgaggtgttcaacgccaccagattcgccagcgtgtacgcctggaatcggaagagaatctccaactgcgtggccgactattctgtgctgtacaactccgcctctttcagcacctttaagtgctatggcgtgtctcccacaaagctgaatgatctgtgctttaccaacgtgtacgccgatagcttcgtgatcaggggagacgaagtgagacagatcgcaccaggacagacaggaaagatcgcagactacaattataagctgcctgacgatttcaccggctgcgtgatcgcctggaactccaacaatctggattctaaagtgggcggcaactacaattatctgtacaggctgtttcgcaagtccaatctgaagccattcgagcgggacatctccacagagatctaccaggccggctctaccccctgcaatggcgtggagggctttaactgttatttccctctgcagtcttacggcttccagccaacaaacggcgtgggctatcagccctacagagtggtggtgctgtcctttgagctgctgcacgcaccagcaacagtgtgcggcccaaagaagtctaccaatctggtgaagaacaagtgcgtgaacttcaacttcaacggactgaccggcacaggcgtgctgaccgagagcaataagaagttcctgccttttcagcagttcggcagggacatcgcagataccacagacgccgtgcgcgaccctcagaccctggagatcctggacatcacaccatgcagcttcggcggcgtgtccgtgatcacaccaggcaccaatacatccaaccaggtggccgtgctgtatcaggacgtgaattgtaccgaggtgcccgtggcaatccacgcagatcagctgacccctacatggcgggtgtactctaccggcagcaacgtgttccagacaagagccggatgcctgatcggagcagagcacgtgaacaatagctatgagtgcgacatccctatcggcgccggcatctgtgccagctaccagacccagacaaactccccatctggagcaggctccgtggccagccagtccatcatcgcctataccatgagcctgggcgccgagaacagcgtggcctactccaacaattctatcgccatccctaccaacttcacaatcagcgtgaccacagagatcctgccagtgtctatgaccaagacaagcgtggactgcacaatgtatatctgtggcgatagcaccgagtgctccaacctgctgctgcagtacggctccttttgtacccagctgaatagagccctgacaggcatcgccgtggagcaggataagaacacacaggaggtgttcgcccaggtgaagcagatctacaagaccccacccatcaaggactttggcggcttcaacttcagccagatcctgcctgatccaagcaagccctccaagaggtcttttatcgaggacctgctgttcaacaaggtgaccctggccgatgccggcttcatcaagcagtatggagattgcctgggagacatcgcagcccgcgacctgatctgtgcccagaagtttaatggcctgaccgtgctgcctccactgctgacagatgagatgatcgcccagtacacatctgccctgctggccggcaccatcacaagcggatggaccttcggcgcaggagccgccctgcagatcccttttgccatgcagatggcctataggttcaacggcatcggcgtgacccagaatgtgctgtacgagaaccagaagctgatcgccaatcagtttaacagcgccatcggcaagatccaggactctctgtcctctacagccagcgccctgggcaagctgcaggatgtggtgaatcagaacgcccaggccctgaataccctggtgaagcagctgagctccaacttcggcgccatctctagcgtgctgaatgacatcctgagccggctggacccccctgaggcagaggtgcagatcgacaggctgatcacaggccgcctgcagagcctgcagacctacgtgacacagcagctgatcagggcagcagagatcagagcctccgccaatctggccgccaccaagatgagcgagtgcgtgctgggacagtccaagagggtggacttttgtggcaagggctatcacctgatgtctttcccacagagcgcccctcacggcgtggtgtttctgcacgtgacctacgtgccagcccaggagaagaacttcaccacagcaccagccatctgccacgatggaaaggcacactttcctagggagggcgtgttcgtgtctaacggcacccactggtttgtgacacagcgcaatttctacgagccacagatcatcaccacagacaatacattcgtgagcggcaactgtgatgtggtgatcggcatcgtgaacaataccgtgtatgatccactgcagcccgagctggactcctttaaggaggagctggataagtacttcaagaatcacacctctcccgacgtggatctgggcgacatctccggcatcaatgcctctgtggtgaacatccagaaggagatcgaccggctgaacgaggtggccaagaatctgaacgagagcctgatcgatctgcaggagctgggcaagtatgagcagtacatcaagggctctggcagagagaacctgtatttccagggaggaggaggcagcggatacatccctgaggcaccaagggacggacaggcctacgtgcgcaaggatggcgagtgggtgctgctgtccacctttctgggccatcatcaccaccaccaccaccactga

SEQ ID NO: 1308 - DNA, 3846 bp, Artificial Sequence
  Description of Artificial Sequence: Synthetic polynucleotide
atgggcatcctgccaagcccaggaatgcccgccctgctgtctctggtgagcctgctgtccgtgctgctgatgggatgcgtggcagagacaggcacacagtgcgtgaacctgaccacaaggacccagctgccccctgcctataccaattctttcacacggggcgtgtactatcccgacaaggtgtttagaagcgatgtgctgcactccacacaggatctgtttctgcctttcttttctaacgtgacctggttccacgccatccacgtgtccggcaccaatggcacaaagcggttcgacaatcccgtgctgccttttaacgatggcgtgtacttcgccagcaccgagaagtccaacatcatcagaggctggatctttggcaccacactggactctaagacacagagcctgctgatcgtgaacaatgccaccaacgtggtgatcaaggtgtgcgagttccagttttgtgaaaatccattcctgggcgtgtactatcacaagaacaataagtcctggatggagaaagagtttcgcgtgtattctagcgccaacaattgcacatttgagtacgtgagccagcccttcctgatggacctgggtggcaagcagggcaatttcaagaacctgagggagttcgtgtttaagaatatcgatggctacttcaagatctacagcaagcacaccccaatcaacctggtgcgcgacctgccacagggattctccgccctggagccactgatggatctgcccatcggcatcaacatcacccggtttcagacactgctggccctgcacagatcctacctgacaccaggcgactcctctagcggatggaccgcaggagctgccgcctactatgtgggctatctgcagccccggaccttcctgctgaagtacaacgagaatggcaccatcacagacgcagtggattgcgccctggaccccctgtctgagacaaagtgtacactgaagagctttaccgtggagaagggcatctatcagacaagcaatttcagggtgcagcctaccgagtccatcgtgcgctttcccaatatcacaaacctgtgcccttttggcgaggtgttcaacgccaccagattcgccagcgtgtacgcctggaatcggaagagaatctccaactgcgtggccgactattctgtgctgtacaactccgcctctttcagcacctttaagtgctatggcgtgtctcccacaaagctgaatgatctgtgctttaccaacgtgtacgccgatagcttcgtgatcaggggagacgaagtgagacagatcgcaccaggacagacaggaaagatcgcagactacaattataagctgcctgacgatttcaccggctgcgtgatcgcctggaactccaacaatctggattctaaagtgggcggcaactacaattatctgtacaggctgtttcgcaagtccaatctgaagccattcgagcgggacatctccacagagatctaccaggccggctctaccccctgcaatggcgtggagggctttaactgttatttccctctgcagtcttacggcttccagccaacaaacggcgtgggctatcagccctacagagtggtggtgctgtcctttgagctgctgcacgcaccagcaacagtgtgcggcccaaagaagtctaccaatctggtgaagaacaagtgcgtgaacttcaacttcaacggactgaccggcacaggcgtgctgaccgagagcaataagaagttcctgccttttcagcagttcggcagggacatcgcagataacacagacgccgtgcgcgaccctcagaccctggagatcctggacatcacaccatgcagcttcggcggcgtgtccgtgatcacaccaggcaccaatacatccaaccaggtggccgtgctgtatcaggacgtgaattgtaccgaggtgcccaatgcaatccacgcagatcagctgacccctacatggcgggtgtactctaccggcagcaacgtgttccagacaagagccggatgcctgatcggagcagagcacgtgaacaatagctatgagtgcgacatccctatcggcgccggcatctgtgccagctaccagacccagacaaactccccatctggagcaggctccgtggccagccagtccatcatcgcctataccatgagcctgggcgccgagaacagcgtggcctactccaacaattctatcgccatccctaccaacttcacaatcagcgtgaccacagagatcctgccagtgtctatgaccaagacaagcgtggactgcacaatgtatatctgtggcgatagcaccgagtgctccaacctgctgctgcagtacggctccttttgtacccagctgaatagagccctgcaaggcatcgcccaagagcaggataagaacacacaggaggtgttcgcccaggtgaagcagatctacaagaccccacccatcaaggactttggcggcttcaacttcagccagatcctgcctgatccaagcaagccctccaagaggtcttttatcgaggacctgctgttcaacaaggtgaccctggccgatgccggcttcatcaagcagtatggagattgcctgggagacatcgcagcccgcgacctgatctgtgcccagaagtttaatggcctgaccgtgctgcctccactgctgacagatgagatgatcgcccagtacacatctgccctgctggccggcaccatcacaagcggatggaccttcggcgcaggagccgccctgcagatcccttttgccatgcagatggcctataggttcaacggcatcggcgtgacccagaatgtgctgtacgagaaccagaagctgatcgccaatcagtttaacaaagccatcggcaagatccaggactctctgtcctctacagccagcgccctgggcaagctgcaggatgtggtgaatcagaacgcccaggccctgaataccctggtgaagcagctgagctccaacttcggcgccatctctagcgtgctgaatgacatcctgagccggctggacccccctgaggcagaggtgcagatcgacaggctgatcacaggccgcctgcagagcctgcagacctacgtgacacagcagctgatcagggcagcagagatcagagcctccgccaatctggccgccaccaagatgagcgagtgcgtgctgggacagtccaagagggtggacttttgtggcaagggctatcacctgatgtctttcccacagagcgcccctcacggcgtggtgtttctgcacgtgacctacgtgccagcccaggagaagaacttcaccacagcaccagccatctgccacgatggaaaggcattttttcctagggagggcgtgttcgtgtctaacggcacccaatggtttgtgacacagcgcaatttctacgagccacagatcatcaccacagacaatacattcgtgagcggcaactgtgatgtggtgatcggcatcgtgaacaataccgtgtatgatccactgcagcccgagctggactcctttaaggaggagctggataagtacttcaagaatcacacctctcccgacgtggatctgggcgacatctccggcatcaatgcctctgtggtgaacatccagaaggagatcgaccggctgaacgaggtggccaagaatctgaacgagagcctgatcgatctgcaggagctgggcaagtatgagcagtacatcaagggctctggcagagagaacctgtatttccagggaggaggaggcagcggatacatccctgaggcaccaagggacggacaggcctacgtgcgcaaggatggcgagtgggtgctgctgtccacctttctgggccatcatcaccaccaccaccaccactga

SEQ ID NO: 1309 - DNA, 3846 bp, Artificial Sequence
  Description of Artificial Sequence: Synthetic polynucleotide
atgggcatcctgccaagcccaggaatgcccgccctgctgtctctggtgagcctgctgtccgtgctgctgatgggatgcgtggcagagacaggcacacagtgcgtgaacctgaccacaaggacccagctgccccctgcctataccaattctttcacacggggcgtgtactatcccgacaaggtgtttagaagctccgtgctgcactccacacaggatctgtttctgcctttcttttctaacgtgacctggttccacgccttgcacgtgaaaggcaccaatggcacaaagcggttcgacaatcccgtgctgccttttaacgatggcgtgtacttcgccgctatagagaagtccaacatcatcagaggctggatctttggcaccacactggactctaagacacagagcctgctgatcgtgaacaatgccaccaacgtggtgatcaaggtgtgcgagttccagttttgtaatgatccattcctgggcgtgtactatcacaagaacaataagtcctggatggagtctgagtttcgcgtgtattctagcgccaacaattgcacatttgagtacgtgagccagcccttcctgtacgacctgaatggcaagcagggcaatttccatcatctgagggagttcgtgtttaagaatatcgatggctacttcaagatctacagcaagtgggaaccaatcaacctggtgcgcgacctgccacagggattctccgccctggagccactggtggatctgcccatcggcatcaacatcacccggtttcagacatttctgagtctgtcgagatcctaccgaacaccaggcgactcctctagcggatggaccgcaggagctgccgcctactatgtgggctatctgcagccccggaccttcctgctgaagtacaacgagaatggcaccatcacagacgcagtggattgcgccctggaccccctgtctgagacaaagtgtacactgaagagctttaccgtggagaagggcatctatcagacaagcaatttcagggtgcagcctaccgagtccatcgtgcgctttcccaatatcacaaacctgtgcccttttggcgaggtgttcaacgccaccagattcgccagcgtgtacgcctggaatcggaagagaatctccaactgcgtggccgactattctgtgctgtacaactccgcctctttcagcacctttaagtgctatggcgtgtctcccacaaagctgaatgatctgtgctttaccaacgtgtacgccgatagcttcgtgatcaggggagacgaagtgagacagatcgcaccaggacagacaggaaagatcgcagactacaattataagctgcctgacgatttcaccggctgcgtgatcgcctggaactccaacaatctggattctaaagtgggcggcaactacaattatctgtacaggctgtttcgcaagtccaatctgaagccattcgagcgggacatctccacagagatctaccaggccggctctaccccctgcaatggcgtggagggctttaactgttatttccctctgcagtcttacggcttccagccaacaaacggcgtgggctatcagccctacagagtggtggtgctgtcctttgagctgctgcacgcaccagcaacagtgtgcggcccaaagaagtctaccaatctggtgaagaacaagtgcgtgaacttcaacttcaacggactgaccggcacaggcgtgctgaccgagagcaataagaagttcctgccttttcagcagttcggcagggacatcgcagataccacagacgccgtgcgcgaccctcagaccctggagatcctggacatcacaccatgcagcttcggcggcgtgtccgtgatcacaccaggcaccaatacatccaaccaggtggccgtgctgtatcaggacgtgaattgtaccgaggtgcccgtggcaatccacgcagatcagctgacccctacatggcgggtgtactctaccggcagcaacgtgttccagacaagagccggatgcctgatcggagcagagcacgtgaacaatagctatgagtgcgacatccctatcggcgccggcatctgtgccagctaccagacccagacaaactccccatctggagcaggctccgtggccagccagtccatcatcgcctataccatgagcctgggcgccgagaacagcgtggcctactccaacaattctatcgccatccctaccaacttcacaatcagcgtgaccacagagatcctgccagtgtctatgaccaagacaagcgtggactgcacaatgtatatctgtggcgatagcaccgagtgctccaacctgctgctgcagtacggctccttttgtacccagctgaatagagccctgacaggcatcgccgtggagcaggataagaacacacaggaggtgttcgcccaggtgaagcagatctacaagaccccacccatcaaggactttggcggcttcaacttcagccagatcctgcctgatccaagcaagccctccaagaggtcttttatcgaggacctgctgttcaacaaggtgaccctggccgatgccggcttcatcaagcagtatggagattgcctgggagacatcgcagcccgcgacctgatctgtgcccagaagtttaatggcctgaccgtgctgcctccactgctgacagatgagatgatcgcccagtacacatctgccctgctggccggcaccatcacaagcggatggaccttcggcgcaggagccgccctgcagatcccttttgccatgcagatggcctataggttcaacggcatcggcgtgacccagaatgtgctgtacgagaaccagaagctgatcgccaatcagtttaacagcgccatcggcaagatccaggactctctgtcctctacagccagcgccctgggcaagctgcaggatgtggtgaatcagaacgcccaggccctgaataccctggtgaagcagctgagctccaacttcggcgccatctctagcgtgctgaatgacatcctgagccggctggacccccctgaggcagaggtgcagatcgacaggctgatcacaggccgcctgcagagcctgcagacctacgtgacacagcagctgatcagggcagcagagatcagagcctccgccaatctggccgccaccaagatgagcgagtgcgtgctgggacagtccaagagggtggacttttgtggcaagggctatcacctgatgtctttcccacagagcgcccctcacggcgtggtgtttctgcacgtgacctacgtgccagcccaggagaagaacttcaccacagcaccagccatctgccacgatggaaaggcacactttcctagggagggcgtgttcgtgtctaacggcacccactggtttgtgacacagcgcaatttctacgagccacagatcatcaccacagacaatacattcgtgagcggcaactgtgatgtggtgatcggcatcgtgaacaataccgtgtatgatccactgcagcccgagctggactcctttaaggaggagctggataagtacttcaagaatcacacctctcccgacgtggatctgggcgacatctccggcatcaatgcctctgtggtgaacatccagaaggagatcgaccggctgaacgaggtggccaagaatctgaacgagagcctgatcgatctgcaggagctgggcaagtatgagcagtacatcaagggctctggcagagagaacctgtatttccagggaggaggaggcagcggatacatccctgaggcaccaagggacggacaggcctacgtgcgcaaggatggcgagtgggtgctgctgtccacctttctgggccatcatcaccaccaccaccaccactga

SEQ ID NO: 1310 - DNA, 3846 bp, Artificial Sequence
  Description of Artificial Sequence: Synthetic polynucleotide
atgggcatcctgccaagcccaggaatgcccgccctgctgtctctggtgagcctgctgtccgtgctgctgatgggatgcgtggcagagacaggcacacagtgcgtgaacctgaccacaaggacccagctgccccctgcctataccaattctttcacacggggcgtgtactatcccgacaaggtgtttagaagctccgtgctgcactccacacaggatctgtttctgcctttcttttctaacgtgacctggttccacgccatccacgtgtccggcaccaatggcacaaagcggttcgacaatcccgtgctgccttttaacgatggcgtgtacttcgccagcaccgagaagtccaacatcatcagaggctggatctttggcaccacactggactctaagacacagagcctgctgatcgtgaacaatgccaccaacgtggtgatcaaggtgtgcgagttccagttttgtaatgatccattcctgggcgtgtactatcacaagaacaataagtcctggatggagtctgagtttcgcgtgtattctagcgccaacaattgcacatttgagtacgtgagccagcccttcctgatggacctggagggcaagcagggcaatttcaagaacctgagggagttcgtgtttaagaatatcgatggctacttcaagatctacagcaagcacaccccaatcaacctggtgcgcgacctgccacagggattctccgccctggagccactggtggatctgcccatcggcatcaacatcacccggtttcagacactgctggccctgcacagatcctacctgacaccaggcgactcctctagcggatggaccgcaggagctgccgcctactatgtgggctatctgcagccccggaccttcctgctgaagtacaacgagaatggcaccatcacagacgcagtggattgcgccctggaccccctgtctgagacaaagtgtacactgaagagctttaccgtggagaagggcatctatcagacaagcaatttcagggtgcagcctaccgagtccatcgtgcgctttcccaatatcacaaacctgtgcccttttggcgaggtgttcaacgccaccagattcgccagcgtgtacgcctggaatcggaagagaatctccaactgcgtggccgactattctgtgctgtacaactccgcctctttcagcacctttaagtgctatggcgtgtctcccacaaagctgaatgatctgtgctttaccaacgtgtacgccgatagcttcgtgatcaggggagacgaagtgagacagatcgcaccaggacagacaggaaagatcgcagactacaattataagctgcctgacgatttcaccggctgcgtgatcgcctggaactccaacaatctggattctaaagtgggcggcaactacaattatctgtacaggctgtttcgcaagtccaatctgaagccattcgagcgggacatctccacagagatctaccaggccggctctaccccctgcaatggcgtggagggctttaactgttatttccctctgcagtcttacggcttccagccaacaaacggcgtgggctatcagccctacagagtggtggtgctgtcctttgagctgctgcacgcaccagcaacagtgtgcggcccaaagaagtctaccaatctggtgaagaacaagtgcgtgaacttcaacttcaacggactgaccggcacaggcgtgctgaccgagagcaataagaagttcctgccttttcagcagttcggcagggacatcgcagataccacagacgccgtgcgcgaccctcagaccctggagatcctggacatcacaccatgcagcttcggcggcgtgtccgtgatcacaccaggcaccaatacatccaaccaggtggccgtgctgtatcaggacgtgaattgtaccgaggtgcccgtggcaatccacgcagatcagctgacccctacatggcgggtgtactctaccggcagcaacgtgttccagacaagagccggatgcctgatcggagcagagcacgtgaacaatagctatgagtgcgacatccctatcggcgccggcatctgtgccagctaccagacccagacaaactccccatctggagcaggctccgtggccagccagtccatcatcgcctataccatgagcctgggcgccgagaacagcgtggcctactccaacaattctatcgccatccctaccaacttcacaatcagcgtgaccacagagatcctgccagtgtctatgaccaagacaagcgtggactgcacaatgtatatctgtggcgatagcaccgagtgctccaacctgctgctgcagtacggctccttttgtacccagctgaatagagccctgacaggcatcgccgtggagcaggataagaacacacaggaggtgttcgcccaggtgaagcagatctacaagaccccacccatcaaggactttggcggcttcaacttcagccagatcctgcctgatccaagcaagccctccaagaggtcttttatcgaggacctgctgttcaacaaggtgaccctggccgatgccggcttcgtcaagcagtatggagattgcctgggagacatcgcagcccgcgacctgatctgtgcccagaagtttaatggcctgaccgtgctgcctccactgctgacagatgagatgatcgcccagtacacatctgccctgctggccggcaccatcacaagcggatggaccttcggcgcaggagccgccctgcagatcccttttgccatgcagatggcctataggttcaacggcatcggcgtgacccagaatgtgctgtacgagaaccagaagctgatcgccaatcagtttaacagcgccatcggcaagatccaggactctctgtcctctacagccagcgccctgggcaagctgcaggatgtggtgaatcagaacgcccaggccctgaataccctggtgaagcagctgagctccaacttcggcgccatctctagcgtgctgaatgacatcctgagccggctggacccccctgaggcagaggtgcagatcgacaggctgatcacaggccgcctgcagagcctgcagacctacgtgacacagcagctgatcagggcagcagagatcagagcctccgccaatctggccgccaccaagatgagcgagtgcgtgctgggacagtccaagagggtggacttttgtggcaagggctatcacctgatgtctttcccacagagcgcccctcacggcgtggtgtttctgcacgtgacctacgtgccagcccaggagaagaacttcaccacagcaccagccatctgccacgatggaaaggcacactttcctagggagggcgtgttcgtgtctaacggcacccactggtttgtgacacagcgcaatttctacgagccacagatcatcaccacagacaatacattcgtgagcggcaactgtgatgtggtgatcggcatcgtgaacaataccgtgtatgatccactgcagcccgagctggactcctttaaggaggagctggataagtacttcaagaatcacacctctcccgacgtggatctgggcgacatctccggcatcaatgcctctgtggtgaacatccagaaggagatcgaccggctgaacgaggtggccaagaatctgaacgagagcctgatcgatctgcaggagctgggcaagtatgagcagtacatcaagggctctggcagagagaacctgtatttccagggaggaggaggcagcggatacatccctgaggcaccaagggacggacaggcctacgtgcgcaaggatggcgagtgggtgctgctgtccacctttctgggccatcatcaccaccaccaccaccactga

SEQ ID NO: 1311 - DNA, 3846 bp, Artificial Sequence
  Description of Artificial Sequence: Synthetic polynucleotide
atgggcatcctgccaagcccaggaatgcccgccctgctgtctctggtgagcctgctgtccgtgctgctgatgggatgcgtggcagagacaggcacacagtgcgtgaacctgaccacaaggacccagctgccccctgcctataccaattctttcacacggggcgtgtactatcccgacaaggtgtttagaagctccgtgctgcactccacacaggatctgtttctgcctttcttttctaacgtgacctggttccacgccatccacgtgtccggcaccaatggcacaaagcggttcgacaatcccgtgctgccttttaacgatggcgtgtacttcgccagcaccgagaagtccaacatcatcagaggctggatctttggcaccacactggactctaagacacagagcctgctgatcgtgaacaatgccaccaacgtggtgatcaaggtgtgcgagttccagttttgtaatgatccattcctgggcgtgtactatcacaagaacaataagtcctggatggagtctgagtttcgcgtgtattctagcgccaacaattgcacatttgagtacgtgagccagcccttcctgatggacctggagggcaagcagggcaatttcaagaacctgagggagttcgtgtttaagaatatcgatggctacttcaagatctacagcaagcacaccccaatcaacctggtgcgcgacctgccacagggattctccgccctggagccactggtggatctgcccatcggcatcaacatcacccggtttcagacactgctggccctgcacagatcctacctgacaccaggcgactcctctagcggatggaccgcaggagctgccgcctactatgtgggctatctgcagccccggaccttcctgctgaagtacaacgagaatggcaccatcacagacgcagtggattgcgccctggaccccctgtctgagacaaagtgtacactgaagagctttaccgtggagaagggcatctatcagacaagcaatttcagggtgcagcctaccgagtccatcgtgcgctttcccaatatcacaaacctgtgcccttttggcgaggtgttcaacgccaccagattcgccagcgtgtacgcctggaatcggaagagaatctccaactgcgtggccgactattctgtgctgtacaactccgcctctttcagcacctttaagtgctatggcgtgtctcccacaaagctgaatgatctgtgctttaccaacgtgtacgccgatagcttcgtgatcaggggagacgaagtgagacagatcgcaccaggacagacaggaaagatcgcagactacaattataagctgcctgacgatttcaccggctgcgtgatcgcctggaactccaacaatctggattctaaagtgggcggcaactacaattatctgtacaggctgtttcgcaagtccaatctgaagccattcgagcgggacatctccacagagatctaccaggccggctctaccccctgcaatggcgtggagggctttaactgttatttccctctgcagtcttacggcttccagccaacaaacggcgtgggctatcagccctacagagtggtggtgctgtcctttgagctgctgcacgcaccagcaacagtgtgcggcccaaagaagtctaccaatctggtgaagaacaagtgcgtgaacttcaacttcaacggactgaccggcacaggcgtgctgaccgagagcaataagaagttcctgccttttcagcagttcggcagggacatcgcagataccacagacgccgtgcgcgaccctcagaccctggagatcctggacatcacaccatgcagcttcggcggcgtgtccgtgatcacaccaggcaccaatacatccaaccaggtggccgtgctgtatcaggacgtgaattgtaccgaggtgcccgtggcaatccacgcagatcagctgacccctacatggcgggtgtactctaccggcagcaacgtgttccagacaagagccggatgcctgatcggagcagagcacgtgaacaatagctatgagtgcgacatccctatcggcgccggcatctgtgccagctaccagacccagacaaactccccatctggagcaggctccgtggccagccagtccatcatcgcctataccatgagcctgggcgccgagaacagcgtggcctactccaacaattctatcgccatccctaccaacttcgttatcagcgtgaccacagagatcctgccagtgtctatgaccaagacaagcgtggactgcacaatgtatatctgtggcgatagcaccgagtgctccaacctgctgctgcagtacggctccttttgtacccagctgaatagagccctgacaggcatcgccgtggagcaggataagaacacacaggaggtgttcgcccaggtgaagcagatctacaagaccccacccatcaaggactttggcggcttcaacttcagccagatcctgcctgatccaagcaagccctccaagaggtcttttatcgaggacctgctgttcaacaaggtgaccctggccgatgccggcttcatcaagcagtatggagattgcctgggagacatcgcagcccgcgacctgatctgtgcccagaagtttaatggcctgaccgtgctgcctccactgctgacagatgagatgatcgcccagtacacatctgccctgctggccggcaccatcacaagcggatggaccttcggcgcaggagccgccctgcagatcccttttgccatgcagatggcctataggttcaacggcatcggcgtgacccagaatgtgctgtacgagaaccagaagctgatcgccaatcagtttaacagcgccatcggcaagatccaggactctctgtcctctacagccagcgccctgggcaagctgcaggatgtggtgaatcagaacgcccaggccctgaataccctggtgaagcagctgagctccaacttcggcgccatctctagcgtgctgaatgacatcctgagccggctggacccccctgaggcagaggtgcagatcgacaggctgatcacaggccgcctgcagagcctgcagacctacgtgacacagcagctgatcagggcagcagagatcagagcctccgccaatctggccgccaccaagatgagcgagtgcgtgctgggacagtccaagagggtggacttttgtggcaagggctatcacctgatgtctttcccacagagcgcccctcacggcgtggtgtttctgcacgtgacctacgtgccagcccaggagaagaacttcaccacagcaccagccatctgccacgatggaaaggcacactttcctagggagggcgtgttcgtgtctaacggcacccactggtttgtgacacagcgcaatttctacgagccacagatcatcaccacagacaatacattcgtgagcggcaactgtgatgtggtgatcggcatcgtgaacaataccgtgtatgatccactgcagcccgagctggactcctttaaggaggagctggataagtacttcaagaatcacacctctcccgacgtggatctgggcgacatctccggcatcaatgcctctgtggtgaacatccagaaggagatcgaccggctgaacgaggtggccaagaatctgaacgagagcctgatcgatctgcaggagctgggcaagtatgagcagtacatcaagggctctggcagagagaacctgtatttccagggaggaggaggcagcggatacatccctgaggcaccaagggacggacaggcctacgtgcgcaaggatggcgagtgggtgctgctgtccacctttctgggccatcatcaccaccaccaccaccactga

SEQ ID NO: 1312 - DNA, 3846 bp, Artificial Sequence
  Description of Artificial Sequence: Synthetic polynucleotide
atgggcatcctgccaagcccaggaatgcccgccctgctgtctctggtgagcctgctgtccgtgctgctgatgggatgcgtggcagagacaggcacacagtgcgtgaacctgaccacaaggacccagctgccccctgcctataccaattctttcacacggggcgtgtactatcccgacaaggtgtttagaagctccgtgctgcactccacacaggatctgtttctgcctttcttttctaacgtgacctggttccacgccatccacgtgtccggcaccaatggcacaaagcggttcgacaatcccgtgctgccttttaacgatggcgtgtacttcgccagcaccgagaagtccaacatcatcagaggctggatctttggcaccacactggactctaagacacagagcctgctgatcgtgaacaatgccaccaacgtggtgatcaaggtgtgcgagttccagttttgtaatgatccattcctgggcgtgtactatcacaagaacaataagtcctggatggagtctgagtttcgcgtgtattctagcgccaacaattgcacatttgagtacgtgagccagcccttcctgatggacctggagggcaagcagggcaatttcaagaacctgagggagttcgtgtttaagaatatcgatggctacttcaagatctacagcaagcacaccccaatcaacctggtgcgcgacctgccacagggattctccgccctggagccactggtggatctgcccatcggcatcaacatcacccggtttcagacactgctggccctgcacagatcctacctgacaccaggcgactcctctagcggatggaccgcaggagctgccgcctactatgtgggctatctgcagccccggaccttcctgctgaagtacaacgagaatggcaccatcacagacgcagtggattgcgccctggaccccctgtctgagacaaagtgtacactgaagagctttaccgtggagaagggcatctatcagacaagcaatttcagggtgcagcctaccgagtccatcgtgcgctttcccaatatcacaaacctgtgcccttttggcgaggtgttcaacgccaccagattcgccagcgtgtacgcctggaatcggaagagaatctccaactgcgtggccgactattctgtgctgtacaactccgcctctttcagcacctttaagtgctatggcgtgtctcccacaaagctgaatgatctgtgctttaccaacgtgtacgccgatagcttcgtgatcaggggagacgaagtgagacagatcgcaccaggacagacaggaaagatcgcagactacaattataagctgcctgacgatttcaccggctgcgtgatcgcctggaactccaacaatctggattctaaagtgggcggcaactacaattatctgtacaggctgtttcgcaagtccaatctgaagccattcgagcgggacatctccacagagatctaccaggccggctctaccccctgcaatggcgtggagggctttaactgttatttccctctgcagtcttacggcttccagccaacaaacggcgtgggctatcagccctacagagtggtggtgctgtcctttgagctgctgcacgcaccagcaacagtgtgcggcccaaagaagtctaccaatctggtgaagaacaagtgcgtgaacttcaacttcaacggactgaccggcacaggcgtgctgaccgagagcaataagaagttcctgccttttcagcagttcggcagggacatcgcagataccacagacgccgtgcgcgaccctcagaccctggagatcctggacatcacaccatgcagcttcggcggcgtgtccgtgatcacaccaggcaccaatacatccaaccaggtggccgtgctgtatcaggacgtgaattgtaccgaggtgcccgtggcaatccacgcagatcagctgacccctacatggcgggtgtactctaccggcagcaacgtgttccagacaagagccggatgcctgatcggagcagagcacgtgaacaatagctatgagtgcgacatccctatcggcgccggcatctgtgccagctaccagacccagacaaactccccatctggagcaggctccgtggccagccagtccatcatcgcctataccatgagcctgggcgccgagaacagcgtggcctactccaacaattctatcgccatccctaccaacttcacaatcagcgtgaccacagagatcctgccagtgtctatgaccaagacaagcgtggactgcacaatgtatatctgtggcgatagcaccgagtgctccaacctgctgctgcagtacggctccttttgtacccagctgaatagagccctgacaggcatcgccgtggagcaggataagaacacacaggaggtgttcgcccaggtgaagcagatctacaagaccccacccatcaaggactttggcggcttcaacttcagccagatcctgcctgatccaagcaagccctccaagaggtcttttatcgaggacctgctgttcaacaaggtgaccctggccgatgccggcttcatcaagcagtatggagattgcctgggagacatcgcagcccgcgacctgatctgtgcccagaagtttaatggcctgaccgtgctgcctccactgctgacagatgagatgatcgccgcttacacatctgccctgctggccggcaccatcacaagcggatggaccttcggcgcaggagccgccctgcagatcccttttgccatgcagatggcctataggttcaacggcatcggcgtgacccagaatgtgctgtacgagaaccagaagctgatcgccaatcagtttaacagcgccatcggcaagatccaggactctctgtcctctacagccagcgccctgggcaagctgcaggatgtggtgaatcagaacgcccaggccctgaataccctggtgaagcagctgagctccaacttcggcgccatctctagcgtgctgaatgacatcctgagccggctggacccccctgaggcagaggtgcagatcgacaggctgatcacaggccgcctgcagagcctgcagacctacgtgacacagcagctgatcagggcagcagagatcagagcctccgccaatctggccgccaccaagatgagcgagtgcgtgctgggacagtccaagagggtggacttttgtggcaagggctatcacctgatgtctttcccacagagcgcccctcacggcgtggtgtttctgcacgtgacctacgtgccagcccaggagaagaacttcaccacagcaccagccatctgccacgatggaaaggcacactttcctagggagggcgtgttcgtgtctaacggcacccactggtttgtgacacagcgcaatttctacgagccacagatcatcaccacagacaatacattcgtgagcggcaactgtgatgtggtgatcggcatcgtgaacaataccgtgtatgatccactgcagcccgagctggactcctttaaggaggagctggataagtacttcaagaatcacacctctcccgacgtggatctgggcgacatctccggcatcaatgcctctgtggtgaacatccagaaggagatcgaccggctgaacgaggtggccaagaatctgaacgagagcctgatcgatctgcaggagctgggcaagtatgagcagtacatcaagggctctggcagagagaacctgtatttccagggaggaggaggcagcggatacatccctgaggcaccaagggacggacaggcctacgtgcgcaaggatggcgagtgggtgctgctgtccacctttctgggccatcatcaccaccaccaccaccactga

SEQ ID NO: 1313 - DNA, 3846 bp, Artificial Sequence
  Description of Artificial Sequence: Synthetic polynucleotide
atgggcatcctgccaagcccaggaatgcccgccctgctgtctctggtgagcctgctgtccgtgctgctgatgggatgcgtggcagagacaggcacacagtgcgtgaacctgaccacaaggacccagctgccccctgcctataccaattctttcacacggggcgtgtactatcccgacaaggtgtttagaagctccgtgctgcactccacacaggatctgtttctgcctttcttttctaacgtgacctggttccacgccatccacgtgtccggcaccaatggcacaaagcggttcgacaatcccgtgctgccttttaacgatggcgtgtacttcgccagcaccgagaagtccaacatcatcagaggctggatctttggcaccacactggactctaagacacagagcctgctgatcgtgaacaatgccaccaacgtggtgatcaaggtgtgcgagttccagttttgtaatgatccattcctgggcgtgtactatcacaagaacaataagtcctggatggagtctgagtttcgcgtgtattctagcgccaacaattgcacatttgagtacgtgagccagcccttcctgatggacctggagggcaagcagggcaatttcaagaacctgagggagttcgtgtttaagaatatcgatggctacttcaagatctacagcaagcacaccccaatcaacctggtgcgcgacctgccacagggattctccgccctggagccactggtggatctgcccatcggcatcaacatcacccggtttcagacactgctggccctgcacagatcctacctgacaccaggcgactcctctagcggatggaccgcaggagctgccgcctactatgtgggctatctgcagccccggaccttcctgctgaagtacaacgagaatggcaccatcacagacgcagtggattgcgccctggaccccctgtctgagacaaagtgtacactgaagagctttaccgtggagaagggcatctatcagacaagcaatttcagggtgcagcctaccgagtccatcgtgcgctttcccaatatcacaaacctgtgcccttttggcgaggtgttcaacgccaccagattcgccagcgtgtacgcctggaatcggaagagaatctccaactgcgtggccgactattctgtgctgtacaactccgcctctttcagcacctttaagtgctatggcgtgtctcccacaaagctgaatgatctgtgctttaccaacgtgtacgccgatagcttcgtgatcaggggagacgaagtgagacagatcgcaccaggacagacaggaaagatcgcagactacaattataagctgcctgacgatttcaccggctgcgtgatcgcctggaactccaacaatctggattctaaagtgggcggcaactacaattatctgtacaggctgtttcgcaagtccaatctgaagccattcgagcgggacatctccacagagatctaccaggccggctctaccccctgcaatggcgtggagggctttaactgttatttccctctgcagtcttacggcttccagccaacaaacggcgtgggctatcagccctacagagtggtggtgctgtcctttgagctgctgcacgcaccagcaacagtgtgcggcccaaagaagtctaccaatctggtgaagaacaagtgcgtgaacttcaacttcaacggactgaccggcacaggcgtgctgaccgagagcaataagaagttcctgccttttcagcagttcggcagggacatcgcagataccacagacgccgtgcgcgaccctcagaccctggagatcctggacatcacaccatgcagcttcggcggcgtgtccgtgatcacaccaggcaccaatacatccaaccaggtggccgtgctgtatcaggacgtgaattgtaccgaggtgcccgtggcaatccacgcagatcagctgacccctacatggcgggtgtactctaccggcagcaacgtgttccagacaagagccggatgcctgatcggagcagagcacgtgaacaatagctatgagtgcgacatccctatcggcgccggcatctgtgccagctaccagacccagacaaactccccatctggagcaggctccgtggccagccagtccatcatcgcctataccatgagcctgggcgccgagaacagcgtggcctactccaacaattctatcgccatccctaccaacttcacaatcagcgtgaccacagagatcctgccagtgtctatgaccaagacaagcgtggactgcacaatgtatatctgtggcgatagcaccgagtgctccaacctgctgctgcagtacggctccttttgtacccagctgaatagagccctgacaggcatcgccgtggagcaggataagaacacacaggaggtgttcgcccaggtgaagcagatctacaagaccccacccatcaaggactttggcggcttcaacttcagccagatcctgcctgatccaagcaagccctccaagaggtcttttatcgaggacctgctgttcaacaaggtgaccctggccgatgccggcttcatcaagcagtatggagattgcctgggagacatcgcagcccgcgacctgatctgtgcccagaagtttaatggcctgaccgtgctgcctccactgctgacagatgagatgatcgcccagtacacatctgccctgctggccggcaccatcacaagcggatggaccttcggcgcaggagccgccctgcagatcccttttgccatgcagatggcctataggttcaacggcatcggcgtgacccagaatgtgctgtacgagaaccagaagctgatcgccaatcagtttaacagcgccatcggcaagatccaggactctctgtcctctacagccagcgccctgggcaagctgcaggatgtggtgaatcagaacgcccaggccctgaataccctggtgaagcagctgagctccaacttcggcgccatctctagcgtgctgaatgacatcctgagccggctggaccaacctgaggcagaggtgcagatcgacaggctgatcacaggccgcctgcagagcctgcagacctacgtgacacagcagctgatcagggcagcagagatcagagcctccgccaatctggccgccaccaagatgagcgagtgcgtgctgggacagtccaagagggtggacttttgtggcaagggctatcacctgatgtctttcccacagagcgcccctcacggcgtggtgtttctgcacgtgacctacgtgccagcccaggagaagaacttcaccacagcaccagccatctgccacgatggaaaggcacactttcctagggagggcgtgttcgtgtctaacggcacccactggtttgtgacacagcgcaatttctacgagccacagatcatcaccacagacaatacattcgtgagcggcaactgtgatgtggtgatcggcatcgtgaacaataccgtgtatgatccactgcagcccgagctggactcctttaaggaggagctggataagtacttcaagaatcacacctctcccgacgtggatctgggcgacatctccggcatcaatgcctctgtggtgaacatccagaaggagatcgaccggctgaacgaggtggccaagaatctgaacgagagcctgatcgatctgcaggagctgggcaagtatgagcagtacatcaagggctctggcagagagaacctgtatttccagggaggaggaggcagcggatacatccctgaggcaccaagggacggacaggcctacgtgcgcaaggatggcgagtgggtgctgctgtccacctttctgggccatcatcaccaccaccaccaccactga

SEQ ID NO: 1314 - DNA, 3846 bp, Artificial Sequence
  Description of Artificial Sequence: Synthetic polynucleotide
atgggcatcctgccaagcccaggaatgcccgccctgctgtctctggtgagcctgctgtccgtgctgctgatgggatgcgtggcagagacaggcacacagtgcgtgaacctgaccacaaggacccagctgccccctgcctataccaattctttcacacggggcgtgtactatcccgacaaggtgtttagaagctccgtgctgcactccacacaggatctgtttctgcctttcttttctaacgtgacctggttccacgccatccacgtgtccggcaccaatggcacaaagcggttcgacaatcccgtgctgccttttaacgatggcgtgtacttcgccagcaccgagaagtccaacatcatcagaggctggatctttggcaccacactggactctaagacacagagcctgctgatcgtgaacaatgccaccaacgtggtgatcaaggtgtgcgagttccagttttgtaatgatccattcctgggcgtgtactatcacaagaacaataagtcctggatggagtctgagtttcgcgtgtattctagcgccaacaattgcacatttgagtacgtgagccagcccttcctgatggacctggagggcaagcagggcaatttcaagaacctgagggagttcgtgtttaagaatatcgatggctacttcaagatctacagcaagcacaccccaatcaacctggtgcgcgacctgccacagggattctccgccctggagccactggtggatctgcccatcggcatcaacatcacccggtttcagacactgctggccctgcacagatcctacctgacaccaggcgactcctctagcggatggaccgcaggagctgccgcctactatgtgggctatctgcagccccggaccttcctgctgaagtacaacgagaatggcaccatcacagacgcagtggattgcgccctggaccccctgtctgagacaaagtgtacactgaagagctttaccgtggagaagggcatctatcagacaagcaatttcagggtgcagcctaccgagtccatcgtgcgctttcccaatatcacaaacctgtgcccttttggcgaggtgttcaacgccaccagattcgccagcgtgtacgcctggaatcggaagagaatctccaactgcgtggccgactattctgtgctgtacaactccgcctctttcagcacctttaagtgctatggcgtgtctcccacaaagctgaatgatctgtgctttaccaacgtgtacgccgatagcttcgtgatcaggggagacgaagtgagacagatcgcaccaggacagacaggaaagatcgcagactacaattataagctgcctgacgatttcaccggctgcgtgatcgcctggaactccaacaatctggattctaaagtgggcggcaactacaattatctgtacaggctgtttcgcaagtccaatctgaagccattcgagcgggacatctccacagagatctaccaggccggctctaccccctgcaatggcgtggagggctttaactgttatttccctctgcagtcttacggcttccagccaacaaacggcgtgggctatcagccctacagagtggtggtgctgtcctttgagctgctgcacgcaccagcaacagtgtgcggcccaaagaagtctaccaatctggtgaagaacaagtgcgtgaacttcaacttcaacggactgaccggcacaggcgtgctgaccgagagcaataagaagttcctgccttttcagcagttcggcagggacatcgcagataccacagacgccgtgcgcgaccctcagaccctggagatcctggacatcacaccatgcagcttcggcggcgtgtccgtgatcacaccaggcaccaatacatccaaccaggtggccgtgctgtatcaggacgtgaattgtaccgaggtgcccgtggcaatccacgcagatcagctgacccctacatggcgggtgtactctaccggcagcaacgtgttccagacaagagccggatgcctgatcggagcagagcacgtgaacaatagctatgagtgcgacatccctatcggcgccggcatctgtgccagctaccagacccagacaaactccccatctggagcaggctccgtggccagccagtccatcatcgcctataccatgagcctgggcgccgagaacagcgtggcctactccaacaattctatcgccatccctaccaacttcacaatcagcgtgaccacagagatcctgccagtgtctatgaccaagacaagcgtggactgcacaatgtatatctgtggcgatagcaccgagtgctccaacctgctgctgcagtacggctccttttgtacccagctgaatagagccctggcgggcatcgccgtggagcaggataagaacacacaggaggtgttcgcccaggtgaagcagatctacaagaccccacccatcaaggactttggcggcttcaacttcagccagatcctgcctgatccaagcaagccctccaagaggtcttttatcgaggacctgctgttcaacaaggtgaccctggccgatgccggcttcatcaagcagtatggagattgcctgggagacatcgcagcccgcgacctgatctgtgcccagaagtttaatggcctgaccgtgctgcctccactgctgacagatgagatgatcgcccagtacacatctgccctgctggccggcaccatcacaagcggatggaccttcggcgcaggagccgccctgcagatcccttttgccatgcagatggcctataggttcaacggcatcggcgtgacccagaatgtgctgtacgagaaccagaagctgatcgccaatcagtttaacagcgccatcggcaagatccaggactctctgtcctctacagccagcgccctgggcaagctgcaggatgtggtgaatcagaacgcccaggccctgaataccctggtgaagcagctgagctccaacttcggcgccatctctagcgtgctgaatgacatcctgagccggctggacccccctgaggcagaggtgcagatcgacaggctgatcacaggccgcctgcagagcctgcagacctacgtgacacagcagctgatcagggcagcagagatcagagcctccgccaatctggccgccaccaagatgagcgagtgcgtgctgggacagtccaagagggtggacttttgtggcaagggctatcacctgatgtctttcccacagagcgcccctcacggcgtggtgtttctgcacgtgacctacgtgccagcccaggagaagaacttcaccacagcaccagccatctgccacgatggaaaggcacactttcctagggagggcgtgttcgtgtctaacggcacccactggtttgtgacacagcgcaatttctacgagccacagatcatcaccacagacaatacattcgtgagcggcaactgtgatgtggtgatcggcatcgtgaacaataccgtgtatgatccactgcagcccgagctggactcctttaaggaggagctggataagtacttcaagaatcacacctctcccgacgtggatctgggcgacatctccggcatcaatgcctctgtggtgaacatccagaaggagatcgaccggctgaacgaggtggccaagaatctgaacgagagcctgatcgatctgcaggagctgggcaagtatgagcagtacatcaagggctctggcagagagaacctgtatttccagggaggaggaggcagcggatacatccctgaggcaccaagggacggacaggcctacgtgcgcaaggatggcgagtgggtgctgctgtccacctttctgggccatcatcaccaccaccaccaccactga

SEQ ID NO: 1315 - DNA, 3846 bp, Artificial Sequence
  Description of Artificial Sequence: Synthetic polynucleotide
atgggcatcctgccaagcccaggaatgcccgccctgctgtctctggtgagcctgctgtccgtgctgctgatgggatgcgtggcagagacaggcacacagtgcgtgaacctgaccacaaggacccagctgccccctgcctataccaattctttcacacggggcgtgtactatcccgacaaggtgtttagaagctccgtgctgcactccacacaggatctgtttctgcctttcttttctaacgtgacctggttccacgccatccacgtgtccggcaccaatggcacaaagcggttcgacaatcccgtgctgccttttggggatggcgtgtacttcgccagcaccgagaagtccaacatcatcagaggctggatctttggcaccacactggactctaagacacagagcctgctgatcgtgaacaatgccaccaacgtggtgatcaaggtgtgcgagttccagttttgtaatgatccattcctgggcgtgtactatcacaagaacaataagtcctggatggagtctgagtttcgcgtgtattctagcgccaacaattgcacatttgagtacgtgagccagcccttcctgatggacctggagggcaagcagggcaatttcaagaacctgagggagttcgtgtttaagaatatcgatggctacttcaagatctacagcaagcacaccccaatcaacctggtgcgcgacctgccacagggattctccgccctggagccactggtggatctgcccatcggcatcaacatcacccggtttcagacactgctggccctgcacagatcctacctgacaccaggcgactcctctagcggatggaccgcaggagctgccgcctactatgtgggctatctgcagccccggaccttcctgctgaagtacaacgagaatggcaccatcacagacgcagtggattgcgccctggaccccctgtctgagacaaagtgtacactgaagagctttaccgtggagaagggcatctatcagacaagcaatttcagggtgcagcctaccgagtccatcgtgcgctttcccaatatcacaaacctgtgcccttttggcgaggtgttcaacgccaccagattcgccagcgtgtacgcctggaatcggaagagaatctccaactgcgtggccgactattctgtgctgtacaactccgcctctttcagcacctttaagtgctatggcgtgtctcccacaaagctgaatgatctgtgctttaccaacgtgtacgccgatagcttcgtgatcaggggagacgaagtgagacagatcgcaccaggacagacaggaaagatcgcagactacaattataagctgcctgacgatttcaccggctgcgtgatcgcctggaactccaacaatctggattctaaagtgggcggcaactacaattatctgtacaggctgtttcgcaagtccaatctgaagccattcgagcgggacatctccacagagatctaccaggccggctctaccccctgcaatggcgtggagggctttaactgttatttccctctgcagtcttacggcttccagccaacaaacggcgtgggctatcagccctacagagtggtggtgctgtcctttgagctgctgcacgcaccagcaacagtgtgcggcccaaagaagtctaccaatctggtgaagaacaagtgcgtgaacttcaacttcaacggactgaccggcacaggcgtgctgaccgagagcaataagaagttcctgccttttcagcagttcggcagggacatcgcagataccacagacgccgtgcgcgaccctcagaccctggagatcctggacatcacaccatgcagcttcggcggcgtgtccgtgatcacaccaggcaccaatacatccaaccaggtggccgtgctgtatcaggacgtgaattgtaccgaggtgcccgtggcaatccacgcagatcagctgacccctacatggcgggtgtactctaccggcagcaacgtgttccagacaagagccggatgcctgatcggagcagagcacgtgaacaatagctatgagtgcgacatccctatcggcgccggcatctgtgccagctaccagacccagacaaactccccatctggagcaggctccgtggccagccagtccatcatcgcctataccatgagcctgggcgccgagaacagcgtggcctactccaacaattctatcgccatccctaccaacttcacaatcagcgtgaccacagagatcctgccagtgtctatgaccaagacaagcgtggactgcacaatgtatatctgtggcgatagcaccgagtgctccaacctgctgctgcagtacggctccttttgtacccagctgaatagagccctgacaggcatcgccgtggagcaggataagaacacacaggaggtgttcgcccaggtgaagcagatctacaagaccccacccatcaaggactttggcggcttcaacttcagccagatcctgcctgatccaagcaagccctccaagaggtcttttatcgaggacctgctgttcaacaaggtgaccctggccgatgccggcttcatcaagcagtatggagattgcctgggagacatcgcagcccgcgacctgatctgtgcccagaagtttaatggcctgaccgtgctgcctccactgctgacagatgagatgatcgcccagtacacatctgccctgctggccggcaccatcacaagcggatggaccttcggcgcaggagccgccctgcagatcccttttgccatgcagatggcctataggttcaacggcatcggcgtgacccagaatgtgctgtacgagaaccagaagctgatcgccaatcagtttaacagcgccatcggcaagatccaggactctctgtcctctacagccagcgccctgggcaagctgcaggatgtggtgaatcagaacgcccaggccctgaataccctggtgaagcagctgagctccaacttcggcgccatctctagcgtgctgaatgacatcctgagccggctggacccccctgaggcagaggtgcagatcgacaggctgatcacaggccgcctgcagagcctgcagacctacgtgacacagcagctgatcagggcagcagagatcagagcctccgccaatctggccgccaccaagatgagcgagtgcgtgctgggacagtccaagagggtggacttttgtggcaagggctatcacctgatgtctttcccacagagcgcccctcacggcgtggtgtttctgcacgtgacctacgtgccagcccaggagaagaacttcaccacagcaccagccatctgccacgatggaaaggcacactttcctagggagggcgtgttcgtgtctaacggcacccactggtttgtgacacagcgcaatttctacgagccacagatcatcaccacagacaatacattcgtgagcggcaactgtgatgtggtgatcggcatcgtgaacaataccgtgtatgatccactgcagcccgagctggactcctttaaggaggagctggataagtacttcaagaatcacacctctcccgacgtggatctgggcgacatctccggcatcaatgcctctgtggtgaacatccagaaggagatcgaccggctgaacgaggtggccaagaatctgaacgagagcctgatcgatctgcaggagctgggcaagtatgagcagtacatcaagggctctggcagagagaacctgtatttccagggaggaggaggcagcggatacatccctgaggcaccaagggacggacaggcctacgtgcgcaaggatggcgagtgggtgctgctgtccacctttctgggccatcatcaccaccaccaccaccactga

SEQ ID NO: 1316 - DNA, 3846 bp, Artificial Sequence
  Description of Artificial Sequence: Synthetic polynucleotide
atgggcatcctgccaagcccaggaatgcccgccctgctgtctctggtgagcctgctgtccgtgctgctgatgggatgcgtggcagagacaggcacacagtgcgtgaacctgaccacaaggacccagctgccccctgcctataccaattctttcacacggggcgtgtactatcccgacaaggtgtttagaagctccgtgctgcactccacacaggatctgtttctgcctttcttttctaacgtgacctggttccacgccatccacgtgtccggcaccaatggcacaaagcggttcgacaatcccgtgctgccttttaacgatggcgtgtacttcgccagcaccgagaagtccaacatcatcagaggctggatctttggcaccacactggactctaagacacagagcctgctgatcgtgaacaatgccaccaacgtggtgatcaaggtgtgcgagttccagttttgtaatgatccattcctgggcgtgtactatcacaagaacaataagtcctggatggagtctgagtttcgcgtgtattctagcgccaacaattgcacatttgagtacgtgagccagcccttcctgatggacctggagggcaagcagggcaatttcaagaacctgagggagttcgtgtttaagaatatcgatggctacttcaagatctacagcaagcacaccccaatcaacctggtgcgcgacctgccacagggattctccgccctggagccactggtggatctgcccatcggcatcaacatcacccggtttcagacactgctggccctgcacagatcctacctgacaccaggcgactcctctagcggatggaccgcaggagctgccgcctactatgtgggctatctgcagccccggaccttcctgctgaagtacaacgagaatggcaccatcacagacgcagtggattgcgccctggaccccctgtctgagacaaagtgtacactgaagagctttaccgtggagaagggcatctatcagacaagcaatttcagggtgcagcctaccgagtccatcgtgcgctttcccaatatcacaaacctgtgcccttttggcgaggtgttcaacgccaccagattcgccagcgtgtacgcctggaatcggaagagaatctccaactgcgtggccgactattctgtgctgtacaactccgcctctttcagcacctttaagtgctatggcgtgtctcccacaaagctgaatgatctgtgctttaccaacgtgtacgccgatagcttcgtgatcaggggagacgaagtgagacagatcgcaccaggacagacaggaaagatcgcagactacaattataagctgcctgacgatttcaccggctgcgtgatcgcctggaactccaacaatctggattctaaagtgggcggcaactacaattatctgtacaggctgtttcgcaagtccaatctgaagccattcgagcgggacatctccacagagatctaccaggccggctctaccccctgcaatggcgtggagggctttaactgttatttccctctgcagtcttacggcttccagccaacaaacggcgtgggctatcagccctacagagtggtggtgctgtcctttgagctgctgcacgcaccagcaacagtgtgcggcccaaagaagtctaccaatctggtgaagaacaagtgcgtgaacttcaacttcaacggactgaccggcacaggcgtgctgaccgatagcaataagaagttcctgccttttcagcagttcggcagggacatctcagataccacagacgccgtgcgcgaccctcagaccctggagatcctggacatcacaccatgcagcttcggcggcgtgtccgtgatcacaccaggcaccaatacatccaaccaggtggccgtgctgtatcaggacgtgaattgtaccgatgtgcccactgcaatccacgcagatcagctgacccctacatggcgggtgtactctaccggcagcaacgtgttccagacacaagccggatgcctgatcggagcagagcacgtgaacaatagctatgagtgcgacatccctatcggcgccggcatctgtgccagctaccagacccagacaaactccccatctggagcaggctccgtggccagccagtccatcatcgcctataccatgagcctgggcgccgagaacagcgtggcctactccaacaattctatcgccatccctaccaacttcacaatcagcgtgaccacagagatcctgccagtgtctatgaccaagacaagcgtggactgcacaatgtatatctgtggcgatagcaccgagtgctccaacctgctgctgcagtacggctccttttgtacccagctgaatagagccctgacaggcatcgccgtggagcaggataagaacacacaggaggtgttcgcccaggtgaagcagatctacaagaccccacccatcaaggactttggcggcttcaacttcagccagatcctgcctgatccaagcaagccctccaagaggtcttttatcgaggacctgctgttcaacaaggtgaccctggccgatgccggcttcatcaagcagtatggagattgcctgggagacatcgcagcccgcgacctgatctgtgcccagaagtttaatggcctgaccgtgctgcctccactgctgacagatgagatgatcgcccagtacacatctgccctgctggccggcaccatcacaagcggatggaccttcggcgcaggagccgccctgcagatcccttttgccatgcagatggcctataggttcaacggcatcggcgtgacccagaatgtgctgtacgagaaccagaagctgatcgccaatcagtttaacagcgccatcggcaagatccaggactctctgtcctctacagccagcgccctgggcaagctgcaggatgtggtgaatcagaacgcccaggccctgaataccctggtgaagcagctgagctccaacttcggcgccatctctagcgtgctgaatgacatcctgagccggctggacccccctgaggcagaggtgcagatcgacaggctgatcacaggccgcctgcagagcctgcagacctacgtgacacagcagctgatcagggcagcagagatcagagcctccgccaatctggccgccaccaagatgagcgagtgcgtgctgggacagtccaagagggtggacttttgtggcaagggctatcacctgatgtctttcccacagagcgcccctcacggcgtggtgtttctgcacgtgacctacgtgccagcccaggagaagaacttcaccacagcaccagccatctgccacgatggaaaggcacactttcctagggagggcgtgttcgtgtctaacggcacccactggtttgtgacacagcgcaatttctacgagccacagatcatcaccacagacaatacattcgtgagcggcaactgtgatgtggtgatcggcatcgtgaacaataccgtgtatgatccactgcagcccgagctggactcctttaaggaggagctggataagtacttcaagaatcacacctctcccgacgtggatctgggcgacatctccggcatcaatgcctctgtggtgaacatccagaaggagatcgaccggctgaacgaggtggccaagaatctgaacgagagcctgatcgatctgcaggagctgggcaagtatgagcagtacatcaagggctctggcagagagaacctgtatttccagggaggaggaggcagcggatacatccctgaggcaccaagggacggacaggcctacgtgcgcaaggatggcgagtgggtgctgctgtccacctttctgggccatcatcaccaccaccaccaccactga

SEQ ID NO: 1317 - DNA, 3846 bp, Artificial Sequence
  Description of Artificial Sequence: Synthetic polynucleotide
atgggcatcctgccaagcccaggaatgcccgccctgctgtctctggtgagcctgctgtccgtgctgctgatgggatgcgtggcagagacaggcacacagtgcgtgaacctgaccacaaggacccagctgccccctgcctataccaattctttcacacggggcgtgtactatcccgacaaggtgtttagaagctccgtgctgcactccacacaggatctgtttctgcctttcttttctaacgtgacctggttccacgccatccacgtgtccggcaccaatggcacaaagcggttcgacaatcccgtgctgccttttaacgatggcgtgtacttcgccagcaccgagaagtccaacatcatcagaggctggatctttggcaccacactggactctaagacacagagcctgctgatcgtgaacaatgccaccaacgtggtgatcaaggtgtgcgagttccagttttgtaatgatccattcctgggcgtgtactatcacaagaacaataagtcctggatggagtctgagtttcgcgtgtattctagcgccaacaattgcacatttgagtacgtgagccagcccttcctgatggacctggagggcaagcagggcaatttcaagaacctgagggagttcgtgtttaagaatatcgatggctacttcaagatctacagcaagcacaccccaatcaacctggtgcgcgacctgccacagggattctccgccctggagccactggtggatctgcccatcggcatcaacatcacccggtttcagacactgctggccctgcacagatcctacctgacaccaggcgactcctctagcggatggaccgcaggagctgccgcctactatgtgggctatctgcagccccggaccttcctgctgaagtacaacgagaatggcaccatcacagacgcagtggattgcgccctggaccccctgtctgagacaaagtgtacactgaagagctttaccgtggagaagggcatctatcagacaagcaatttcagggtgcagcctaccgagtccatcgtgcgctttcccaatatcacaaacctgtgcccttttggcgaggtgttcaacgccaccagattcgccagcgtgtacgcctggaatcggaagagaatctccaactgcgtggccgactattctgtgctgtacaactccgcctctttcagcacctttaagtgctatggcgtgtctcccacaaagctgaatgatctgtgctttaccaacgtgtacgccgatagcttcgtgatcaggggagacgaagtgagacagatcgcaccaggacagacaggaaagatcgcagactacaattataagctgcctgacgatttcaccggctgcgtgatcgcctggaactccaacaatctggattctaaagtgggcggcaactacaattatctgtacaggctgtttcgcaagtccaatctgaagccattcgagcgggacatctccacagagatctaccaggccggctctaccccctgcaatggcgtggagggctttaactgttatttccctctgcagtcttacggcttccagccaacaaacggcgtgggctatcagccctacagagtggtggtgctgtcctttgagctgctgcacgcaccagcaacagtgtgcggcccaaagaagtctaccaatctggtgaagaacaagtgcgtgaacttcaacttcaacggactgaccggcacaggcgtgctgaccgagagcaataagaagttcctgccttttcagcagttcggcagggacatcgcagataccacagacgccgtgcgcgaccctcagaccctggagatcctggacatcacaccatgcagcttcggcggcgtgtccgtgatcacaccaggcaccaatacatccaaccaggtggccgtgctgtatcaggacgtgaattgtaccgaggtgcccgtggcaatccacgcagatcagctgacccctacatggcgggtgtactctaccggcagcaacgtgttccagacaagagccggatgcctgatcggagcagagcacgtgaacaatagctatgagtgcgacatccctatcggcgccggcatctgtgccagctaccagacccagacaaactccccatctggagcaggctccgtggccagccagtccatcatcgcctataccatgagcctgggcgccgagaacagcgtggcctactccaacaattctatcgccatccctaccaacttcacaatcagcgtgaccacagagatcctgccagtgtctatgaccaagacaagcgtggactgcacaatgtatatctgtggcgatagcaccgagtgctccaacctgctgctgcagtacggctccttttgtacccagctgaatagagccctgacaggcatcgccgtggagcaggataagaacacacaggaggtgttcgcccaggtgaagcagatctacaagaccccacccatcaaggactttggcggcttcaacttcagccagatcctgcctgatccaagcaagccctccaagaggtcttttatcgaggacctgctgttcaacaaggtgaccctggccgatgccggcttcatcaagcagtatggagattgcctgggagacatcgcagcccgcgacctgatctgtgcccagaagtttaatggcctgaccgtgctgcctccactgctgacagatgagatgatcgcccagtacacatctgccctgctgagtggcaccatcacaagcggatggaccttcggcgcaggagccgccctgcagatcccttttgccatgcagatggcctataggttcaacggcatcggcgtgacccagaatgtgctgtacgagaaccagaagctgatcgccaatcagtttaacagcgccatcggcaagatccaggactctctgtcctctacagccagcgccctgggcaagctgcaggatgtggtgaatcagaacgcccaggccctgaataccctggtgaagcagctgagctccaacttcggcgccatctctagcgtgctgaatgacatcctgagccggctggacccccctgaggcagaggtgcagatcgacaggctgatcacaggccgcctgcagagcctgcagacctacgtgacacagcagctgatcagggcagcagagatcagagcctccgccaatctggccgccaccaagatgagcgagtgcgtgctgggacagtccaagagggtggacttttgtggcaagggctatcacctgatgtctttcccacagagcgcccctcacggcgtggtgtttctgcacgtgacctacgtgccagcccaggagaagaacttcaccacagcaccagccatctgccacgatggaaaggcacactttcctagggagggcgtgttcgtgtctaacggcacccactggtttgtgacacagcgcaatttctacgagccacagatcatcaccacagacaatacattcgtgagcggcaactgtgatgtggtgatcggcatcgtgaacaataccgtgtatgatccactgcagcccgagctggactcctttaaggaggagctggataagtacttcaagaatcacacctctcccgacgtggatctgggcgacatctccggcatcaatgcctctgtggtgaacatccagaaggagatcgaccggctgaacgaggtggccaagaatctgaacgagagcctgatcgatctgcaggagctgggcaagtatgagcagtacatcaagggctctggcagagagaacctgtatttccagggaggaggaggcagcggatacatccctgaggcaccaagggacggacaggcctacgtgcgcaaggatggcgagtgggtgctgctgtccacctttctgggccatcatcaccaccaccaccaccactga

SEQ ID NO: 1318 - DNA, 3846 bp, Artificial Sequence
  Description of Artificial Sequence: Synthetic polynucleotide
atgggcatcctgccaagcccaggaatgcccgccctgctgtctctggtgagcctgctgtccgtgctgctgatgggatgcgtggcagagacaggcacacagtgcgtgaacctgaccacaaggacccagctgccccctgcctataccaattctttcacacggggcgtgtactatcccgacaaggtgtttagaagctccgtgctgcactccacacaggatctgtttctgcctttcttttctaacgtgacctggttccacgccatccacgtgtccggcaccaatggcacaaagcggttcgacaatcccgtgctgccttttaacgatggcgtgtacttcgccagcaccgagaagtccaacatcatcagaggctggatctttggcaccacactggactctaagacacagagcctgctgatcgtgaacaatgccaccaacgtggtgatcaaggtgtgcgagttccagttttgtaatgatccattcctgggcgtgtactatcacaagaacaataagtcctggatggagtctgagtttcgcgtgtattctagcgccaacaattgcacatttgagtacgtgagccagcccttcctgatggacctggagggcaagcagggcaatttcaagaacctgagggagttcgtgtttaagaatatcgatggctacttcaagatctacagcaagcacaccccaatcaacctggtgcgcgacctgccacagggattctccgccctggagccactggtggatctgcccatcggcatcaacatcacccggtttcagacactgctggccctgcacagatcctacctgacaccaggcgactcctctagcggatggaccgcaggagctgccgcctactatgtgggctatctgcagccccggaccttcctgctgaagtacaacgagaatggcaccatcacagacgcagtggattgcgccctggaccccctgtctgagacaaagtgtacactgaagagctttaccgtggagaagggcatctatcagacaagcaatttcagggtgcagcctaccgagtccatcgtgcgctttcccaatatcacaaacctgtgcccttttggcgaggtgttcaacgccaccagattcgccagcgtgtacgcctggaatcggaagagaatctccaactgcgtggccgactattctgtgctgtacaactccgcctctttcagcacctttaagtgctatggcgtgtctcccacaaagctgaatgatctgtgctttaccaacgtgtacgccgatagcttcgtgatcaggggagacgaagtgagacagatcgcaccaggacagacaggaaagatcgcagactacaattataagctgcctgacgatttcaccggctgcgtgatcgcctggaactccaacaatctggattctaaagtgggcggcaactacaattatctgtacaggctgtttcgcaagtccaatctgaagccattcgagcgggacatctccacagagatctaccaggccggctctaccccctgcaatggcgtggagggctttaactgttatttccctctgcagtcttacggcttccagccaacaaacggcgtgggctatcagccctacagagtggtggtgctgtcctttgagctgctgcacgcaccagcaacagtgtgcggcccaaagaagtctaccaatctggtgaagaacaagtgcgtgaacttcaacttcaacggactgaccggcacaggcgtgctgaccgagagcaataagaagttcctgccttttcagcagttcggcagggacatcgcagataccacagacgccgtgcgcgaccctcagaccctggagatcctggacatcacaccatgcagcttcggcggcgtgtccgtgatcacaccaggcaccaatacatccaaccaggtggccgtgctgtatcaggacgtgaattgtaccgaggtgcccgtggcaatccacgcagatcagctgacccctacatggcgggtgtactctaccggcagcaacgtgttccagacaagagccggatgcctgatcggagcagagcacgtgaacaatagctatgagtgcgacatccctatcggcgccggcatctgtgccagctaccagacccagacaaactccccatctggagcaggctccgtggccagccagtccatcatcgcctataccatgagcctgggcgccgagaacagcgtggcctactccaacaattctatcgccatccctaccaacttcacaatcagcgtgaccacagagatcctgccagtgtctatgccgaagacaagcgtggactgcacaatgtatatctgtggcgatagcaccgagtgctccaacctgctgctgcagtacggctccttttgtacccagctgaatagagccctgacaggcatcgccgtggagcaggataagaacacacaggaggtgttcgcccaggtgaagcagatctacaagaccccacccatcaaggactttggcggcttcaacttcagccagatcctgcctgatccaagcaagccctccaagaggtcttttatcgaggacctgctgttcaacaaggtgaccctggccgatgccggcttcatcaagcagtatggagattgcctgggagacatcgcagcccgcgacctgatctgtgcccagaagtttaatggcctgaccgtgctgcctccactgctgacagatgagatgatcgcccagtacacatctgccctgctggccggcaccatcacaagcggatggaccttcggcgcaggagccgccctgcagatcccttttgccatgcagatggcctataggttcaacggcatcggcgtgacccagaatgtgctgtacgagaaccagaagctgatcgccaatcagtttaacagcgccatcggcaagatccaggactctctgtcctctacagccagcgccctgggcaagctgcaggatgtggtgaatcagaacgcccaggccctgaataccctggtgaagcagctgagctccaacttcggcgccatctctagcgtgctgaatgacatcctgagccggctggacccccctgaggcagaggtgcagatcgacaggctgatcacaggccgcctgcagagcctgcagacctacgtgacacagcagctgatcagggcagcagagatcagagcctccgccaatctggccgccaccaagatgagcgagtgcgtgctgggacagtccaagagggtggacttttgtggcaagggctatcacctgatgtctttcccacagagcgcccctcacggcgtggtgtttctgcacgtgacctacgtgccagcccaggagaagaacttcaccacagcaccagccatctgccacgatggaaaggcacactttcctagggagggcgtgttcgtgtctaacggcacccactggtttgtgacacagcgcaatttctacgagccacagatcatcaccacagacaatacattcgtgagcggcaactgtgatgtggtgatcggcatcgtgaacaataccgtgtatgatccactgcagcccgagctggactcctttaaggaggagctggataagtacttcaagaatcacacctctcccgacgtggatctgggcgacatctccggcatcaatgcctctgtggtgaacatccagaaggagatcgaccggctgaacgaggtggccaagaatctgaacgagagcctgatcgatctgcaggagctgggcaagtatgagcagtacatcaagggctctggcagagagaacctgtatttccagggaggaggaggcagcggatacatccctgaggcaccaagggacggacaggcctacgtgcgcaaggatggcgagtgggtgctgctgtccacctttctgggccatcatcaccaccaccaccaccactga

SEQ ID NO: 1319 - DNA, 3846 bp, Artificial Sequence
  Description of Artificial Sequence: Synthetic polynucleotide
atgggcatcctgccaagcccaggaatgcccgccctgctgtctctggtgagcctgctgtccgtgctgctgatgggatgcgtggcagagacaggcacacagtgcgtgaacctgaccacaaggacccagctgccccctgcctataccaattctttcacacggggcgtgtactatcccgacaaggtgtttagaagctccgtgctgcactccacacaggatctgtttctgcctttcttttctaacgtgacctggttccacgccatccacgtgtccggcaccaatggcacaaagcggttcgacaatcccgtgctgccttttaacgatggcgtgtacttcgccagcaccgagaagtccaacatcatcagaggctggatctttggcaccacactggactctaagacacagagcctgctgatcgtgaacaatgccaccaacgtggtgatcaaggtgtgcgagttccagttttgtaatgatccattcctgggcgtgtactatcacaagaacaataagtcctggatggagtctgagtttcgcgtgtattctagcgccaacaattgcacatttgagtacgtgagccagcccttcctgatggacctggagggcaagcagggcaatttcaagaacctgagggagttcgtgtttaagaatatcgatggctacttcaagatctacagcaagcacaccccaatcaacctggtgcgcgacctgccacagggattctccgccctggagccactggtggatctgcccatcggcatcaacatcacccggtttcagacactgctggccctgcacagatcctacctgacaccaggcgactcctctagcggatgggatgcaggagctgccgcctactatgtgggctatctgcagccccggaccttcctgctgaagtacaacgagaatggcaccatcacagacgcagtggattgcgccctggaccccctgtctgagacaaagtgtacactgaagagctttaccgtggagaagggcatctatcagacaagcaatttcagggtgcagcctaccgagtccatcgtgcgctttcccaatatcacaaacctgtgcccttttggcgaggtgttcaacgccaccagattcgccagcgtgtacgcctggaatcggaagagaatctccaactgcgtggccgactattctgtgctgtacaactccgcctctttcagcacctttaagtgctatggcgtgtctcccacaaagctgaatgatctgtgctttaccaacgtgtacgccgatagcttcgtgatcaggggagacgaagtgagacagatcgcaccaggacagacaggaaagatcgcagactacaattataagctgcctgacgatttcaccggctgcgtgatcgcctggaactccaacaatctggattctaaagtgggcggcaactacaattatctgtacaggctgtttcgcaagtccaatctgaagccattcgagcgggacatctccacagagatctaccaggccggctctaccccctgcaatggcgtggagggctttaactgttatttccctctgcagtcttacggcttccagccaacaaacggcgtgggctatcagccctacagagtggtggtgctgtcctttgagctgctgcacgcaccagcaacagtgtgcggcccaaagaagtctaccaatctggtgaagaacaagtgcgtgaacttcaacttcaacggactgaccggcacaggcgtgctgaccgagagcaataagaagttcctgccttttcagcagttcggcagggacatcgcagataccacagacgccgtgcgcgaccctcagaccctggagatcctggacatcacaccatgcagcttcggcggcgtgtccgtgatcacaccaggcaccaatacatccaaccaggtggccgtgctgtatcaggacgtgaattgtaccgaggtgcccgtggcaatccacgcagatcagctgacccctacatggcgggtgtactctaccggcagcaacgtgttccagacaagagccggatgcctgatcggagcagagcacgtgaacaatagctatgagtgcgacatccctatcggcgccggcatctgtgccagctaccagacccagacaaactccccatctggagcaggctccgtggccagccagtccatcatcgcctataccatgagcctgggcgccgagaacagcgtggcctactccaacaattctatcgccatccctaccaacttcacaatcagcgtgaccacagagatcctgccagtgtctatgaccaagacaagcgtggactgcacaatgtatatctgtggcgatagcaccgagtgctccaacctgctgctgcagtacggctccttttgtacccagctgaatagagccctgacaggcatcgccgtggagcaggataagaacacacaggaggtgttcgcccaggtgaagcagatctacaagaccccacccatcaaggactttggcggcttcaacttcagccagatcctgcctgatccaagcaagccctccaagaggtcttttatcgaggacctgctgttcaacaaggtgaccctggccgatgccggcttcatcaagcagtatggagattgcctgggagacatcgcagcccgcgacctgatctgtgcccagaagtttaatggcctgaccgtgctgcctccactgctgacagatgagatgatcgcccagtacacatctgccctgctggccggcaccatcacaagcggatggaccttcggcgcaggagccgccctgcagatcccttttgccatgcagatggcctataggttcaacggcatcggcgtgacccagaatgtgctgtacgagaaccagaagctgatcgccaatcagtttaacagcgccatcggcaagatccaggactctctgtcctctacagccagcgccctgggcaagctgcaggatgtggtgaatcagaacgcccaggccctgaataccctggtgaagcagctgagctccaacttcggcgccatctctagcgtgctgaatgacatcctgagccggctggacccccctgaggcagaggtgcagatcgacaggctgatcacaggccgcctgcagagcctgcagacctacgtgacacagcagctgatcagggcagcagagatcagagcctccgccaatctggccgccaccaagatgagcgagtgcgtgctgggacagtccaagagggtggacttttgtggcaagggctatcacctgatgtctttcccacagagcgcccctcacggcgtggtgtttctgcacgtgacctacgtgccagcccaggagaagaacttcaccacagcaccagccatctgccacgatggaaaggcacactttcctagggagggcgtgttcgtgtctaacggcacccactggtttgtgacacagcgcaatttctacgagccacagatcatcaccacagacaatacattcgtgagcggcaactgtgatgtggtgatcggcatcgtgaacaataccgtgtatgatccactgcagcccgagctggactcctttaaggaggagctggataagtacttcaagaatcacacctctcccgacgtggatctgggcgacatctccggcatcaatgcctctgtggtgaacatccagaaggagatcgaccggctgaacgaggtggccaagaatctgaacgagagcctgatcgatctgcaggagctgggcaagtatgagcagtacatcaagggctctggcagagagaacctgtatttccagggaggaggaggcagcggatacatccctgaggcaccaagggacggacaggcctacgtgcgcaaggatggcgagtgggtgctgctgtccacctttctgggccatcatcaccaccaccaccaccactga

SEQ ID NO: 1320 - DNA, 3846 bp, Artificial Sequence
  Description of Artificial Sequence: Synthetic polynucleotide
atgggcatcctgccaagcccaggaatgcccgccctgctgtctctggtgagcctgctgtccgtgctgctgatgggatgcgtggcagagacaggcacacagtgcgtgaacctgaccacaaggacccagctgccccctgcctataccaattctttcacacggggcgtgtactatcccgacaaggtgtttagaagctccgtgctgcactccacacaggatctgtttctgcctttcttttctaacgtgacctggttccacgccatccacgtgtccggcaccaatggcacaaagcggttcgacaatcccgtgctgccttttaacgatggcgtgtacttcgccagcaccgagaagtccaacatcatcagaggctggatctttggcaccacactggactctaagacacagagcctgctgatcgtgaacaatgccaccaacgtggtgatcaaggtgtgctacttccagttttgtaatgatccattcctgggcgtgtactatcacaagaacaataagtcctggatggagtctgagtttcgcgtgtattctagcgccaacaattgcacatttgagtacgtgagccagcccttcctgatggacctggagggcaagcagggcaatttcaagaacctgagggagttcgtgtttaagaatatcgatggctacttcaagatctacagcaagcacaccccaatcaacctggtgcgcgacctgccacagggattctccgccctggagccactggtggatctgcccatcggcatcaacatcacccggtttcagacactgctggccctgcacagatcctacctgacaccaggcgactcctctagcggatggaccgcaggagctgccgcctactatgtgggctatctgcagccccggaccttcctgctgaagtacaacgagaatggcaccatcacagacgcagtggattgcgccctggaccccctgtctgagacaaagtgtacactgaagagctttaccgtggagaagggcatctatcagacaagcaatttcagggtgcagcctaccgagtccatcgtgcgctttcccaatatcacaaacctgtgcccttttggcgaggtgttcaacgccaccagattcgccagcgtgtacgcctggaatcggaagagaatctccaactgcgtggccgactattctgtgctgtacaactccgcctctttcagcacctttaagtgctatggcgtgtctcccacaaagctgaatgatctgtgctttaccaacgtgtacgccgatagcttcgtgatcaggggagacgaagtgagacagatcgcaccaggacagacaggaaagatcgcagactacaattataagctgcctgacgatttcaccggctgcgtgatcgcctggaactccaacaatctggattctaaagtgggcggcaactacaattatctgtacaggctgtttcgcaagtccaatctgaagccattcgagcgggacatctccacagagatctaccaggccggctctaccccctgcaatggcgtggagggctttaactgttatttccctctgcagtcttacggcttccagccaacaaacggcgtgggctatcagccctacagagtggtggtgctgtcctttgagctgctgcacgcaccagcaacagtgtgcggcccaaagaagtctaccaatctggtgaagaacaagtgcgtgaacttcaacttcaacggactgaccggcacaggcgtgctgaccgagagcaataagaagttcctgccttttcagcagttcggcagggacatcgcagataccacagacgccgtgcgcgaccctcagaccctggagatcctggacatcacaccatgcagcttcggcggcgtgtccgtgatcacaccaggcaccaatacatccaaccaggtggccgtgctgtatcaggacgtgaattgtaccgaggtgcccgtggcaatccacgcagatcagctgacccctacatggcgggtgtactctaccggcagcaacgtgttccagacaagagccggatgcctgatcggagcagagcacgtgaacaatagctatgagtgcgacatccctatcggcgccggcatctgtgccagctaccagacccagacaaactccccatctggagcaggctccgtggccagccagtccatcatcgcctataccatgagcctgggcgccgagaacagcgtggcctactccaacaattctatcgccatccctaccaacttcacaatcagcgtgaccacagagatcctgccagtgtctatgaccaagacaagcgtggactgcacaatgtatatctgtggcgatagcaccgagtgctccaacctgctgctgcagtacggctccttttgtacccagctgaatagagccctgacaggcatcgccgtggagcaggataagaacacacaggaggtgttcgcccaggtgaagcagatctacaagaccccacccatcaaggactttggcggcttcaacttcagccagatcctgcctgatccaagcaagccctccaagaggtcttttatcgaggacctgctgttcaacaaggtgaccctggccgatgccggcttcatcaagcagtatggagattgcctgggagacatcgcagcccgcgacctgatctgtgcccagaagtttaatggcctgaccgtgctgcctccactgctgacagatgagatgatcgcccagtacacatctgccctgctggccggcaccatcacaagcggatggaccttcggcgcaggagccgccctgcagatcccttttgccatgcagatggcctataggttcaacggcatcggcgtgacccagaatgtgctgtacgagaaccagaagctgatcgccaatcagtttaacagcgccatcggcaagatccaggactctctgtcctctacagccagcgccctgggcaagctgcaggatgtggtgaatcagaacgcccaggccctgaataccctggtgaagcagctgagctccaacttcggcgccatctctagcgtgctgaatgacatcctgagccggctggacccccctgaggcagaggtgcagatcgacaggctgatcacaggccgcctgcagagcctgcagacctacgtgacacagcagctgatcagggcagcagagatcagagcctccgccaatctggccgccaccaagatgagcgagtgcgtgctgggacagtccaagagggtggacttttgtggcaagggctatcacctgatgtctttcccacagagcgcccctcacggcgtggtgtttctgcacgtgacctacgtgccagcccaggagaagaacttcaccacagcaccagccatctgccacgatggaaaggcacactttcctagggagggcgtgttcgtgtctaacggcacccactggtttgtgacacagcgcaatttctacgagccacagatcatcaccacagacaatacattcgtgagcggcaactgtgatgtggtgatcggcatcgtgaacaataccgtgtatgatccactgcagcccgagctggactcctttaaggaggagctggataagtacttcaagaatcacacctctcccgacgtggatctgggcgacatctccggcatcaatgcctctgtggtgaacatccagaaggagatcgaccggctgaacgaggtggccaagaatctgaacgagagcctgatcgatctgcaggagctgggcaagtatgagcagtacatcaagggctctggcagagagaacctgtatttccagggaggaggaggcagcggatacatccctgaggcaccaagggacggacaggcctacgtgcgcaaggatggcgagtgggtgctgctgtccacctttctgggccatcatcaccaccaccaccaccactga

SEQ ID NO: 1321 - DNA, 3846 bp, Artificial Sequence
  Description of Artificial Sequence: Synthetic polynucleotide
atgggcatcctgccaagcccaggaatgcccgccctgctgtctctggtgagcctgctgtccgtgctgctgatgggatgcgtggcagagacaggcacacagtgcgtgaacctgaccacaaggacccagctgccccctgcctataccaattctttcacacggggcgtgtactatcccgacaaggtgtttagaagctccgtgctgcactccacacaggatctgtttctgcctttcttttctaacgtgacctggttccacgccatccacgtgtccggcaccaatggcacaaagcggttcgacaatcccgtgctgccttttaacgatggcgtgtacttcgccagcaccgagaagtccaacatcatcagaggctggatctttggcaccacactggactctaagacacagagcctgctgatcgtgaacaatgccaccaacgtggtgatcaaggtgtgcgagttccagttttgtaatgatccattcctgggcgtgtactatcacaagaacaataagtcctggatggagtctgagtttcgcgtgtattctagcgccaacaattgcacatttgagtacgtgagccagcccttcctgatggacctggagggcaagcagggcaatttcaagaacctgagggagttcgtgtttaagaatatcgatggctacttcaagatctacagcaagcacaccccaatcaacctggtgcgcgacctgccacagggattctccgccctggagccactggtgaaactgcccatcggcatcaacatcacccggtttcagacactgctggccctgcacagatcctacctgacaccaggcgactcctctagcggatggaccgcaggagctgccgcctactatgtgggctatctgcagccccggaccttcctgctgaagtacaacgagaatggcaccatcacagacgcagtggattgcgccctggaccccctgtctgagacaaagtgtacactgaagagctttaccgtggagaagggcatctatcagacaagcaatttcagggtgcagcctaccgagtccatcgtgcgctttcccaatatcacaaacctgtgcccttttggcgaggtgttcaacgccaccagattcgccagcgtgtacgcctggaatcggaagagaatctccaactgcgtggccgactattctgtgctgtacaactccgcctctttcagcacctttaagtgctatggcgtgtctcccacaaagctgaatgatctgtgctttaccaacgtgtacgccgatagcttcgtgatcaggggagacgaagtgagacagatcgcaccaggacagacaggaaagatcgcagactacaattataagctgcctgacgatttcaccggctgcgtgatcgcctggaactccaacaatctggattctaaagtgggcggcaactacaattatctgtacaggctgtttcgcaagtccaatctgaagccattcgagcgggacatctccacagagatctaccaggccggctctaccccctgcaatggcgtggagggctttaactgttatttccctctgcagtcttacggcttccagccaacaaacggcgtgggctatcagccctacagagtggtggtgctgtcctttgagctgctgcacgcaccagcaacagtgtgcggcccaaagaagtctaccaatctggtgaagaacaagtgcgtgaacttcaacttcaacggactgaccggcacaggcgtgctgaccgagagcaataagaagttcctgccttttcagcagttcggcagggacatcgcagataccacagacgccgtgcgcgaccctcagaccctggagatcctggacatcacaccatgcagcttcggcggcgtgtccgtgatcacaccaggcaccaatacatccaaccaggtggccgtgctgtatcaggacgtgaattgtaccgaggtgcccgtggcaatccacgcagatcagctgacccctacatggcgggtgtactctaccggcagcaacgtgttccagacaagagccggatgcctgatcggagcagagcacgtgaacaatagctatgagtgcgacatccctatcggcgccggcatctgtgccagctaccagacccagacaaactccccatctggagcaggctccgtggccagccagtccatcatcgcctataccatgagcctgggcgccgagaacagcgtggcctactccaacaattctatcgccatccctaccaacttcacaatcagcgtgaccacagagatcctgccagtgtctatgaccaagacaagcgtggactgcacaatgtatatctgtggcgatagcaccgagtgctccaacctgctgctgcagtacggctccttttgtacccagctgaatagagccctgacaggcatcgccgtggagcaggataagaacacacaggaggtgttcgcccaggtgaagcagatctacaagaccccacccatcaaggactttggcggcttcaacttcagccagatcctgcctgatccaagcaagccctccaagaggtcttttatcgaggacctgctgttcaacaaggtgaccctggccgatgccggcttcatcaagcagtatggagattgcctgggagacatcgcagcccgcgacctgatctgtgcccagaagtttaatggcctgaccgtgctgcctccactgctgacagatgagatgatcgcccagtacacatctgccctgctggccggcaccatcacaagcggatggaccttcggcgcaggagccgccctgcagatcccttttgccatgcagatggcctataggttcaacggcatcggcgtgacccagaatgtgctgtacgagaaccagaagctgatcgccaatcagtttaacagcgccatcggcaagatccaggactctctgtcctctacagccagcgccctgggcaagctgcaggatgtggtgaatcagaacgcccaggccctgaataccctggtgaagcagctgagctccaacttcggcgccatctctagcgtgctgaatgacatcctgagccggctggacccccctgaggcagaggtgcagatcgacaggctgatcacaggccgcctgcagagcctgcagacctacgtgacacagcagctgatcagggcagcagagatcagagcctccgccaatctggccgccaccaagatgagcgagtgcgtgctgggacagtccaagagggtggacttttgtggcaagggctatcacctgatgtctttcccacagagcgcccctcacggcgtggtgtttctgcacgtgacctacgtgccagcccaggagaagaacttcaccacagcaccagccatctgccacgatggaaaggcacactttcctagggagggcgtgttcgtgtctaacggcacccactggtttgtgacacagcgcaatttctacgagccacagatcatcaccacagacaatacattcgtgagcggcaactgtgatgtggtgatcggcatcgtgaacaataccgtgtatgatccactgcagcccgagctggactcctttaaggaggagctggataagtacttcaagaatcacacctctcccgacgtggatctgggcgacatctccggcatcaatgcctctgtggtgaacatccagaaggagatcgaccggctgaacgaggtggccaagaatctgaacgagagcctgatcgatctgcaggagctgggcaagtatgagcagtacatcaagggctctggcagagagaacctgtatttccagggaggaggaggcagcggatacatccctgaggcaccaagggacggacaggcctacgtgcgcaaggatggcgagtgggtgctgctgtccacctttctgggccatcatcaccaccaccaccaccactga

SEQ ID NO: 1322 - DNA, 3846 bp, Artificial Sequence
  Description of Artificial Sequence: Synthetic polynucleotide
atgggcatcctgccaagcccaggaatgcccgccctgctgtctctggtgagcctgctgtccgtgctgctgatgggatgcgtggcagagacaggcacacagtgcgtgaacctgaccacaaggacccagctgccccctgcctataccaattctttcacacggggcgtgtactatcccgacaaggtgtttagaagctccgtgctgcactccacacaggatctgtttctgcctttcttttctaacgtgacctggttccacgccatccacgtgtccggcaccaatggcacaaagcggttcgacaatcccgtgctgccttttaacgatggcgtgtacttcgccagcaccgagaagtccaacatcatcagaggctggatctttggcaccacactggactctaagacacagagcctgctgatcgtgaacaatgccaccaacgtggtgatcaaggtgtgcgagttccagttttgtaatgatccattcctgggcgtgtactatcacaagaacaataagtcctggatggagtctgagtttcgcgtgtattctagcgccaacaattgcacatttgagtacgtgagccagcccttcctgatggacctggagggcaagcagggcaatttcaagaacctgagggagttcgtgtttaagaatatcgatggctacttcaagatctacagcaagcacaccccaatcaacctggtgcgcgacctgccacagggattctccgccctggagccactggtggatctgcccatcggcatcaacatcacccggtttcagacactgctggccctgcacagatcctacctgacaccaggcgactcctctagcggatggaccgcaggagctgccgcctactatgtgggctatctgcagccccggaccttcctgctgaagtacaacgagaatggcaccatcacagacgcagtggattgcgccctggaccccctgtctgagacaaagtgtacactgaagagctttaccgtggagaagggcatctatcagacaagcaatttcagggtgcagcctaccgagtccatcgtgcgctttcccaatatcacaaacctgtgcccttttggcgaggtgttcaacgccaccagattcgccagcgtgtacgcctggaatcggaagagaatctccaactgcgtggccgactattctgtgctgtacaactccgcctctttcagcacctttaagtgctatggcgtgtctcccacaaagctgaatgatctgtgctttaccaacgtgtacgccgatagcttcgtgatcaggggagacgaagtgagacagatcgcaccaggacagacaggaaagatcgcagactacaattataagctgcctgacgatttcaccggctgcgtgatcgcctggaactccaacaatctggattctaaagtgggcggcaactacaattatctgtacaggctgtttcgcaagtccaatctgaagccattcgagcgggacatctccacagagatctaccaggccggctctaccccctgcaatggcgtggagggctttaactgttatttccctctgcagtcttacggcttccagccaacaaacggcgtgggctatcagccctacagagtggtggtgctgtcctttgagctgctgcacgcaccagcaacagtgtgcggcccaaagaagtctaccaatctggtgaagaacaagtgcgtgaacttcaacttcaacggactgaccggcacaggcgtgctgaccgagagcaataagaagttcctgccttttcagcagttcggcagggacatcgcagataccacagactcggtgcgcgaccctcagaccctggagatcctggacatcacaccatgcagcttcggcggcgtgtccgtgatcacaccaggcaccaatacatccaaccaggtggccgtgctgtatcaggacgtgaattgtaccgaggtgcccgtggcaatccacgcagatcagctgacccctacatggcgggtgtactctaccggcagcaacgtgttccagacaagagccggatgcctgatcggagcagagcacgtgaacaatagctatgagtgcgacatccctatcggcgccggcatctgtgccagctaccagacccagacaaactccccatctggagcaggctccgtggccagccagtccatcatcgcctataccatgagcctgggcgccgagaacagcgtggcctactccaacaattctatcgccatccctaccaacttcacaatcagcgtgaccacagagatcctgccagtgtctatgaccaagacaagcgtggactgcacaatgtatatctgtggcgatagcaccgagtgctccaacctgctgctgcagtacggctccttttgtacccagctgaatagagccctgacaggcatcgccgtggagcaggataagaacacacaggaggtgttcgcccaggtgaagcagatctacaagaccccacccatcaaggactttggcggcttcaacttcagccagatcctgcctgatccaagcaagccctccaagaggtcttttatcgaggacctgctgttcaacaaggtgaccctggccgatgccggcttcatcaagcagtatggagattgcctgggagacatcgcagcccgcgacctgatctgtgcccagaagtttaatggcctgaccgtgctgcctccactgctgacagatgagatgatcgcccagtacacatctgccctgctggccggcaccatcacaagcggatggaccttcggcgcaggagccgccctgcagatcccttttgccatgcagatggcctataggttcaacggcatcggcgtgacccagaatgtgctgtacgagaaccagaagctgatcgccaatcagtttaacagcgccatcggcaagatccaggactctctgtcctctacagccagcgccctgggcaagctgcaggatgtggtgaatcagaacgcccaggccctgaataccctggtgaagcagctgagctccaacttcggcgccatctctagcgtgctgaatgacatcctgagccggctggacccccctgaggcagaggtgcagatcgacaggctgatcacaggccgcctgcagagcctgcagacctacgtgacacagcagctgatcagggcagcagagatcagagcctccgccaatctggccgccaccaagatgagcgagtgcgtgctgggacagtccaagagggtggacttttgtggcaagggctatcacctgatgtctttcccacagagcgcccctcacggcgtggtgtttctgcacgtgacctacgtgccagcccaggagaagaacttcaccacagcaccagccatctgccacgatggaaaggcacactttcctagggagggcgtgttcgtgtctaacggcacccactggtttgtgacacagcgcaatttctacgagccacagatcatcaccacagacaatacattcgtgagcggcaactgtgatgtggtgatcggcatcgtgaacaataccgtgtatgatccactgcagcccgagctggactcctttaaggaggagctggataagtacttcaagaatcacacctctcccgacgtggatctgggcgacatctccggcatcaatgcctctgtggtgaacatccagaaggagatcgaccggctgaacgaggtggccaagaatctgaacgagagcctgatcgatctgcaggagctgggcaagtatgagcagtacatcaagggctctggcagagagaacctgtatttccagggaggaggaggcagcggatacatccctgaggcaccaagggacggacaggcctacgtgcgcaaggatggcgagtgggtgctgctgtccacctttctgggccatcatcaccaccaccaccaccactga

SEQ ID NO: 1323 - DNA, 3846 bp, Artificial Sequence
  Description of Artificial Sequence: Synthetic polynucleotide
atgggcatcctgccaagcccaggaatgcccgccctgctgtctctggtgagcctgctgtccgtgctgctgatgggatgcgtggcagagacaggcacacagtgcgtgaacctgaccacaaggacccagctgccccctgcctataccaattctttcacacggggcgtgtactatcccgacaaggtgtttagaagctccgtgctgcactccacacaggatctgtttctgcctttcttttctaacgtgacctggttccacgccatccacgtgtccggcaccaatggcacaaagcggttcgacaatcccgtgctgccttttaacgatggcgtgtacttcgccagcaccgagaagtccaacatcatcagaggctggatctttggcaccacactggactctaagacacagagcctgctgatcgtgaacaatgccaccaacgtggtgatcaaggtgtgcgagttccagttttgtaatgatccattcctgggcgtgtactatcacaagaacaataagtcctggatggagtctgagtttcgcgtgtattctagcgccaacaattgcacatttgagtacgtgagccagcccttcctgatggacctggagggcaagcagggcaatttcaagaacctgagggagttcgtgtttaagaatatcgatggctacttcaagatctacagcaagcacaccccaatcaacctggtgcgcgacctgccacagggattctccgccctggagccactggtggatctgcccatcggcatcaacatcacccggtttcagacactgctggccctgcacagatcctacctgacaccaggcgactcctctagcggatggaccgcaggagctgccgcctactatgtgggctatctgcagccccggaccttcctgctgaagtacaacgagaatggcaccatcacagacgcagtggattgcgccctggaccccctgtctgagacaaagtgtacactgaagagctttaccgtggagaagggcatctatcagacaagcaatttcagggtgcagcctaccgagtccatcgtgcgctttcccaatatcacaaacctgtgcccttttggcgaggtgttcaacgccaccagattcgccagcgtgtacgcctggaatcggaagagaatctccaactgcgtggccgactattctgtgctgtacaactccgcctctttcagcacctttaagtgctatggcgtgtctcccacaaagctgaatgatctgtgctttaccaacgtgtacgccgatagcttcgtgatcaggggagacgaagtgagacagatcgcaccaggacagacaggaaagatcgcagactacaattataagctgcctgacgatttcaccggctgcgtgatcgcctggaactccaacaatctggattctaaagtgggcggcaactacaattatctgtacaggctgtttcgcaagtccaatctgaagccattcgagcgggacatctccacagagatctaccaggccggctctaccccctgcaatggcgtggagggctttaactgttatttccctctgcagtcttacggcttccagccaacaaacggcgtgggctatcagccctacagagtggtggtgctgtcctttgagctgctgcacgcaccagcaacagtgtgcggcccaaagaagtctaccaatctggtgaagaacaagtgcgtgaacttcaacttcaacggactgaccggcacaggcgtgctgaccgagagcaataagaagttcctgccttttcagcagttcggcagggacatcgcagataccacagacgccgtgcgcgaccctcagaccctggagatcctggacatcacaccatgcagcttcggcggcgtgtccgtgatcacaccaggcaccaatacatccaaccaggtggccgtgctgtatcaggacgtgaattgtaccgaggtgcccgtggcaatccacgcagatcagctgacccctacatggcgggtgtactctaccggcagcaacgtgttccagacaagagccggatgcctgatcggagcagagcacgtgaacaatagctatgagtgcgacatccctatcggcgccggcatctgtgccagctaccagacccagacaaactccccatctggagcaggctccgtggccagccagtccatcatcgcctataccatgagcctgggcgccgagaacagcgtggcctactccaacaattctatcgccatccctaccaacttcacaatcagcgtgaccacagagatcctgccagtgtctatgaccaagacaagcgtggactgcacaatgtatatctgtggcgatagcaccgagtgctccaacctgctgctgcagtacggctccttttgtacccagctgaatagagccctgacaggcatcgccgtggagcaggataagaacacacaggaggtgttcgcccaggtgaagcagatctacaagaccccacccatcaaggactttggcggcttcaacttcagccagatcctgcctgatccaagcaagccctccaagaggtcttttatcgaggacctgctgttcaacaaggtgaccctggccgatgccggcttcatcaagcagtatggagattgcctgggagacatcgcagcccgcgacctgatctgtgcccagaagtttaatggcctgaccgtgctgcctccactgctgacagatgagatgatcgcccagtacacatctgccctgctggccggcaccatcacaagcggatggaccttcggcgcaggagccgccctgcagatcccttttgccatgcagatggcctataggttcaacggcatcggcgtgacccagaatgtgctgtacgagaaccagaagctgatcgccaatcagtttaacagcgccatcggcaagatccaggactctctgtcctctacagccagcgccctgggcaagctgcaggatgtggtgaatcagaacgcccaggccctggcgaccctggtgaagcagctgagctccaacttcggcgccatctctagcgtgctgaatgacatcctgagccggctggacccccctgaggcagaggtgcagatcgacaggctgatcacaggccgcctgcagagcctgcagacctacgtgacacagcagctgatcagggcagcagagatcagagcctccgccaatctggccgccaccaagatgagcgagtgcgtgctgggacagtccaagagggtggacttttgtggcaagggctatcacctgatgtctttcccacagagcgcccctcacggcgtggtgtttctgcacgtgacctacgtgccagcccaggagaagaacttcaccacagcaccagccatctgccacgatggaaaggcacactttcctagggagggcgtgttcgtgtctaacggcacccactggtttgtgacacagcgcaatttctacgagccacagatcatcaccacagacaatacattcgtgagcggcaactgtgatgtggtgatcggcatcgtgaacaataccgtgtatgatccactgcagcccgagctggactcctttaaggaggagctggataagtacttcaagaatcacacctctcccgacgtggatctgggcgacatctccggcatcaatgcctctgtggtgaacatccagaaggagatcgaccggctgaacgaggtggccaagaatctgaacgagagcctgatcgatctgcaggagctgggcaagtatgagcagtacatcaagggctctggcagagagaacctgtatttccagggaggaggaggcagcggatacatccctgaggcaccaagggacggacaggcctacgtgcgcaaggatggcgagtgggtgctgctgtccacctttctgggccatcatcaccaccaccaccaccactga

SEQ ID NO: 1324 - DNA, 3846 bp, Artificial Sequence
  Description of Artificial Sequence: Synthetic polynucleotide
atgggcatcctgccaagcccaggaatgcccgccctgctgtctctggtgagcctgctgtccgtgctgctgatgggatgcgtggcagagacaggcacacagtgcgtgaacctgaccacaaggacccagctgccccctgcctataccaattctttcacacggggcgtgtactatcccgacaaggtgtttagaagctccgtgctgcactccacacaggatctgtttctgcctttcttttctaacgtgacctggttccacgccatccacgtgtccggcaccaatggcacaaagcggttcgacaatcccgtgctgccttttaacgatggcgtgtacttcgccagcaccgagaagtccaacatcatcagaggctggatctttggcagtacactggactctaagacacagagcctgctgatcgtgaacaatgccaccaacgtggtgatcaaggtgtgcgagttccagttttgtaatgatccattcctgggcgtgtactatcacaagaacaataagtcctggatggagtctgagtttcgcgtgtattctagcgccaacaattgcacatttgagtacgtgagccagcccttcctgatggacctggagggcaagcagggcaatttcaagaacctgagggagttcgtgtttaagaatatcgatggctacttcaagatctacagcaagcacaccccaatcaacctggtgcgcgacctgccacagggattctccgccctggagccactggtggatctgcccatcggcatcaacatcacccggtttcagacactgctggccctgcacagatcctacctgacaccaggcgactcctctagcggatggaccgcaggagctgccgcctactatgtgggctatctgcagccccggaccttcctgctgaagtacaacgagaatggcaccatcacagacgcagtggattgcgccctggaccccctgtctgagacaaagtgtacactgaagagctttaccgtggagaagggcatctatcagacaagcaatttcagggtgcagcctaccgagtccatcgtgcgctttcccaatatcacaaacctgtgcccttttggcgaggtgttcaacgccaccagattcgccagcgtgtacgcctggaatcggaagagaatctccaactgcgtggccgactattctgtgctgtacaactccgcctctttcagcacctttaagtgctatggcgtgtctcccacaaagctgaatgatctgtgctttaccaacgtgtacgccgatagcttcgtgatcaggggagacgaagtgagacagatcgcaccaggacagacaggaaagatcgcagactacaattataagctgcctgacgatttcaccggctgcgtgatcgcctggaactccaacaatctggattctaaagtgggcggcaactacaattatctgtacaggctgtttcgcaagtccaatctgaagccattcgagcgggacatctccacagagatctaccaggccggctctaccccctgcaatggcgtggagggctttaactgttatttccctctgcagtcttacggcttccagccaacaaacggcgtgggctatcagccctacagagtggtggtgctgtcctttgagctgctgcacgcaccagcaacagtgtgcggcccaaagaagtctaccaatctggtgaagaacaagtgcgtgaacttcaacttcaacggactgaccggcacaggcgtgctgaccgagagcaataagaagttcctgccttttcagcagttcggcagggacatcgcagataccacagacgccgtgcgcgaccctcagaccctggagatcctggacatcacaccatgcagcttcggcggcgtgtccgtgatcacaccaggcaccaatacatccaaccaggtggccgtgctgtatcaggacgtgaattgtaccgaggtgcccgtggcaatccacgcagatcagctgacccctacatggcgggtgtactctaccggcagcaacgtgttccagacaagagccggatgcctgatcggagcagagcacgtgaacaatagctatgagtgcgacatccctatcggcgccggcatctgtgccagctaccagacccagacaaactccccatctggagcaggctccgtggccagccagtccatcatcgcctataccatgagcctgggcgccgagaacagcgtggcctactccaacaattctatcgccatccctaccaacttcacaatcagcgtgaccacagagatcctgccagtgtctatgaccaagacaagcgtggactgcacaatgtatatctgtggcgatagcaccgagtgctccaacctgctgctgcagtacggctccttttgtacccagctgaatagagccctgacaggcatcgccgtggagcaggataagaacacacaggaggtgttcgcccaggtgaagcagatctacaagaccccacccatcaaggactttggcggcttcaacttcagccagatcctgcctgatccaagcaagccctccaagaggtcttttatcgaggacctgctgttcaacaaggtgaccctggccgatgccggcttcatcaagcagtatggagattgcctgggagacatcgcagcccgcgacctgatctgtgcccagaagtttaatggcctgaccgtgctgcctccactgctgacagatgagatgatcgcccagtacacatctgccctgctggccggcaccatcacaagcggatggaccttcggcgcaggagccgccctgcagatcccttttgccatgcagatggcctataggttcaacggcatcggcgtgacccagaatgtgctgtacgagaaccagaagctgatcgccaatcagtttaacagcgccatcggcaagatccaggactctctgtcctctacagccagcgccctgggcaagctgcaggatgtggtgaatcagaacgcccaggccctgaataccctggtgaagcagctgagctccaacttcggcgccatctctagcgtgctgaatgacatcctgagccggctggacccccctgaggcagaggtgcagatcgacaggctgatcacaggccgcctgcagagcctgcagacctacgtgacacagcagctgatcagggcagcagagatcagagcctccgccaatctggccgccaccaagatgagcgagtgcgtgctgggacagtccaagagggtggacttttgtggcaagggctatcacctgatgtctttcccacagagcgcccctcacggcgtggtgtttctgcacgtgacctacgtgccagcccaggagaagaacttcaccacagcaccagccatctgccacgatggaaaggcacactttcctagggagggcgtgttcgtgtctaacggcacccactggtttgtgacacagcgcaatttctacgagccacagatcatcaccacagacaatacattcgtgagcggcaactgtgatgtggtgatcggcatcgtgaacaataccgtgtatgatccactgcagcccgagctggactcctttaaggaggagctggataagtacttcaagaatcacacctctcccgacgtggatctgggcgacatctccggcatcaatgcctctgtggtgaacatccagaaggagatcgaccggctgaacgaggtggccaagaatctgaacgagagcctgatcgatctgcaggagctgggcaagtatgagcagtacatcaagggctctggcagagagaacctgtatttccagggaggaggaggcagcggatacatccctgaggcaccaagggacggacaggcctacgtgcgcaaggatggcgagtgggtgctgctgtccacctttctgggccatcatcaccaccaccaccaccactga

SEQ ID NO: 1325 - DNA, 3846 bp, Artificial Sequence
  Description of Artificial Sequence: Synthetic polynucleotide
atgggcatcctgccaagcccaggaatgcccgccctgctgtctctggtgagcctgctgtccgtgctgctgatgggatgcgtggcagagacaggcacacagtgcgtgaacctgaccacaaggacccagctgccccctgcctataccaattctttcacacggggcgtgtactatcccgacaaggtgtttagaagctccgtgctgcactccacacaggatctgtttctgcctttcttttctaacgtgacctggttccacgccatccacgtgtccggcaccaatggcacaaagcggttcgacaatcccgtgctgccttttaacgatggcgtgtacttcgccagcaccgagaagtccaacatcatcagaggctggatctttggcaccacactggactctaagacacagagcctgctgatcgtgaacaatgccaccaacgtggtgatcaaggtgtgcgagttccagttttgtaatgatccattcctgggcgtgtactatcacaagaacaataagtcctggatggagtctgagtttcgcgtgtattctagcgccaacaattgcacatttgagtacgtgagccagcccttcctgatggacctggagggcaagcagggcaatttcaagaacctgagggagttcgtgtttaagaatatcgatggctacttcaagatctacagcaagcacaccccaatcaacctggtgcgcgacctgccacagggattctccgccctggagccactggtggatctgcccatcggcatcaacatcacccggtttcagacactgctggccctgcacagatcctacctgacaccaggcgactcctctagcggatggaccgcaggagctgccgcctactatgtgggctatctgcagccccggaccttcctgctgaagtacaacgagaatggcaccatcacagacgcagtggattgcgccctggaccccctgtctgagacaaagtgtacactgaagagctttaccgtggagaagggcatctatcagacaagcaatttcagggtgcagcctaccgagtccatcgtgcgctttcccaatatcacaaacctgtgcccttttggcgaggtgttcaacgccaccagattcgccagcgtgtacgcctggaatcggaagagaatctccaactgcgtggccgactattctgtgctgtacaactccgcctctttcagcacctttaagtgctatggcgtgtctcccacaaagctgaatgatctgtgctttaccaacgtgtacgccgatagcttcgtgatcaggggagacgaagtgagacagatcgcaccaggacagacaggaaagatcgcagactacaattataagctgcctgacgatttcaccggctgcgtgatcgcctggaactccaacaatctggattctaaagtgggcggcaactacaattatctgtacaggctgtttcgcaagtccaatctgaagccattcgagcgggacatctccacagagatctaccaggccggctctaccccctgcaatggcgtggagggctttaactgttatttccctctgcagtcttacggcttccagccaacaaacggcgtgggctatcagccctacagagtggtggtgctgtcctttgagctgctgcacgcaccagcaacagtgtgcggcccaaagaagtctaccaatctggtgaagaacaagtgcgtggatttcaacttcaacggactgaccggcacaggcgtgctgaccgagagcaataagaagttcctgccttttcagcagttcggcagggacatcgcagataccacagacgccgtgcgcgaccctcagaccctggagatcctggacatcacaccatgcagcttcggcggcgtgtccgtgatcacaccaggcaccaatacatccaaccaggtggccgtgctgtatcaggacgtgaattgtaccgaggtgcccgtggcaatccacgcagatcagctgacccctacatggcgggtgtactctaccggcagcaacgtgttccagacaagagccggatgcctgatcggagcagagcacgtgaacaatagctatgagtgcgacatccctatcggcgccggcatctgtgccagctaccagacccagacaaactccccatctggagcaggctccgtggccagccagtccatcatcgcctataccatgagcctgggcgccgagaacagcgtggcctactccaacaattctatcgccatccctaccaacttcacaatcagcgtgaccacagagatcctgccagtgtctatgaccaagacaagcgtggactgcacaatgtatatctgtggcgatagcaccgagtgctccaacctgctgctgcagtacggctccttttgtacccagctgaatagagccctgacaggcatcgccgtggagcaggataagaacacacaggaggtgttcgcccaggtgaagcagatctacaagaccccacccatcaaggactttggcggcttcaacttcagccagatcctgcctgatccaagcaagccctccaagaggtcttttatcgaggacctgctgttcaacaaggtgaccctggccgatgccggcttcatcaagcagtatggagattgcctgggagacatcgcagcccgcgacctgatctgtgcccagaagtttaatggcctgaccgtgctgcctccactgctgacagatgagatgatcgcccagtacacatctgccctgctggccggcaccatcacaagcggatggaccttcggcgcaggagccgccctgcagatcccttttgccatgcagatggcctataggttcaacggcatcggcgtgacccagaatgtgctgtacgagaaccagaagctgatcgccaatcagtttaacagcgccatcggcaagatccaggactctctgtcctctacagccagcgccctgggcaagctgcaggatgtggtgaatcagaacgcccaggccctgaataccctggtgaagcagctgagctccaacttcggcgccatctctagcgtgctgaatgacatcctgagccggctggacccccctgaggcagaggtgcagatcgacaggctgatcacaggccgcctgcagagcctgcagacctacgtgacacagcagctgatcagggcagcagagatcagagcctccgccaatctggccgccaccaagatgagcgagtgcgtgctgggacagtccaagagggtggacttttgtggcaagggctatcacctgatgtctttcccacagagcgcccctcacggcgtggtgtttctgcacgtgacctacgtgccagcccaggagaagaacttcaccacagcaccagccatctgccacgatggaaaggcacactttcctagggagggcgtgttcgtgtctaacggcacccactggtttgtgacacagcgcaatttctacgagccacagatcatcaccacagacaatacattcgtgagcggcaactgtgatgtggtgatcggcatcgtgaacaataccgtgtatgatccactgcagcccgagctggactcctttaaggaggagctggataagtacttcaagaatcacacctctcccgacgtggatctgggcgacatctccggcatcaatgcctctgtggtgaacatccagaaggagatcgaccggctgaacgaggtggccaagaatctgaacgagagcctgatcgatctgcaggagctgggcaagtatgagcagtacatcaagggctctggcagagagaacctgtatttccagggaggaggaggcagcggatacatccctgaggcaccaagggacggacaggcctacgtgcgcaaggatggcgagtgggtgctgctgtccacctttctgggccatcatcaccaccaccaccaccactga

SEQ ID NO: 1326 - DNA, 3846 bp, Artificial Sequence
  Description of Artificial Sequence: Synthetic polynucleotide
atgggcatcctgccaagcccaggaatgcccgccctgctgtctctggtgagcctgctgtccgtgctgctgatgggatgcgtggcagagacaggcacacagtgcgtgaacctgaccacaaggacccagctgccccctgcctataccaattctttcacacggggcgtgtactatcccgacaaggtgtttagaagctccgtgctgcactccacacaggatctgtttctgcctttcttttctaacgtgacctggttccacgccatccacgtgtccggcaccaatggcacaaagcggttcgacaatcccgtgctgccttttaacgatggcgtgtacttcgccagcaccgagaagtccaacatcatcagaggctggatctttggcaccacactggactctaagacacagagcctgctgatcgtgaacaatgccaccaacgtggtgatcaaggtgtgcgagttccagttttgtaatgatccattcctgggcgtgtactatcacaagaacaataagtcctggatggagtctgagtttcgcgtgtattctagcgccaacaattgcacatttgagtacgtgagccagcccttcctgatggacctggagggcaagcagggcaatttcaagaacctgagggagttcgtgtttaagaatatcgatggctacttcaagatctacagcaagcacaccccaatcaacctggtgcgcgacctgccacagggattctccgccctggagccaaaagtggatctgcccatcggcatcaacatcacccggtttcagacactgctggccctgcacagatcctacctgacaccaggcgactcctctagcggatggaccgcaggagctgccgcctactatgtgggctatctgcagccccggaccttcctgctgaagtacaacgagaatggcaccatcacagacgcagtggattgcgccctggaccccctgtctgagacaaagtgtacactgaagagctttaccgtggagaagggcatctatcagacaagcaatttcagggtgcagcctaccgagtccatcgtgcgctttcccaatatcacaaacctgtgcccttttggcgaggtgttcaacgccaccagattcgccagcgtgtacgcctggaatcggaagagaatctccaactgcgtggccgactattctgtgctgtacaactccgcctctttcagcacctttaagtgctatggcgtgtctcccacaaagctgaatgatctgtgctttaccaacgtgtacgccgatagcttcgtgatcaggggagacgaagtgagacagatcgcaccaggacagacaggaaagatcgcagactacaattataagctgcctgacgatttcaccggctgcgtgatcgcctggaactccaacaatctggattctaaagtgggcggcaactacaattatctgtacaggctgtttcgcaagtccaatctgaagccattcgagcgggacatctccacagagatctaccaggccggctctaccccctgcaatggcgtggagggctttaactgttatttccctctgcagtcttacggcttccagccaacaaacggcgtgggctatcagccctacagagtggtggtgctgtcctttgagctgctgcacgcaccagcaacagtgtgcggcccaaagaagtctaccaatctggtgaagaacaagtgcgtgaacttcaacttcaacggactgaccggcacaggcgtgctgaccgagagcaataagaagttcctgccttttcagcagttcggcagggacatcgcagataccacagacgccgtgcgcgaccctcagaccctggagatcctggacatcacaccatgcagcttcggcggcgtgtccgtgatcacaccaggcaccaatacatccaaccaggtggccgtgctgtatcaggacgtgaattgtaccgaggtgcccgtggcaatccacgcagatcagctgacccctacatggcgggtgtactctaccggcagcaacgtgttccagacaagagccggatgcctgatcggagcagagcacgtgaacaatagctatgagtgcgacatccctatcggcgccggcatctgtgccagctaccagacccagacaaactccccatctggagcaggctccgtggccagccagtccatcatcgcctataccatgagcctgggcgccgagaacagcgtggcctactccaacaattctatcgccatccctaccaacttcacaatcagcgtgaccacagagatcctgccagtgtctatgaccaagacaagcgtggactgcacaatgtatatctgtggcgatagcaccgagtgctccaacctgctgctgcagtacggctccttttgtacccagctgaatagagccctgacaggcatcgccgtggagcaggataagaacacacaggaggtgttcgcccaggtgaagcagatctacaagaccccacccatcaaggactttggcggcttcaacttcagccagatcctgcctgatccaagcaagccctccaagaggtcttttatcgaggacctgctgttcaacaaggtgaccctggccgatgccggcttcatcaagcagtatggagattgcctgggagacatcgcagcccgcgacctgatctgtgcccagaagtttaatggcctgaccgtgctgcctccactgctgacagatgagatgatcgcccagtacacatctgccctgctggccggcaccatcacaagcggatggaccttcggcgcaggagccgccctgcagatcccttttgccatgcagatggcctataggttcaacggcatcggcgtgacccagaatgtgctgtacgagaaccagaagctgatcgccaatcagtttaacagcgccatcggcaagatccaggactctctgtcctctacagccagcgccctgggcaagctgcaggatgtggtgaatcagaacgcccaggccctgaataccctggtgaagcagctgagctccaacttcggcgccatctctagcgtgctgaatgacatcctgagccggctggacccccctgaggcagaggtgcagatcgacaggctgatcacaggccgcctgcagagcctgcagacctacgtgacacagcagctgatcagggcagcagagatcagagcctccgccaatctggccgccaccaagatgagcgagtgcgtgctgggacagtccaagagggtggacttttgtggcaagggctatcacctgatgtctttcccacagagcgcccctcacggcgtggtgtttctgcacgtgacctacgtgccagcccaggagaagaacttcaccacagcaccagccatctgccacgatggaaaggcacactttcctagggagggcgtgttcgtgtctaacggcacccactggtttgtgacacagcgcaatttctacgagccacagatcatcaccacagacaatacattcgtgagcggcaactgtgatgtggtgatcggcatcgtgaacaataccgtgtatgatccactgcagcccgagctggactcctttaaggaggagctggataagtacttcaagaatcacacctctcccgacgtggatctgggcgacatctccggcatcaatgcctctgtggtgaacatccagaaggagatcgaccggctgaacgaggtggccaagaatctgaacgagagcctgatcgatctgcaggagctgggcaagtatgagcagtacatcaagggctctggcagagagaacctgtatttccagggaggaggaggcagcggatacatccctgaggcaccaagggacggacaggcctacgtgcgcaaggatggcgagtgggtgctgctgtccacctttctgggccatcatcaccaccaccaccaccactga

SEQ ID NO: 1327 - DNA, 3846 bp, Artificial Sequence
  Description of Artificial Sequence: Synthetic polynucleotide
atgggcatcctgccaagcccaggaatgcccgccctgctgtctctggtgagcctgctgtccgtgctgctgatgggatgcgtggcagagacaggcacacagtgcgtgaacctgaccacaaggacccagctgccccctgcctataccaattctttcacacggggcgtgtactatcccgacaaggtgtttagaagcgatgtgctgcactccacacaggatctgtttctgcctttcttttctaacgtgacctggttccacgccatccacgtgtccggcaccaatggcacaaagcggttcgacaatcccgtgctgccttttaacgatggcgtgtacttcgccagcaccgagaagtccaacatcatcagaggctggatctttggcaccacactggactctaagacacagagcctgctgatcgtgaacaatgccaccaacgtggtgatcaaggtgtgcgagttccagttttgtgatgatccattcctgggcgtgtactatcacaagaacaataagtcctggatggagaaagagtttcgcgtgtattctagcgccaacaattgcacatttgagtacgtgagccagcccttcctgatggacctgggtggcaagcagggcaatttcaagtggctgagggagttcgtgtttaagaatatcgatggctacttcaagatctacagcaagcacaccccaatcaacctggtgcgcgacctgccacagggattctccgccctggagccactgatggatctgcccatcggcatcaacatcacccggtttcagacactgctggccctgcacagatcctacctgacaccaggcgactcctctagcggatggaccgcaggagctgccgcctactatgtgggctatctgcagccccggaccttcctgctgaagtacaacgagaatggcaccatcacagacgcagtggattgcgccctggaccccctgtctgagacaaagtgtacactgaagagctttaccgtggagaagggcatctatcagacaagcaatttcagggtgcagcctaccgagtccatcgtgcgctttcccaatatcacaaacctgtgcccttttggcgaggtgttcaacgccaccagattcgccagcgtgtacgcctggaatcggaagagaatctccaactgcgtggccgactattctgtgctgtacaactccgcctctttcagcacctttaagtgctatggcgtgtctcccacaaagctgaatgatctgtgctttaccaacgtgtacgccgatagcttcgtgatcaggggagacgaagtgagacagatcgcaccaggacagacaggaaagatcgcagactacaattataagctgcctgacgatttcaccggctgcgtgatcgcctggaactccaacaatctggattctaaagtgggcggcaactacaattatctgtacaggctgtttcgcaagtccaatctgaagccattcgagcgggacatctccacagagatctaccaggccggctctaccccctgcaatggcgtggagggctttaactgttatttccctctgcagtcttacggcttccagccaacaaacggcgtgggctatcagccctacagagtggtggtgctgtcctttgagctgctgcacgcaccagcaacagtgtgcggcccaaagaagtctaccaatctggtgaagaacaagtgcgtgaacttcaacttcaacggactgaccggcacaggcgtgctgaccgagagcaataagaagttcctgccttttcagcagttcggcagggacatcgcagataacacagacgccgtgcgcgaccctcagaccctggagatcctggacatcacaccatgcagcttcggcggcgtgtccgtgatcacaccaggcaccaatacatccaaccaggtggccgtgctgtatcaggacgtgaattgtaccgaggtgcccaatgcaatccacgcagatcagctgacccctacatggcgggtgtactctaccggcagcaacgtgttccagacaagagccggatgcctgatcggagcagagcacgtgaacaatagctatgagtgcgacatccctatcggcgccggcatctgtgccagctaccagacccagacaaactccccatctggagcaggctccgtggccagccagtccatcatcgcctataccatgagcctgggcgccgagaacagcgtggcctactccaacaattctatcgccatccctaccaacttcacaatcagcgtgaccacagagatcctgccagtgtctatgaccaagacaagcgtggactgcacaatgtatatctgtggcgatagcaccgagtgctccaacctgctgctgcagtacggctccttttgtacccagctgaatagagccctgcaaggcatcgcccaagagcaggataagaacacacaggaggtgttcgcccaggtgaagcagatctacaagaccccacccatcaaggactttggcggcttcaacttcagccagatcctgcctgatccaagcaagccctccaagaggtcttttatcgaggacctgctgttcaacaaggtgaccctggccgatgccggcttcatcaagcagtatggagattgcctgggagacatcgcagcccgcgacctgatctgtgcccagaagtttaatggcctgaccgtgctgcctccactgctgacagatgagatgatcgcccagtacacatctgccctgctggccggcaccatcacaagcggatggaccttcggcgcaggagccgccctgcagatcccttttgccatgcagatggcctataggttcaacggcatcggcgtgacccagaatgtgctgtacgagaaccagaagctgatcgccaatcagtttaaccaagccatcggcaagatccaggactctctgtcctctacagccagcgccctgggcaagctgcaggatgtggtgaatcagaacgcccaggccctgaataccctggtgaagcagctgagctccaacttcggcgccatctctagcgtgctgaatgacatcctgagccggctggacccccctgaggcagaggtgcagatcgacaggctgatcacaggccgcctgcagagcctgcagacctacgtgacacagcagctgatcagggcagcagagatcagagcctccgccaatctggccgccaccaagatgagcgagtgcgtgctgggacagtccaagagggtggacttttgtggcaagggctatcacctgatgtctttcccacagagcgcccctcacggcgtggtgtttctgcacgtgacctacgtgccagcccaggagaagaacttcaccacagcaccagccatctgccacgatggaaaggcattttttcctagggagggcgtgttcgtgtctaacggcacccaatggtttgtgacacagcgcaatttctacgagccacagatcatcaccacagacaatacattcgtgagcggcaactgtgatgtggtgatcggcatcgtgaacaataccgtgtatgatccactgcagcccgagctggactcctttaaggaggagctggataagtacttcaagaatcacacctctcccgacgtggatctgggcgacatctccggcatcaatgcctctgtggtgaacatccagaaggagatcgaccggctgaacgaggtggccaagaatctgaacgagagcctgatcgatctgcaggagctgggcaagtatgagcagtacatcaagggctctggcagagagaacctgtatttccagggaggaggaggcagcggatacatccctgaggcaccaagggacggacaggcctacgtgcgcaaggatggcgagtgggtgctgctgtccacctttctgggccatcatcaccaccaccaccaccactga

SEQ ID NO: 1328 - DNA, 3846 bp, Artificial Sequence
  Description of Artificial Sequence: Synthetic polynucleotide
atgggcatcctgccaagcccaggaatgcccgccctgctgtctctggtgagcctgctgtccgtgctgctgatgggatgcgtggcagagacaggcacacagtgcgtgaacctgaccacaaggacccagctgccccctgcctataccaattctttcacacggggcgtgtactatcccgacaaggtgtttagaagctccgtgctgcactccacacaggatctgtttctgcctttcttttctaacgtgacctggttccacgccatccacgtgtccggcaccaatggcacaaagcggttcgacaatcccgtgctgccttttaacgatggcgtgtacttcgccagcaccgagaagtccaacatcatcagaggctggatctttggcaccacactggactctaagacacagagcctgctgatcgtgaacaatgccaccaacgtggtgatcaaggtgtgcgagttccagttttgtaatgatccattcctgggcgtgtactatcacaagaacaataagtcctggatggagtctgagtttcgcgtgtattctagcgccaacaattgcacatttgagtacgtgagccagcccttcctgatggacctggagggcaagcagggcaatttcaagaacctgagggagttcgtgtttaagaatatcgatggctacttcaagatctacagcaagcacaccccaatcaacctggtgcgcgacctgccacagggattctccgccctggagccactggtggatctgcccatcggcatcaacatcacccggtttcagacactgctggccctgcacagatcctacctgacaccaggcgactcctctagcggatggaccgcaggagctgccgcctactatgtgggctatctgcagccccggaccttcctgctgaagtacaacgagaatggcaccatcacagacgcagtggattgcgccctggaccccctgtctgagacaaagtgtacactgaagagctttaccgtggagaagggcatctatcagacaagcaatttcagggtgcagcctaccgagtccatcgtgcgctttcccaatatcacaaacctgtgcccttttggcgaggtgttcaacgccaccagattcgccagcgtgtacgcctggaatcggaagagaatctccaactgcgtggccgactattctgtgctgtacaactccgcctctttcagcacctttaagtgctatggcgtgtctcccacaaagctgaatgatctgtgctttaccaacgtgtacgccgatagcttcgtgatcaggggagacgaagtgagacagatcgcaccaggacagacaggaaagatcgcagactacaattataagctgcctgacgatttcaccggctgcgtgatcgcctggaactccaacaatctggattctaaagtgggcggcaactacaattatctgtacaggctgtttcgcaagtccaatctgaagccattcgagcgggacatctccacagagatctaccaggccggctctaccccctgcaatggcgtggagggctttaactgttatttccctctgcagtcttacggcttccagccaacaaacggcgtgggctatcagccctacagagtggtggtgctgtcctttgagctgctgcacgcaccagcaacagtgtgcggcccaaagaagtctaccaatctggtgaagaacaagtgcgtgaacttcaacttcaacggactgaccggcacaggcgtgctgaccgagagcaataagaagttcctgccttttcagcagttcggcagggacatcgcagataccacagacgccgtgcgcgaccctcagaccctggagatcctggacatcacaccatgcagcttcggcggcgtgtccgtgatcacaccaggcaccaatacatccaaccaggtggccgtgctgtatcaggacgtgaattgtaccgaggtgcccgtggcaatccacgcagatcagctgacccctacatggcgggtgtactctaccggcagcaacgtgttccagacaagagccggatgcctgatcggagcagagcacgtgaacaatagctatgagtgcgacatccctatcggcgccggcatctgtgccagctaccagacccagacaaactccccatctggagcaggctccgtggccagccagtccatcatcgcctataccatgagcctgggcgccgagaacagcgtggcctactccaacaattctatcgccatccctaccaacttcacaatcagcgtgaccacagagatcctgccagtgtctatgaccaagacaagcgtggactgcacaatgtatatctgtggcgatagcaccgagtgctccaacctgctgctgcagtacggctccttttgtacccagctgaatagagccctgacaggcatcgccgtggagcaggataagaacacacaggaggtgttcgcccaggtgaagcagatctacaagaccccacccatcaaggactttggcggcttcaacttcagccagatcctgcctgatccaagcaagccctccaagaggtcttttatcgaggacctgctgttcaacaaggtgaccctggccgatgccggcttcatcaagcagtatggagattgcctgggagacatcgcagcccgcgacctgatctgtgcccagaagtttaatggcctgaccgtgctgcctccactgctgacagatgagatgatcgcccagtacacatctgccctgctggccggcaccatcacaagcggatggaccttcggcgcaggagccgccctgcagatcccttttgccatgcagatggcctataggttcaacggcatcggcgtgacccagaatgtgctgtacgagaaccagaagctgatcgccaatcagtttaacagcgccatcggcaagatccaggactctctgtcctctacagccagcgccctgggcaagctgcaggatgtggtgaatcagaacgcccaggccctgcaaaccctggtgaagcagctgagctccaacttcggcgccatctctagcgtgctgaatgacatcctgagccggctggacccccctgaggcagaggtgcagatcgacaggctgatcacaggccgcctgcagagcctgcagacctacgtgacacagcagctgatcagggcagcagagatcagagcctccgccaatctggccgccaccaagatgagcgagtgcgtgctgggacagtccaagagggtggacttttgtggcaagggctatcacctgatgtctttcccacagagcgcccctcacggcgtggtgtttctgcacgtgacctacgtgccagcccaggagaagaacttcaccacagcaccagccatctgccacgatggaaaggcacactttcctagggagggcgtgttcgtgtctaacggcacccactggtttgtgacacagcgcaatttctacgagccacagatcatcaccacagacaatacattcgtgagcggcaactgtgatgtggtgatcggcatcgtgaacaataccgtgtatgatccactgcagcccgagctggactcctttaaggaggagctggataagtacttcaagaatcacacctctcccgacgtggatctgggcgacatctccggcatcaatgcctctgtggtgaacatccagaaggagatcgaccggctgaacgaggtggccaagaatctgaacgagagcctgatcgatctgcaggagctgggcaagtatgagcagtacatcaagggctctggcagagagaacctgtatttccagggaggaggaggcagcggatacatccctgaggcaccaagggacggacaggcctacgtgcgcaaggatggcgagtgggtgctgctgtccacctttctgggccatcatcaccaccaccaccaccactga

SEQ ID NO: 1329 - DNA, 3846 bp, Artificial Sequence
  Description of Artificial Sequence: Synthetic polynucleotide
atgggcatcctgccaagcccaggaatgcccgccctgctgtctctggtgagcctgctgtccgtgctgctgatgggatgcgtggcagagacaggcacacagtgcgtgaacctgaccacaaggacccagctgccccctgcctataccaattctttcacacggggcgtgtactatcccgacaaggtgtttagaagctccgtgctgcactccacacaggatctgtttctgcctttcttttctaacgtgacctggttccacgccatccacgtgtccggcaccaatggcacaaagcggttcgacaatcccgtgctgccttttaacgatggcgtgtacttcgccagcaccgagaagtccaacatcatcagaggctggatctttggcaccacactggactctaagacacagagcctgctgatcgtgaacaatgccaccaacgtggtgatcaaggtgtgcgagttccagttttgtaatgatccattcctgggcgtgtactatcacaagaacaataagtcctggatggagtctgagtttcgcgtgtattctagcgccaacaattgcacatttgagtacgtgagccagcccttcctgatggacgtagagggcaagcagggcaatttcaagaacctgagggagttcgtgtttaagaatatcgatggctacttcaagatctacagcaagcacaccccaatcaacctggtgcgcgacctgccacagggattctccgccctggagccactggtggatctgcccatcggcatcaacatcacccggtttcagacactgctggccctgcacagatcctacctgacaccaggcgactcctctagcggatggaccgcaggagctgccgcctactatgtgggctatctgcagccccggaccttcctgctgaagtacaacgagaatggcaccatcacagacgcagtggattgcgccctggaccccctgtctgagacaaagtgtacactgaagagctttaccgtggagaagggcatctatcagacaagcaatttcagggtgcagcctaccgagtccatcgtgcgctttcccaatatcacaaacctgtgcccttttggcgaggtgttcaacgccaccagattcgccagcgtgtacgcctggaatcggaagagaatctccaactgcgtggccgactattctgtgctgtacaactccgcctctttcagcacctttaagtgctatggcgtgtctcccacaaagctgaatgatctgtgctttaccaacgtgtacgccgatagcttcgtgatcaggggagacgaagtgagacagatcgcaccaggacagacaggaaagatcgcagactacaattataagctgcctgacgatttcaccggctgcgtgatcgcctggaactccaacaatctggattctaaagtgggcggcaactacaattatctgtacaggctgtttcgcaagtccaatctgaagccattcgagcgggacatctccacagagatctaccaggccggctctaccccctgcaatggcgtggagggctttaactgttatttccctctgcagtcttacggcttccagccaacaaacggcgtgggctatcagccctacagagtggtggtgctgtcctttgagctgctgcacgcaccagcaacagtgtgcggcccaaagaagtctaccaatctggtgaagaacaagtgcgtgaacttcaacttcaacggactgaccggcacaggcgtgctgaccgagagcaataagaagttcctgccttttcagcagttcggcagggacatcgcagataccacagacgccgtgcgcgaccctcagaccctggagatcctggacatcacaccatgcagcttcggcggcgtgtccgtgatcacaccaggcaccaatacatccaaccaggtggccgtgctgtatcaggacgtgaattgtaccgaggtgcccgtggcaatccacgcagatcagctgacccctacatggcgggtgtactctaccggcagcaacgtgttccagacaagagccggatgcctgatcggagcagagcacgtgaacaatagctatgagtgcgacatccctatcggcgccggcatctgtgccagctaccagacccagacaaactccccatctggagcaggctccgtggccagccagtccatcatcgcctataccatgagcctgggcgccgagaacagcgtggcctactccaacaattctatcgccatccctaccaacttcacaatcagcgtgaccacagagatcctgccagtgtctatgaccaagacaagcgtggactgcacaatgtatatctgtggcgatagcaccgagtgctccaacctgctgctgcagtacggctccttttgtacccagctgaatagagccctgacaggcatcgccgtggagcaggataagaacacacaggaggtgttcgcccaggtgaagcagatctacaagaccccacccatcaaggactttggcggcttcaacttcagccagatcctgcctgatccaagcaagccctccaagaggtcttttatcgaggacctgctgttcaacaaggtgaccctggccgatgccggcttcatcaagcagtatggagattgcctgggagacatcgcagcccgcgacctgatctgtgcccagaagtttaatggcctgaccgtgctgcctccactgctgacagatgagatgatcgcccagtacacatctgccctgctggccggcaccatcacaagcggatggaccttcggcgcaggagccgccctgcagatcccttttgccatgcagatggcctataggttcaacggcatcggcgtgacccagaatgtgctgtacgagaaccagaagctgatcgccaatcagtttaacagcgccatcggcaagatccaggactctctgtcctctacagccagcgccctgggcaagctgcaggatgtggtgaatcagaacgcccaggccctgaataccctggtgaagcagctgagctccaacttcggcgccatctctagcgtgctgaatgacatcctgagccggctggacccccctgaggcagaggtgcagatcgacaggctgatcacaggccgcctgcagagcctgcagacctacgtgacacagcagctgatcagggcagcagagatcagagcctccgccaatctggccgccaccaagatgagcgagtgcgtgctgggacagtccaagagggtggacttttgtggcaagggctatcacctgatgtctttcccacagagcgcccctcacggcgtggtgtttctgcacgtgacctacgtgccagcccaggagaagaacttcaccacagcaccagccatctgccacgatggaaaggcacactttcctagggagggcgtgttcgtgtctaacggcacccactggtttgtgacacagcgcaatttctacgagccacagatcatcaccacagacaatacattcgtgagcggcaactgtgatgtggtgatcggcatcgtgaacaataccgtgtatgatccactgcagcccgagctggactcctttaaggaggagctggataagtacttcaagaatcacacctctcccgacgtggatctgggcgacatctccggcatcaatgcctctgtggtgaacatccagaaggagatcgaccggctgaacgaggtggccaagaatctgaacgagagcctgatcgatctgcaggagctgggcaagtatgagcagtacatcaagggctctggcagagagaacctgtatttccagggaggaggaggcagcggatacatccctgaggcaccaagggacggacaggcctacgtgcgcaaggatggcgagtgggtgctgctgtccacctttctgggccatcatcaccaccaccaccaccactga

SEQ ID NO: 1330 - DNA, 3846 bp, Artificial Sequence
  Description of Artificial Sequence: Synthetic polynucleotide
atgggcatcctgccaagcccaggaatgcccgccctgctgtctctggtgagcctgctgtccgtgctgctgatgggatgcgtggcagagacaggcacacagtgcgtgaacctgaccacaaggacccagctgccccctgcctataccaattctttcacacggggcgtgtactatcccgacaaggtgtttagaagctccgtgctgcactccacacaggatctgtttctgcctttcttttctaacgtgacctggttccacgccatccacgtgtccggcaccaatggcacaaagcggttcgacaatcccgtgctgccttttaacgatggcgtgtacttcgccagcaccgagaagtccaacatcatcagaggctggatctttggcaccacactggactctaagacacagagcctgctgatcgtgaacaatgccaccaacgtggtgatcaaggtgtgcgagttccagttttgtaatgatccattcctgggcgtgtactatcacaagaacaataagtcctggatggagtctgagtttcgcgtgtattctagcgccaacaattgcacatttgagtacgtgagccagcccttcctgatggacctggagggcaagcagggcaatttcaagaacctgagggagttcgtgtttaagaatatcgatggctacttcaagatctacagcaagcacaccccaatcaacctggtgcgcgacctgccacagggattctccgccctggagccactggtggatctgcccatcggcatcaacatcacccggtttcagacactgctggccctgcacagatcctacctgacaccaggcgactcctctagcggatggaccgcaggagctgccgcctactatgtgggctatctgcagccccggaccttcctgctgaagtacaacgagaatggcaccatcacagacgcagtggattgcgccctggaccccctgtctgagacaaagtgtacactgaagagctttaccgtggagaagggcatctatcagacaagcaatttcagggtgcagcctaccgagtccatcgtgcgctttcccaatatcacaaacctgtgcccttttggcgaggtgttcaacgccaccagattcgccagcgtgtacgcctggaatcggaagagaatctccaactgcgtggccgactattctgtgctgtacaactccgcctctttcagcacctttaagtgctatggcgtgtctcccacaaagctgaatgatctgtgctttaccaacgtgtacgccgatagcttcgtgatcaggggagacgaagtgagacagatcgcaccaggacagacaggaaagatcgcagactacaattataagctgcctgacgatttcaccggctgcgtgatcgcctggaactccaacaatctggattctaaagtgggcggcaactacaattatctgtacaggctgtttcgcaagtccaatctgaagccattcgagcgggacatctccacagagatctaccaggccggctctaccccctgcaatggcgtggagggctttaactgttatttccctctgcagtcttacggcttccagccaacaaacggcgtgggctatcagccctacagagtggtggtgctgtcctttgagctgctgcacgcaccagcaacagtgtgcggcccaaagaagtctaccaatctggtgaagaacaagtgcgtgaacttcaacttcaacggactgaccggcacaggcgtgctgaccgagagcaataagaagttcctgccttttcagcagttcggcagggacatcgcagataccacagacgccgtgcgcgaccctcagaccctggagatcctggacatcacaccatgcagcttcggcggcgtgtccgtgatcacaccaggcaccaatacatccaaccaggtggccgtgctgtatcaggacgtgaattgtaccgaggtgcccgtggcaatccacgcagatcagctgacccctacatggcgggtgtactctaccggcagcaacgtgttccagacaagagccggatgcctgatcggagcagagcacgtgaacaatagctatgagtgcgacatccctatcggcgccggcatctgtgccagctaccagacccagacaaactccccatctggagcaggctccgtggccagccagtccatcatcgcctataccatgagcctgggcgccgagaacagcgtggcctactccaacaattctatcgccatccctaccaacttcacaatcagcgtgaccacagagatcctgccagtgtctatgaccaagacaagcgtggactgcacaatgtatatctgtggcgatagcaccgagtgctccaacctgctgctgcagtacggctccttttgtacccagctgaatagagccctgacaggcatcgccgtggagcaggataagaacacacaggaggtgttcgcccaggtgaagcagatctacaagaccccacccatcaaggactttggcggcttcaacttcagccagatcctgcctgatccaagcaagccctccaagaggtcttttatcgaggacctgctgttcaacaaggtgaccctggccgatgccggcttcatcaagcagtatggagattgcctgggagacatcgcagcccgcgacctgatctgtgcccagaagtttaatggcctgaccgtgctgcctccactgctgacagatgagatgatcgcccagtacacatctgccctgctggccggcaccatcacaagcggatggaccttcggcgcaggagccgccctgcagatcccttttgccatgcagatggcctataggttcaacggcatcggcgtgacccagaatgtgctgtacgagaaccagaagctgatcgccaatcagtttaacagcgccatcggcaagatccaggactctctgtcctctacagccagcgccctgggcaagctgcaggatgtggtgaatcagaacgcccaggccctggataccctggtgaagcagctgagctccaacttcggcgccatctctagcgtgctgaatgacatcctgagccggctggacccccctgaggcagaggtgcagatcgacaggctgatcacaggccgcctgcagagcctgcagacctacgtgacacagcagctgatcagggcagcagagatcagagcctccgccaatctggccgccaccaagatgagcgagtgcgtgctgggacagtccaagagggtggacttttgtggcaagggctatcacctgatgtctttcccacagagcgcccctcacggcgtggtgtttctgcacgtgacctacgtgccagcccaggagaagaacttcaccacagcaccagccatctgccacgatggaaaggcacactttcctagggagggcgtgttcgtgtctaacggcacccactggtttgtgacacagcgcaatttctacgagccacagatcatcaccacagacaatacattcgtgagcggcaactgtgatgtggtgatcggcatcgtgaacaataccgtgtatgatccactgcagcccgagctggactcctttaaggaggagctggataagtacttcaagaatcacacctctcccgacgtggatctgggcgacatctccggcatcaatgcctctgtggtgaacatccagaaggagatcgaccggctgaacgaggtggccaagaatctgaacgagagcctgatcgatctgcaggagctgggcaagtatgagcagtacatcaagggctctggcagagagaacctgtatttccagggaggaggaggcagcggatacatccctgaggcaccaagggacggacaggcctacgtgcgcaaggatggcgagtgggtgctgctgtccacctttctgggccatcatcaccaccaccaccaccactga

SEQ ID NO: 1331 - DNA, 3846 bp, Artificial Sequence
  Description of Artificial Sequence: Synthetic polynucleotide
atgggcatcctgccaagcccaggaatgcccgccctgctgtctctggtgagcctgctgtccgtgctgctgatgggatgcgtggcagagacaggcacacagtgcgtgaacctgaccacaaggacccagctgccccctgcctataccaattctttcacacggggcgtgtactatcccgacaaggtgtttagaagcgatgtgctgcactccacacaggatctgtttctgcctttcttttctaacgtgacctggttccacgccatccacgtgtccggcaccaatggcacaaagcggttcgacaatcccgtgctgccttttaacgatggcgtgtacttcgccagcaccgagaagtccaacatcatcagaggctggatctttggcaccacactggactctaagacacagagcctgctgatcgtgaacaatgccaccaacgtggtgatcaaggtgtgcgagttccagttttgtgaaaatccattcctgggcgtgtactatcacaagaacaataagtcctggatggagaaagagtttcgcgtgtattctagcgccaacaattgcacatttgagtacgtgagccagcccttcctgatggacctgggtggcaagcagggcaatttcaagaacctgagggagttcgtgtttaagaatatcgatggctacttcaagatctacagcaagcacaccccaatcaacctggtgcgcgacctgccacagggattctccgccctggagccactgatggatctgcccatcggcatcaacatcacccggtttcagacactgctggccctgcacagatcctacctgacaccaggcgactcctctagcggatggaccgcaggagctgccgcctactatgtgggctatctgcagccccggaccttcctgctgaagtacaacgagaatggcaccatcacagacgcagtggattgcgccctggaccccctgtctgagacaaagtgtacactgaagagctttaccgtggagaagggcatctatcagacaagcaatttcagggtgcagcctaccgagtccatcgtgcgctttcccaatatcacaaacctgtgcccttttggcgaggtgttcaacgccaccagattcgccagcgtgtacgcctggaatcggaagagaatctccaactgcgtggccgactattctgtgctgtacaactccgcctctttcagcacctttaagtgctatggcgtgtctcccacaaagctgaatgatctgtgctttaccaacgtgtacgccgatagcttcgtgatcaggggagacgaagtgagacagatcgcaccaggacagacaggaaagatcgcagactacaattataagctgcctgacgatttcaccggctgcgtgatcgcctggaactccaacaatctggattctaaagtgggcggcaactacaattatctgtacaggctgtttcgcaagtccaatctgaagccattcgagcgggacatctccacagagatctaccaggccggctctaccccctgcaatggcgtggagggctttaactgttatttccctctgcagtcttacggcttccagccaacaaacggcgtgggctatcagccctacagagtggtggtgctgtcctttgagctgctgcacgcaccagcaacagtgtgcggcccaaagaagtctaccaatctggtgaagaacaagtgcgtgaacttcaacttcaacggactgaccggcacaggcgtgctgaccgagagcaataagaagttcctgccttttcagcagttcggcagggacatcgcagataatacagacgccgtgcgcgaccctcagaccctggagatcctggacatcacaccatgcagcttcggcggcgtgtccgtgatcacaccaggcaccaatacatccaaccaggtggccgtgctgtatcaggacgtgaattgtaccgaggtgcccaatgcaatccacgcagatcagctgacccctacatggcgggtgtactctaccggcagcaacgtgttccagacaagagccggatgcctgatcggagcagagcacgtgaacaatagctatgagtgcgacatccctatcggcgccggcatctgtgccagctaccagacccagacaaactccccatctggagcaggctccgtggccagccagtccatcatcgcctataccatgagcctgggcgccgagaacagcgtggcctactccaacaattctatcgccatccctaccaacttcacaatcagcgtgaccacagagatcctgccagtgtctatgaccaagacaagcgtggactgcacaatgtatatctgtggcgatagcaccgagtgctccaacctgctgctgcagtacggctccttttgtacccagctgaatagagccctgcaaggcatcgcccaagagcaggataagaacacacaggaggtgttcgcccaggtgaagcagatctacaagaccccacccatcaaggactttggcggcttcaacttcagccagatcctgcctgatccaagcaagccctccaagaggtcttttatcgaggacctgctgttcaacaaggtgaccctggccgatgccggcttcatcaagcagtatggagattgcctgggagacatcgcagcccgcgacctgatctgtgcccagaagtttaatggcctgaccgtgctgcctccactgctgacagatgagatgatcgcccagtacacatctgccctgctggccggcaccatcacaagcggatggaccttcggcgcaggagccgccctgcagatcccttttgccatgcagatggcctataggttcaacggcatcggcgtgacccagaatgtgctgtacgagaaccagaagctgatcgccaatcagtttaaccaagccatcggcaagatccaggactctctgtcctctacagccagcgccctgggcaagctgcaggatgtggtgaatcagaacgcccaggccctgaataccctggtgaagcagctgagctccaacttcggcgccatctctagcgtgctgaatgacatcctgagccggctggacccccctgaggcagaggtgcagatcgacaggctgatcacaggccgcctgcagagcctgcagacctacgtgacacagcagctgatcagggcagcagagatcagagcctccgccaatctggccgccaccaagatgagcgagtgcgtgctgggacagtccaagagggtggacttttgtggcaagggctatcacctgatgtctttcccacagagcgcccctcacggcgtggtgtttctgcacgtgacctacgtgccagcccaggagaagaacttcaccacagcaccagccatctgccacgatggaaaggcattttttcctagggagggcgtgttcgtgtctaacggcacccaatggtttgtgacacagcgcaatttctacgagccacagatcatcaccacagacaatacattcgtgagcggcaactgtgatgtggtgatcggcatcgtgaacaataccgtgtatgatccactgcagcccgagctggactcctttaaggaggagctggataagtacttcaagaatcacacctctcccgacgtggatctgggcgacatctccggcatcaatgcctctgtggtgaacatccagaaggagatcgaccggctgaacgaggtggccaagaatctgaacgagagcctgatcgatctgcaggagctgggcaagtatgagcagtacatcaagggctctggcagagagaacctgtatttccagggaggaggaggcagcggatacatccctgaggcaccaagggacggacaggcctacgtgcgcaaggatggcgagtgggtgctgctgtccacctttctgggccatcatcaccaccaccaccaccactga

SEQ ID NO: 1332 - DNA, 3846 bp, Artificial Sequence
  Description of Artificial Sequence: Synthetic polynucleotide
atgggcatcctgccaagcccaggaatgcccgccctgctgtctctggtgagcctgctgtccgtgctgctgatgggatgcgtggcagagacaggcacacagtgcgtgaacctgaccacaaggacccagctgccccctgcctataccaattctttcacacggggcgtgtactatcccgacaaggtgtttagaagctccgtgctgcactccacacaggatctgtttctgcctttcttttctaacgtgacctggttccacgccatccacgtgtccggcaccaatggcacaaagcggttcgacaatcccgtgctgccttttaacgatggcgtgtacttcgccagcaccgagaagtccaacatcatcagaggctggatctttggcaccacactggactctaagacacagagcctgctgatcgtgaacaatgccaccaacgtggtgatcaaggtgtgcgagttccagttttgtaatgatccattcctgggcgtgtactatcacaagaacaataagtcctggatggagtctgagtttcgcgtgtattctagcgccaacaattgcacatttgagtacgtgagccagcccttcctgatggacctggagggcaagcagggcaatttcaagaacctgagggagttcgtgtttaagaatatcgatggctacttcaagatctacagcaagcacaccccaatcaacctggtgcgcgacctgccacagggattctccgccctggagccactggtggatctgcccatcggcatcaacatcacccggtttcagacactgctggccctgcacagatcctacctgacaccaggcgactcctctagcggatggaccgcaggagctgccgcctactatgtgggctatctgcagccccggaccttcctgctgaagtacaacgagaatggcaccatcacagacgcagtggattgcgccctggaccccctgtctgagacaaagtgtacactgaagagctttaccgtggagaagggcatctatcagacaagcaatttcagggtgcagcctaccgagtccatcgtgcgctttcccaatatcacaaacctgtgcccttttggcgaggtgttcaacgccaccagattcgccagcgtgtacgcctggaatcggaagagaatctccaactgcgtggccgactattctgtgctgtacaactccgcctctttcagcacctttaagtgctatggcgtgtctcccacaaagctgaatgatctgtgctttaccaacgtgtacgccgatagcttcgtgatcaggggagacgaagtgagacagatcgcaccaggacagacaggaaagatcgcagactacaattataagctgcctgacgatttcaccggctgcgtgatcgcctggaactccaacaatctggattctaaagtgggcggcaactacaattatctgtacaggctgtttcgcaagtccaatctgaagccattcgagcgggacatctccacagagatctaccaggccggctctaccccctgcaatggcgtggagggctttaactgttatttccctctgcagtcttacggcttccagccaacaaacggcgtgggctatcagccctacagagtggtggtgctgtcctttgagctgctgcacgcaccagcaacagtgtgcggcccaaagaagtctaccaatctggtgaagaacaagtgcgtgaacttcaacttcaacggactgaccggcacaggcgtgctgaccgagagcagtaagaagttcctgccttttcagcagttcggcagggacatcgcagataccacagacgccgtgcgcgaccctcagaccctggagatcctggacatcacaccatgcagcttcggcggcgtgtccgtgatcacaccaggcaccaatacatccaaccaggtggccgtgctgtatcaggacgtgaattgtaccgaggtgcccgtggcaatccacgcagatcagctgacccctacatggcgggtgtactctaccggcagcaacgtgttccagacaagagccggatgcctgatcggagcagagcacgtgaacaatagctatgagtgcgacatccctatcggcgccggcatctgtgccagctaccagacccagacaaactccccatctggagcaggctccgtggccagccagtccatcatcgcctataccatgagcctgggcgccgagaacagcgtggcctactccaacaattctatcgccatccctaccaacttcacaatcagcgtgaccacagagatcctgccagtgtctatgaccaagacaagcgtggactgcacaatgtatatctgtggcgatagcaccgagtgctccaacctgctgctgcagtacggctccttttgtacccagctgaatagagccctgacaggcatcgccgtggagcaggataagaacacacaggaggtgttcgcccaggtgaagcagatctacaagaccccacccatcaaggactttggcggcttcaacttcagccagatcctgcctgatccaagcaagccctccaagaggtcttttatcgaggacctgctgttcaacaaggtgaccctggccgatgccggcttcatcaagcagtatggagattgcctgggagacatcgcagcccgcgacctgatctgtgcccagaagtttaatggcctgaccgtgctgcctccactgctgacagatgagatgatcgcccagtacacatctgccctgctggccggcaccatcacaagcggatggaccttcggcgcaggagccgccctgcagatcccttttgccatgcagatggcctataggttcaacggcatcggcgtgacccagaatgtgctgtacgagaaccagaagctgatcgccaatcagtttaacagcgccatcggcaagatccaggactctctgtcctctacagccagcgccctgggcaagctgcaggatgtggtgaatcagaacgcccaggccctgaataccctggtgaagcagctgagctccaacttcggcgccatctctagcgtgctgaatgacatcctgagccggctggacccccctgaggcagaggtgcagatcgacaggctgatcacaggccgcctgcagagcctgcagacctacgtgacacagcagctgatcagggcagcagagatcagagcctccgccaatctggccgccaccaagatgagcgagtgcgtgctgggacagtccaagagggtggacttttgtggcaagggctatcacctgatgtctttcccacagagcgcccctcacggcgtggtgtttctgcacgtgacctacgtgccagcccaggagaagaacttcaccacagcaccagccatctgccacgatggaaaggcacactttcctagggagggcgtgttcgtgtctaacggcacccactggtttgtgacacagcgcaatttctacgagccacagatcatcaccacagacaatacattcgtgagcggcaactgtgatgtggtgatcggcatcgtgaacaataccgtgtatgatccactgcagcccgagctggactcctttaaggaggagctggataagtacttcaagaatcacacctctcccgacgtggatctgggcgacatctccggcatcaatgcctctgtggtgaacatccagaaggagatcgaccggctgaacgaggtggccaagaatctgaacgagagcctgatcgatctgcaggagctgggcaagtatgagcagtacatcaagggctctggcagagagaacctgtatttccagggaggaggaggcagcggatacatccctgaggcaccaagggacggacaggcctacgtgcgcaaggatggcgagtgggtgctgctgtccacctttctgggccatcatcaccaccaccaccaccactga

SEQ ID NO: 1333 - DNA, 3846 bp, Artificial Sequence
  Description of Artificial Sequence: Synthetic polynucleotide
atgggcatcctgccaagcccaggaatgcccgccctgctgtctctggtgagcctgctgtccgtgctgctgatgggatgcgtggcagagacaggcacacagtgcgtgaacctgaccacaaggacccagctgccccctgcctataccaattctttcacacggggcgtgtactatcccgacaaggtgtttagaagctccgtgctgcactccacacaggatctgtttctgcctttcttttctaacgtgacctggttccacgccatccacgtgtccggcaccaatggcacaaagcggttcgacaatcccgtgctgccttttaacgatggcgtgtacttcgccagcaccgagaagtccaacatcatcagaggctggatctttggcaccacactggactctaagacacagagcctgctgatcgtgaacaatgccaccaacgtggtgatcaaggtgtgcgagttccagttttgtaatgatccattcctgggcgtgtactatcacaagaacaataagtcctggatggagtctgagtttcgcgtgtattctagcgccaacaattgcacatttgagtacgtgagccagcccttgctgatggacctggagggcaagcagggcaatttcaagaacctgagggagttcgtgtttaagaatatcgatggctacttcaagatctacagcaagcacaccccaatcaacctggtgcgcgacctgccacagggattctccgccctggagccactggtggatctgcccatcggcatcaacatcacccggtttcagacactgctggccctgcacagatcctacctgacaccaggcgactcctctagcggatggaccgcaggagctgccgcctactatgtgggctatctgcagccccggaccttcctgctgaagtacaacgagaatggcaccatcacagacgcagtggattgcgccctggaccccctgtctgagacaaagtgtacactgaagagctttaccgtggagaagggcatctatcagacaagcaatttcagggtgcagcctaccgagtccatcgtgcgctttcccaatatcacaaacctgtgcccttttggcgaggtgttcaacgccaccagattcgccagcgtgtacgcctggaatcggaagagaatctccaactgcgtggccgactattctgtgctgtacaactccgcctctttcagcacctttaagtgctatggcgtgtctcccacaaagctgaatgatctgtgctttaccaacgtgtacgccgatagcttcgtgatcaggggagacgaagtgagacagatcgcaccaggacagacaggaaagatcgcagactacaattataagctgcctgacgatttcaccggctgcgtgatcgcctggaactccaacaatctggattctaaagtgggcggcaactacaattatctgtacaggctgtttcgcaagtccaatctgaagccattcgagcgggacatctccacagagatctaccaggccggctctaccccctgcaatggcgtggagggctttaactgttatttccctctgcagtcttacggcttccagccaacaaacggcgtgggctatcagccctacagagtggtggtgctgtcctttgagctgctgcacgcaccagcaacagtgtgcggcccaaagaagtctaccaatctggtgaagaacaagtgcgtgaacttcaacttcaacggactgaccggcacaggcgtgctgaccgagagcaataagaagttcctgccttttcagcagttcggcagggacatcgcagataccacagacgccgtgcgcgaccctcagaccctggagatcctggacatcacaccatgcagcttcggcggcgtgtccgtgatcacaccaggcaccaatacatccaaccaggtggccgtgctgtatcaggacgtgaattgtaccgaggtgcccgtggcaatccacgcagatcagctgacccctacatggcgggtgtactctaccggcagcaacgtgttccagacaagagccggatgcctgatcggagcagagcacgtgaacaatagctatgagtgcgacatccctatcggcgccggcatctgtgccagctaccagacccagacaaactccccatctggagcaggctccgtggccagccagtccatcatcgcctataccatgagcctgggcgccgagaacagcgtggcctactccaacaattctatcgccatccctaccaacttcacaatcagcgtgaccacagagatcctgccagtgtctatgaccaagacaagcgtggactgcacaatgtatatctgtggcgatagcaccgagtgctccaacctgctgctgcagtacggctccttttgtacccagctgaatagagccctgacaggcatcgccgtggagcaggataagaacacacaggaggtgttcgcccaggtgaagcagatctacaagaccccacccatcaaggactttggcggcttcaacttcagccagatcctgcctgatccaagcaagccctccaagaggtcttttatcgaggacctgctgttcaacaaggtgaccctggccgatgccggcttcatcaagcagtatggagattgcctgggagacatcgcagcccgcgacctgatctgtgcccagaagtttaatggcctgaccgtgctgcctccactgctgacagatgagatgatcgcccagtacacatctgccctgctggccggcaccatcacaagcggatggaccttcggcgcaggagccgccctgcagatcccttttgccatgcagatggcctataggttcaacggcatcggcgtgacccagaatgtgctgtacgagaaccagaagctgatcgccaatcagtttaacagcgccatcggcaagatccaggactctctgtcctctacagccagcgccctgggcaagctgcaggatgtggtgaatcagaacgcccaggccctgaataccctggtgaagcagctgagctccaacttcggcgccatctctagcgtgctgaatgacatcctgagccggctggacccccctgaggcagaggtgcagatcgacaggctgatcacaggccgcctgcagagcctgcagacctacgtgacacagcagctgatcagggcagcagagatcagagcctccgccaatctggccgccaccaagatgagcgagtgcgtgctgggacagtccaagagggtggacttttgtggcaagggctatcacctgatgtctttcccacagagcgcccctcacggcgtggtgtttctgcacgtgacctacgtgccagcccaggagaagaacttcaccacagcaccagccatctgccacgatggaaaggcacactttcctagggagggcgtgttcgtgtctaacggcacccactggtttgtgacacagcgcaatttctacgagccacagatcatcaccacagacaatacattcgtgagcggcaactgtgatgtggtgatcggcatcgtgaacaataccgtgtatgatccactgcagcccgagctggactcctttaaggaggagctggataagtacttcaagaatcacacctctcccgacgtggatctgggcgacatctccggcatcaatgcctctgtggtgaacatccagaaggagatcgaccggctgaacgaggtggccaagaatctgaacgagagcctgatcgatctgcaggagctgggcaagtatgagcagtacatcaagggctctggcagagagaacctgtatttccagggaggaggaggcagcggatacatccctgaggcaccaagggacggacaggcctacgtgcgcaaggatggcgagtgggtgctgctgtccacctttctgggccatcatcaccaccaccaccaccactga

SEQ ID NO: 1334 - DNA, 3846 bp, Artificial Sequence
  Description of Artificial Sequence: Synthetic polynucleotide
atgggcatcctgccaagcccaggaatgcccgccctgctgtctctggtgagcctgctgtccgtgctgctgatgggatgcgtggcagagacaggcacacagtgcgtgaacctgaccacaaggacccagctgccccctgcctataccaattctttcacacggggcgtgtactatcccgacaaggtgtttagaagctccgtgctgcactccacacaggatctgtttctgcctttcttttctaacgtgacctggttccacgccatccacgtgtccggcaccaatggcacaaagcggttcgacaatcccgtgctgccttttaacgatggcgtgtacttcgccagcaccgagaagtccaacatcatcagaggctggatctttggcaccacactggactctaagacacagagcctgctgatcgtgaacaatgccaccaacgtggtgatcaaggtgtgcgagttccagttttgtaatgatccattcctgggcgtgtactatcacaagaacaataagtcctggatggagtctgagtttcgcgtgtattctagcgccaacaattgcacatttgagtacgtgagccagcccttcctgatggacctggagggcaagcagggcaatttcaagaacctgagggagttcgtgtttaagaatatcgatggctacttcaagatctacagcaagcacaccccaatcaacctggtgcgcgacctgccacagggattctccgccctggagccactggtggatctgcccatcggcatcaacatcacccggtttcagacactgctggccctgcacagatcctacctgacaccaggcgactcctctagcggatggaccgcaggagctgccgcctactatgtgggctatctgcagccccggaccttcctgctgaagtacaacgagaatggcaccatcacagacgcagtggattgcgccctggaccccctgtctgagacaaagtgtacactgaagagctttaccgtggagaagggcatctatcagacaagcaatttcagggtgcagcctaccgagtccatcgtgcgctttcccaatatcacaaacctgtgcccttttggcgaggtgttcaacgccaccagattcgccagcgtgtacgcctggaatcggaagagaatctccaactgcgtggccgactattctgtgctgtacaactccgcctctttcagcacctttaagtgctatggcgtgtctcccacaaagctgaatgatctgtgctttaccaacgtgtacgccgatagcttcgtgatcaggggagacgaagtgagacagatcgcaccaggacagacaggaaagatcgcagactacaattataagctgcctgacgatttcaccggctgcgtgatcgcctggaactccaacaatctggattctaaagtgggcggcaactacaattatctgtacaggctgtttcgcaagtccaatctgaagccattcgagcgggacatctccacagagatctaccaggccggctctaccccctgcaatggcgtggagggctttaactgttatttccctctgcagtcttacggcttccagccaacaaacggcgtgggctatcagccctacagagtggtggtgctgtcctttgagctgctgcacgcaccagcaacagtgtgcggcccaaagaagtctaccaatctggtgaagaacaagtgcgtgaacttcaacttcaacggactgaccggcacaggcgtgctgaccgagagcaataagaagttcctgccttttcagcagttcggcagggacatctcagataccacagacgccgtgcgcgaccctcagaccctggagatcctggacatcacaccatgcagcttcggcggcgtgtccgtgatcacaccaggcaccaatacatccaaccaggtggccgtgctgtatcaggacgtgaattgtaccgaggtgcccgtggcaatccacgcagatcagctgacccctacatggcgggtgtactctaccggcagcaacgtgttccagacaagagccggatgcctgatcggagcagagcacgtgaacaatagctatgagtgcgacatccctatcggcgccggcatctgtgccagctaccagacccagacaaactccccatctggagcaggctccgtggccagccagtccatcatcgcctataccatgagcctgggcgccgagaacagcgtggcctactccaacaattctatcgccatccctaccaacttcacaatcagcgtgaccacagagatcctgccagtgtctatgaccaagacaagcgtggactgcacaatgtatatctgtggcgatagcaccgagtgctccaacctgctgctgcagtacggctccttttgtacccagctgaatagagccctgacaggcatcgccgtggagcaggataagaacacacaggaggtgttcgcccaggtgaagcagatctacaagaccccacccatcaaggactttggcggcttcaacttcagccagatcctgcctgatccaagcaagccctccaagaggtcttttatcgaggacctgctgttcaacaaggtgaccctggccgatgccggcttcatcaagcagtatggagattgcctgggagacatcgcagcccgcgacctgatctgtgcccagaagtttaatggcctgaccgtgctgcctccactgctgacagatgagatgatcgcccagtacacatctgccctgctggccggcaccatcacaagcggatggaccttcggcgcaggagccgccctgcagatcccttttgccatgcagatggcctataggttcaacggcatcggcgtgacccagaatgtgctgtacgagaaccagaagctgatcgccaatcagtttaacagcgccatcggcaagatccaggactctctgtcctctacagccagcgccctgggcaagctgcaggatgtggtgaatcagaacgcccaggccctgaataccctggtgaagcagctgagctccaacttcggcgccatctctagcgtgctgaatgacatcctgagccggctggacccccctgaggcagaggtgcagatcgacaggctgatcacaggccgcctgcagagcctgcagacctacgtgacacagcagctgatcagggcagcagagatcagagcctccgccaatctggccgccaccaagatgagcgagtgcgtgctgggacagtccaagagggtggacttttgtggcaagggctatcacctgatgtctttcccacagagcgcccctcacggcgtggtgtttctgcacgtgacctacgtgccagcccaggagaagaacttcaccacagcaccagccatctgccacgatggaaaggcacactttcctagggagggcgtgttcgtgtctaacggcacccactggtttgtgacacagcgcaatttctacgagccacagatcatcaccacagacaatacattcgtgagcggcaactgtgatgtggtgatcggcatcgtgaacaataccgtgtatgatccactgcagcccgagctggactcctttaaggaggagctggataagtacttcaagaatcacacctctcccgacgtggatctgggcgacatctccggcatcaatgcctctgtggtgaacatccagaaggagatcgaccggctgaacgaggtggccaagaatctgaacgagagcctgatcgatctgcaggagctgggcaagtatgagcagtacatcaagggctctggcagagagaacctgtatttccagggaggaggaggcagcggatacatccctgaggcaccaagggacggacaggcctacgtgcgcaaggatggcgagtgggtgctgctgtccacctttctgggccatcatcaccaccaccaccaccactga

SEQ ID NO: 1335 - DNA, 3846 bp, Artificial Sequence
  Description of Artificial Sequence: Synthetic polynucleotide
atgggcatcctgccaagcccaggaatgcccgccctgctgtctctggtgagcctgctgtccgtgctgctgatgggatgcgtggcagagacaggcacacagtgcgtgaacctgaccacaaggacccagctgccccctgcctataccaattctttcacacggggcgtgtactatcccgacaaggtgtttagaagctccgtgctgcactccacacaggatctgtttctgcctttcttttctaacgtgacctggttccacgccatccacgtgtccggcaccaatggcacaaagcggttcgacaatcccgtgctgccttttaacgatggcgtgtacttcgccagcaccgagaagtccaacatcatcagaggctggatctttggcaccacactggactctaagacacagagcctgctgatcgtgaacaatgccaccaacgtggtgatcaaggtgtgcgagttccagttttgtaatgatccattcctgggcgtgtactatcacaagaacaataagtcctggatggagtctgagtttcgcgtgtattctagcgccaacaattgcacatttgagtacgtgagccagcccttcctgatggacctggagggcaagcagggcaatttcaagaacctgagggagttcgtgtttaagaatatcgatggctacttcaagatctacagcaagcacaccccaatcaacctggtgcgcgacctgccacagggattctccgccctggagccactggtggatctgcccatcggcatcaacatcacccggtttcagacactgctggccctgcacagatcctacctgacaccaggcgactcctctagcggatggaccgcaggagctgccgcctactatgtgggctatctgcagccccggaccttcctgctgaagtacaacgagaatggcaccatcacagacgcagtggattgcgccctggaccccctgtctgagacaaagtgtacactgaagagctttaccgtggagaagggcatctatcagacaagcaatttcagggtgcagcctaccgagtccatcgtgcgctttcccaatatcacaaacctgtgcccttttggcgaggtgttcaacgccaccagattcgccagcgtgtacgcctggaatcggaagagaatctccaactgcgtggccgactattctgtgctgtacaactccgcctctttcagcacctttaagtgctatggcgtgtctcccacaaagctgaatgatctgtgctttaccaacgtgtacgccgatagcttcgtgatcaggggagacgaagtgagacagatcgcaccaggacagacaggaaagatcgcagactacaattataagctgcctgacgatttcaccggctgcgtgatcgcctggaactccaacaatctggattctaaagtgggcggcaactacaattatctgtacaggctgtttcgcaagtccaatctgaagccattcgagcgggacatctccacagagatctaccaggccggctctaccccctgcaatggcgtggagggctttaactgttatttccctctgcagtcttacggcttccagccaacaaacggcgtgggctatcagccctacagagtggtggtgctgtcctttgagctgctgcacgcaccagcaacagtgtgcggcccaaagaagtctaccaatctggtgaagaacaagtgcgtgaacttcaacttcaacggactgaccggcacaggcgtgctgaccgagagcaataagaagttcctgccttttcagcagttcggcagggacatcgcagataccacagacgccgtgcgcgaccctcagaccctggagatcctggacatcacaccatgcagcttcggcggcgtgtccgtgatcacaccaggcaccaatacatccaaccaggtggccgtgctgtatcaggacgtgaattgtaccgaggtgcccgtggcaatccacgcagatcagctgacccctacatggcgggtgtactctaccggcagcaacgtgttccagacaagagccggatgcctgatcggagcagagcacgtgaacaatagctatgagtgcgacatccctatcggcgccggcatctgtgccagctaccagacccagacaaactccccatctggagcaggctccgtggccagccagtccatcatcgcctataccatgagcctgggcgccgagaacagcgtggcctactccaacaattctatcgccatccctaccaacttcacaatcagcgtgaccacagagatcctgccagtgtctatgaccaagacaagcgtggactgcacaatgtatatctgtggcgatagcaccgagtgctccaacctgctgctgcagtacggctccttttgtacccagctgaatagagccctgacaggcatcgccgtggagcaggataagaacacacaggaggtgttcgcccaggtgaagcagatctacaagaccccacccatcaaggactttggcggcttcaacttcagccagatcctgcctgatccaagcaagccctccaagaggtcttttatcgaggacctgctgttcaacaaggtgaccctggccgatgccggcttcatcaagcagtatggagattgcctgggagacatcgcagcccgcgacctgatctgtgcccagaagtttaatggcctgaccgtgctgcctccactgctgacagatgagatgatcgcccagtacacatctgccctgctggccggcaccatcacaagcggatggaccttcggcgcaggagccgccctgcagatcccttttgccatgcagatggcctataggttcaacggcatcggcgtgacccagaatgtgctgtacgagaaccagaagctgatcgccaatcagtttaacagcgccatcggcaagatccaggactctctgtcctctacagccagcgccctgggcaagctgcaggatgtggtgaatcagaacgcccaggccctgaataccctggtgaagcagctgagctccaacttcggcgccatctctagcgtgctgaatgacatcctgagccggctggacccccctgaggcagaggtgcagatcgacaggctgatcacaggccgcctgcagagcctgcagacctacgtgacacagcagctgatcagggcagcagagatcagagcctccgccaatctggccgccaccaagatgagcgagtgcgtgctgggacagtccaagagggtggacttttgtggcaagggctatcacctgatgtctttcccacagagcgcccctcacggcgtggtgtttctgcacgtgacctacgtgccagcccagtttaagaacttcaccacagcaccagccatctgccacgatggaaaggcacactttcctagggagggcgtgttcgtgtctaacggcacccactggtttgtgacacagcgcaatttctacgagccacagatcatcaccacagacaatacattcgtgagcggcaactgtgatgtggtgatcggcatcgtgaacaataccgtgtatgatccactgcagcccgagctggactcctttaaggaggagctggataagtacttcaagaatcacacctctcccgacgtggatctgggcgacatctccggcatcaatgcctctgtggtgaacatccagaaggagatcgaccggctgaacgaggtggccaagaatctgaacgagagcctgatcgatctgcaggagctgggcaagtatgagcagtacatcaagggctctggcagagagaacctgtatttccagggaggaggaggcagcggatacatccctgaggcaccaagggacggacaggcctacgtgcgcaaggatggcgagtgggtgctgctgtccacctttctgggccatcatcaccaccaccaccaccactga

SEQ ID NO: 1336 - DNA, 3846 bp, Artificial Sequence
  Description of Artificial Sequence: Synthetic polynucleotide
atgggcatcctgccaagcccaggaatgcccgccctgctgtctctggtgagcctgctgtccgtgctgctgatgggatgcgtggcagagacaggcacacagtgcgtgaacctgaccacaaggacccagctgccccctgcctataccaattctttcacacggggcgtgtactatcccgacaaggtgtttagaagctccgtgctgcactccacacaggatctgtttctgcctttcttttctaacgtgacctggttccacgccatccacgtgtccggcaccaatggcacaaagcggttcgacaatcccgtgctgccttttaacgatggcgtgtacttcgccagcaccgagaagtccaacatcatcagaggctggatctttggcaccacactggactctaagacacagagcctgctgatcgtgaacaatgccaccaacgtggtgatcaaggtgtgcgagttccagttttgtaatgatccattcctgggcgtgtactatcacaagaacaataagtcctggatggagtctgagtttcgcgtgtattctagcgccaacaattgcacatttgagtacgtgagccagcccttccgaatggacctggagggcaagcagggcaatttcaagaacctgagggagttcgtgtttaagaatatcgatggctacttcaagatctacagcaagcacaccccaatcaacctggtgcgcgacctgccacagggattctccgccctggagccactggtggatctgcccatcggcatcaacatcacccggtttcagacactgctggccctgcacagatcctacctgacaccaggcgactcctctagcggatggaccgcaggagctgccgcctactatgtgggctatctgcagccccggaccttcctgctgaagtacaacgagaatggcaccatcacagacgcagtggattgcgccctggaccccctgtctgagacaaagtgtacactgaagagctttaccgtggagaagggcatctatcagacaagcaatttcagggtgcagcctaccgagtccatcgtgcgctttcccaatatcacaaacctgtgcccttttggcgaggtgttcaacgccaccagattcgccagcgtgtacgcctggaatcggaagagaatctccaactgcgtggccgactattctgtgctgtacaactccgcctctttcagcacctttaagtgctatggcgtgtctcccacaaagctgaatgatctgtgctttaccaacgtgtacgccgatagcttcgtgatcaggggagacgaagtgagacagatcgcaccaggacagacaggaaagatcgcagactacaattataagctgcctgacgatttcaccggctgcgtgatcgcctggaactccaacaatctggattctaaagtgggcggcaactacaattatctgtacaggctgtttcgcaagtccaatctgaagccattcgagcgggacatctccacagagatctaccaggccggctctaccccctgcaatggcgtggagggctttaactgttatttccctctgcagtcttacggcttccagccaacaaacggcgtgggctatcagccctacagagtggtggtgctgtcctttgagctgctgcacgcaccagcaacagtgtgcggcccaaagaagtctaccaatctggtgaagaacaagtgcgtgaacttcaacttcaacggactgaccggcacaggcgtgctgaccgagagcaataagaagttcctgccttttcagcagttcggcagggacatcgcagataccacagacgccgtgcgcgaccctcagaccctggagatcctggacatcacaccatgcagcttcggcggcgtgtccgtgatcacaccaggcaccaatacatccaaccaggtggccgtgctgtatcaggacgtgaattgtaccgaggtgcccgtggcaatccacgcagatcagctgacccctacatggcgggtgtactctaccggcagcaacgtgttccagacaagagccggatgcctgatcggagcagagcacgtgaacaatagctatgagtgcgacatccctatcggcgccggcatctgtgccagctaccagacccagacaaactccccatctggagcaggctccgtggccagccagtccatcatcgcctataccatgagcctgggcgccgagaacagcgtggcctactccaacaattctatcgccatccctaccaacttcacaatcagcgtgaccacagagatcctgccagtgtctatgaccaagacaagcgtggactgcacaatgtatatctgtggcgatagcaccgagtgctccaacctgctgctgcagtacggctccttttgtacccagctgaatagagccctgacaggcatcgccgtggagcaggataagaacacacaggaggtgttcgcccaggtgaagcagatctacaagaccccacccatcaaggactttggcggcttcaacttcagccagatcctgcctgatccaagcaagccctccaagaggtcttttatcgaggacctgctgttcaacaaggtgaccctggccgatgccggcttcatcaagcagtatggagattgcctgggagacatcgcagcccgcgacctgatctgtgcccagaagtttaatggcctgaccgtgctgcctccactgctgacagatgagatgatcgcccagtacacatctgccctgctggccggcaccatcacaagcggatggaccttcggcgcaggagccgccctgcagatcccttttgccatgcagatggcctataggttcaacggcatcggcgtgacccagaatgtgctgtacgagaaccagaagctgatcgccaatcagtttaacagcgccatcggcaagatccaggactctctgtcctctacagccagcgccctgggcaagctgcaggatgtggtgaatcagaacgcccaggccctgaataccctggtgaagcagctgagctccaacttcggcgccatctctagcgtgctgaatgacatcctgagccggctggacccccctgaggcagaggtgcagatcgacaggctgatcacaggccgcctgcagagcctgcagacctacgtgacacagcagctgatcagggcagcagagatcagagcctccgccaatctggccgccaccaagatgagcgagtgcgtgctgggacagtccaagagggtggacttttgtggcaagggctatcacctgatgtctttcccacagagcgcccctcacggcgtggtgtttctgcacgtgacctacgtgccagcccaggagaagaacttcaccacagcaccagccatctgccacgatggaaaggcacactttcctagggagggcgtgttcgtgtctaacggcacccactggtttgtgacacagcgcaatttctacgagccacagatcatcaccacagacaatacattcgtgagcggcaactgtgatgtggtgatcggcatcgtgaacaataccgtgtatgatccactgcagcccgagctggactcctttaaggaggagctggataagtacttcaagaatcacacctctcccgacgtggatctgggcgacatctccggcatcaatgcctctgtggtgaacatccagaaggagatcgaccggctgaacgaggtggccaagaatctgaacgagagcctgatcgatctgcaggagctgggcaagtatgagcagtacatcaagggctctggcagagagaacctgtatttccagggaggaggaggcagcggatacatccctgaggcaccaagggacggacaggcctacgtgcgcaaggatggcgagtgggtgctgctgtccacctttctgggccatcatcaccaccaccaccaccactga

SEQ ID NO: 1337 - DNA, 3846 bp, Artificial Sequence
  Description of Artificial Sequence: Synthetic polynucleotide
atgggcatcctgccaagcccaggaatgcccgccctgctgtctctggtgagcctgctgtccgtgctgctgatgggatgcgtggcagagacaggcacacagtgcgtgaacctgaccacaaggacccagctgccccctgcctataccaattctttcacacggggcgtgtactatcccgacaaggtgtttagaagctccgtgctgcactccacacaggatctgtttctgcctttcttttctaacgtgacctggttccacgccatccacgtgtccggcaccaatggcacaaagcggttcgacaatcccgtgctgccttttaacgatggcgtgtacttcgccgcgattgagaagtccaacatcatcagaggctggatctttggcaccacactggactctaagacacagagcctgctgatcgtgaacaatgccaccaacgtggtgatcaaggtgtgcgagttccagttttgtaatgatccattcctgggcgtgtactatcacaagaacaataagtcctggatggagtctgagtttcgcgtgtattctagcgccaacaattgcacatttgagtacgtgagccagcccttcctgatggacctggagggcaagcagggcaatttcaagaacctgagggagttcgtgtttaagaatatcgatggctacttcaagatctacagcaagcacaccccaatcaacctggtgcgcgacctgccacagggattctccgccctggagccactggtggatctgcccatcggcatcaacatcacccggtttcagacactgctggccctgcacagatcctacctgacaccaggcgactcctctagcggatggaccgcaggagctgccgcctactatgtgggctatctgcagccccggaccttcctgctgaagtacaacgagaatggcaccatcacagacgcagtggattgcgccctggaccccctgtctgagacaaagtgtacactgaagagctttaccgtggagaagggcatctatcagacaagcaatttcagggtgcagcctaccgagtccatcgtgcgctttcccaatatcacaaacctgtgcccttttggcgaggtgttcaacgccaccagattcgccagcgtgtacgcctggaatcggaagagaatctccaactgcgtggccgactattctgtgctgtacaactccgcctctttcagcacctttaagtgctatggcgtgtctcccacaaagctgaatgatctgtgctttaccaacgtgtacgccgatagcttcgtgatcaggggagacgaagtgagacagatcgcaccaggacagacaggaaagatcgcagactacaattataagctgcctgacgatttcaccggctgcgtgatcgcctggaactccaacaatctggattctaaagtgggcggcaactacaattatctgtacaggctgtttcgcaagtccaatctgaagccattcgagcgggacatctccacagagatctaccaggccggctctaccccctgcaatggcgtggagggctttaactgttatttccctctgcagtcttacggcttccagccaacaaacggcgtgggctatcagccctacagagtggtggtgctgtcctttgagctgctgcacgcaccagcaacagtgtgcggcccaaagaagtctaccaatctggtgaagaacaagtgcgtgaacttcaacttcaacggactgaccggcacaggcgtgctgaccgagagcaataagaagttcctgccttttcagcagttcggcagggacatcagtgataccacagacgccgtgcgcgaccctcagaccctggagatcctggacatcacaccatgcagcttcggcggcgtgtccgtggtcacaccaggcaccaatacatccaaccaggtggccgtgctgtatcaggacgtgaattgtaccgaggtgcccgtggcaatccacgcagatcagctgacccctacatggcgggtgtactctaccggcagcaacgtgttccagacaagagccggatgcctgatcggagcagagcacgtgaacaatagctatgagtgcgacatccctatcggcgccggcatctgtgccagctaccagacccagacaaactccccatctggagcaggctccgtggccagccagtccatcatcgcctataccatgagcctgggcgccgagaacagcgtggcctactccaacaattctatcgccatccctaccaacttcacaatcagcgtgaccacagagatcctgccagtgtctatgaccaagacaagcgtggactgcacaatgtatatctgtggcgatagcaccgagtgctccaacctgctgctgcagtacggctccttttgtacccagctgaatagagccctgacaggcatcgccgtggaggaagataagaacacacaggaggtgttcgcccaggtgaagcagatctacaagaccccacccatcaaggactttggcggcttcaacttcagccagatcctgcctgatccaagcaagccctccaagaggtcttttatcgaggacctgctgttcaacaaggtgaccctggccgatgccggcttcatcaagcagtatggagattgcctgggagacatcgcagcccgcgacctgatctgtgcccagaagtttaatggcctgaccgtgctgcctccactgctgacagatgagatgatcgcccagtacacatctagtctgctggccggcaccatcacagctggatggaccttcggcgcaggagccgccctgcagatcccttttgccatgcagatggcctataggttcaacggcatcggcgtgacccagaatgtgctgtacgagaaccagaagctgatcgccaatcagtttaacagcgccatcggcaagatccaggactctctgtcctctacagccagcgccctgggcaagctgcaggatgtggtgaatcagaacgcccaggccctgaataccctggtgaagcagctgagctccaacttcggcgccatctctagcgtgctgaatgacatcctgagccggctggacccccctgaggcagaggtgcagatcgacaggctgatcacaggccgcctgcagagcctgcagacctacgtgacacagcagctgatcagggcagcagagatcagagcctccgccaatctggccgccaccaagatgagcgagtgcgtgaaaggacagtccaagagggtggacttttgtggcaagggctatcacctgatgtctttcccacagagcgcccctcacggcattgtgtttctgcacgtgacctacgtgccagcccaggagaagaacttcaccacagcaccagccatctgccacgatggaaaggcacactttcctagggagggcgtgttcgtgtctaacggcacccactggtttgtgacacagcgcaatttctacgagccacagatcatcaccacagacaatacattcgtgagcggcaactgtgatgtggtgatcggcatcgtgaacaataccgtgtatgatccactgcagcccgagctggactcctttaaggaggagctggataagtacttcaagaatcacacctctcccgacgtggatctgggcgacatctccggcatcaatgcctctgtggtgaacatccagaaggagatcgaccggctgaacgaggtggccaagaatctgaacgagagcctgatcgatctgcaggagctgggcaagtatgagcagtacatcaagggctctggcagagagaacctgtatttccagggaggaggaggcagcggatacatccctgaggcaccaagggacggacaggcctacgtgcgcaaggatggcgagtgggtgctgctgtccacctttctgggccatcatcaccaccaccaccaccactga

SEQ ID NO: 1338 - DNA, 3846 bp, Artificial Sequence
  Description of Artificial Sequence: Synthetic polynucleotide
atgggcatcctgccaagcccaggaatgcccgccctgctgtctctggtgagcctgctgtccgtgctgctgatgggatgcgtggcagagacaggcacacagtgcgtgaacctgaccacaaggacccagctgccccctgcctataccaattctttccggcggggcgtgtactatcccgacaaggtgtttagaagcgatgtgctgcaccttacacaggatctgtttctgcctttcttttctaacgtgacctggttccacgccatccacgtgtccggcaccaatggcacaaagcggttcgacaatcccgtgctgccttttaacgatggcgtgtacttcgccagcaccgagaagtccaacatcatcagaggctggatctttggcaccacactggactctaagacacagagcctgctgatcgtgaacaatgccaccaacgtggtgatcaaggtgtgcgagttccagttttgtaatgatccattcctgggcgtgtactatcacaagaacaataagtcctggatggagtctgagtttcgcgtgtattctagcgccaacaattgcacatttgagtacgtgagccagcccttcctgatggacctggagggcaagcagggcaatttcaagaacctgagggagttcgtgtttaagaatatcgatggctacttcaagatctacagcaagcacaccccaatcaacctggtgcgcgacctgccacagggattctccgccctggagccactggtggatctgcccatcggcatcaacatcacccggtttcagacactgctggccctgcacagatcctacctgacaccaggcgactcctctagcggatggaccgcaggagctgccgcctactatgtgggctatctgcagccccggaccttcctgctgaagtacaacgagaatggcaccatcacagacgcagtggattgctcgcaagaccccctgtctgagctcaagtgtacactgaagagctttaccgtggagaagggcatctatcagacaagcaatttcagggtgcagcctaccgagtccatcgtgcgctttcccaatatcacaaacctgtgcccttttggcgaggtgttcaacgccaccagattcgccagcgtgtacgcctggaatcggaagagaatctccaactgcgtggccgactattctgtgctgtacaactccgcctctttcagcacctttaagtgctatggcgtgtctcccacaaagctgaatgatctgtgctttaccaacgtgtacgccgatagcttcgtgatcaggggagacgaagtgagacagatcgcaccaggacagacaggaaagatcgcagactacaattataagctgcctgacgatttcaccggctgcgtgatcgcctggaactccaacaatctggattctaaagtgggcggcaactacaattatctgtacaggctgtttcgcaagtccaatctgaagccattcgagcgggacatctccacagagatctaccaggccggctctaccccctgcaatggcgtggagggctttaactgttatttccctctgcagtcttacggcttccagccaacaaacggcgtgggctatcagccctacagagtggtggtgctgtcctttgagctgctgcacgcaccagcaacagtgtgcggcccaaagaagtctaccaatctggtgaagaacaagtgcgtgaacttcaacttcaacggactgaccggcacaggcgtgctgaccgagagcaataagaagttcctgccttttcagcagttcggcagggacatcgcagataccacagacgccgtgcgcgaccctcagaccctggagatcctggacatcacaccatgcagcttcggcggcgtgtccgtgatcacaccaggcaccaatacatccaaccaggtggccgtgctgtatcaggacgtgaattgtaccgaggtgcccgtggcaatccacgcagatcagctgacccctacatggcgggtgtactctaccggcagcaacgtgttccagacaagagccggatgcctgatcggagcagagcacgtgaacaatagctatgagtgcgacatccctatcggcgccggcatctgtgccagctaccagacccagacaaactccccatctggagcaggctccgtggccagccagtccatcatcgcctataccatgagcctgggcgccgagaacagcgtggcctactccaacaattctatcgccatccctaccaacttcacaatcagcgtgaccacagagatcctgccagtgtctatgaccaagacaagcgtggactgcacaatgtatatctgtggcgatagcaccgagtgctccaacctgctgctgcagtacggctccttttgtacccagctgaatagagccctgacaggcatcgccgtggagcaggataagaacacacaggaggtgttcgcccaggtgaagcagatctacaagaccccacccatcaaggactttggcggcttcaacttcagccagatcctgcctgatccaagcaagccctccaagaggtcttttatcgaggacctgctgttcaacaaggtgaccctggccgatgccggcttcatcaagcagtatggagattgcctgggagacatcgcagcccgcgacctgatctgtgcccagaagtttaatggcctgaccgtgctgcctccactgctgacagatgagatgatcgcccagtacacatctgccctgctggccggcaccatcacaagcggatggaccttcggcgcaggagccgccctgcagatcccttttgccatgcagatggcctataggttcaacggcatcggcgtgacccagaatgtgctgtacgagaaccagaagctgatcgccaatcagtttaacagcgccatcggcaagatccaggactctctgtcctctacagccagcgccctgggcaagctgcaggatgtggtgaatcagaacgcccaggccctgaataccctggtgaagcagctgagctccaacttcggcgccatctctagcgtgctgaatgacatcctgagccggctggacccccctgaggcagaggtgcagatcgacaggctgatcacaggccgcctgcagagcctgcagacctacgtgacacagcagctgatcagggcagcagagatcagagcctccgccaatctggccgccaccaagatgagcgagtgcgtgctgggacagtccaagagggtggacttttgtggcaagggctatcacctgatgtctttcccacagagcgcccctcacggcgtggtgtttctgcacgtgacctacgtgccagcccaggagaagaacttcaccacagcaccagccatctgccacgatggaaaggcacactttcctagggagggcgtgttcgtgtctaacggcacccactggtttgtgacacagcgcaatttctacgagccacagatcatcaccacagacaatacattcgtgagcggcaactgtgatgtggtgatcggcatcgtgaacaataccgtgtatgatccactgcagcccgagctggactcctttaaggaggagctggataagtacttcaagaatcacacctctcccgacgtggatctgggcgacatctccggcatcaatgcctctgtggtgaacatccagaaggagatcgaccggctgaacgaggtggccaagaatctgaacgagagcctgatcgatctgcaggagctgggcaagtatgagcagtacatcaagggctctggcagagagaacctgtatttccagggaggaggaggcagcggatacatccctgaggcaccaagggacggacaggcctacgtgcgcaaggatggcgagtgggtgctgctgtccacctttctgggccatcatcaccaccaccaccaccactga

SEQ ID NO: 1339 - DNA, 3846 bp, Artificial Sequence
  Description of Artificial Sequence: Synthetic polynucleotide
atgggcatcctgccaagcccaggaatgcccgccctgctgtctctggtgagcctgctgtccgtgctgctgatgggatgcgtggcagagacaggcacacagtgcgtgaacctgaccacaaggacccagctgccccctgcctataccaattctttcacacggggcgtgtactatcccgacaaggtgtttagaagctccgtgctgcactccacacaggatctgtttctgcctttcttttctaacgtgacctggttccacgccatccacgtgtccggcaccaatggcacaaagcggttcgacaatcccgtgctgccttttaacgatggcgtgtacttcgccagcaccgagaagtccaacatcatcagaggctggatctttggcaccacactggactctaagacacagagcctgctgatcgtgaacaatgccaccaacgtggtgatcaaggtgtgcgagttccagttttgtaatgatccattcctgggcgtgtactatcacaagaacaataagtcctggatggagtctgagtttcgcgtgtattctagcgccaacaattgcacatttgagtacgtgagccagcccttcctgatggacctggagggcaagcagggcaatttcaagaacctgagggagttcgtgtttaagaatatcgatggctacttcaagatctacagcaagcacaccccaatcaacctggtgcgcgacctgccacagggattctccgccctggagccactggtggatctgcccatcggcatcaacatcacccggtttcagacactgctggccctgcacagatcctacctgacaccaggcgactcctctagcggatggaccgcaggagctgccgcctactatgtgggctatctgcagccccggaccttcctgctgaagtacaacgagaatggcaccatcacagacgcagtggattgcgccctggaccccctgtctgagacaaagtgtacactgaagagctttaccgtggagaagggcatctatcagacaagcaatttcagggtgcagcctaccgagtccatcgtgcgctttcccaatatcacaaacctgtgcccttttggcgaggtgttcaacgccaccagattcgccagcgtgtacgcctggaatcggaagagaatctccaactgcgtggccgactattctgtgctgtacaactccgcctctttcagcacctttaagtgctatggcgtgtctcccacaaagctgaatgatctgtgctttaccaacgtgtacgccgatagcttcgtgatcaggggagacgaagtgagacagatcgcaccaggacagacaggaaagatcgcagactacaattataagctgcctgacgatttcaccggctgcgtgatcgcctggaactccaacaatctggattctaaagtgggcggcaactacaattatctgtacaggctgtttcgcaagtccaatctgaagccattcgagcgggacatctccacagagatctaccaggccggctctaccccctgcaatggcgtggagggctttaactgttatttccctctgcagtcttacggcttccagccaacaaacggcgtgggctatcagccctacagagtggtggtgctgtcctttgagctgctgcacgcaccagcaacagtgtgcggcccaaagaagtctaccaatctggtgaagaacaagtgcgtgaacttcaacttcaacggactgaccggcacaggcgtgctgaccgagagcaataagaagttcctgccttttcagcagttcggcagggacatcgcagataccacagacgccgtgcgcgaccctcagaccctggagatcctggacatcacaccatgcagcttcggcggcgtgtccgtgatcacaccaggcaccaatacatccaaccaggtggccgtgctgtatcaggacgtgaattgtaccgaggtgcccgtggcaatccacgcagatcagctgacccctacatggcgggtgtactctaccggcagcaacgtgttccagacaagagccggatgcctgatcggagcagagcacgtgaacaatagctatgagtgcgacatccctatcggcgccggcatctgtgccagctaccagacccagacaaactccccatctggagcaggctccgtggccagccagtccatcatcgcctataccatgagcctgggcgccgagaacagcgtggcctactccaacaattctatcgccatccctaccaacttcacaatcagcgtgaccacagagatcctgccagtgtctatgaccaagacaagcgtggactgcacaatgtatatctgtggcgatagcaccgagtgctccaacctgctgaaacagtacggctccttttgtacccagctgaatagagccctgacaggcatcgccgtggagcaggataagaacacacaggaggtgttcgcccaggtgaagcagatctacaagaccccacccatcaaggactttggcggcttcaacttcagccagatcctgcctgatccaagcaagccctccaagaggtcttttatcgaggacctgctgttcaacaaggtgaccctggccgatgccggcttcatcaagcagtatggagattgcctgggagacatcgcagcccgcgacctgatctgtgcccagaagtttaatggcctgaccgtgctgcctccactgctgacagatgagatgatcgcccagtacacatctgccctgctggccggcaccatcacaagcggatggaccttcggcgcaggagccgccctgcagatcccttttgccatgcagatggcctataggttcaacggcatcggcgtgacccagaatgtgctgtacgagaaccagaagctgatcgccaatcagtttaacagcgccatcggcaagatccaggactctctgtcctctacagccagcgccctgggcaagctgcaggatgtggtgaatcagaacgcccaggccctgaataccctggtgaagcagctgagctccaacttcggcgccatctctagcgtgctgaatgacatcctgagccggctggacccccctgaggcagaggtgcagatcgacaggctgatcacaggccgcctgcagagcctgcagacctacgtgacacagcagctgatcagggcagcagagatcagagcctccgccaatctggccgccaccaagatgagcgagtgcgtgctgggacagtccaagagggtggacttttgtggcaagggctatcacctgatgtctttcccacagagcgcccctcacggcgtggtgtttctgcacgtgacctacgtgccagcccaggagaagaacttcaccacagcaccagccatctgccacgatggaaaggcacactttcctagggagggcgtgttcgtgtctaacggcacccactggtttgtgacacagcgcaatttctacgagccacagatcatcaccacagacaatacattcgtgagcggcaactgtgatgtggtgatcggcatcgtgaacaataccgtgtatgatccactgcagcccgagctggactcctttaaggaggagctggataagtacttcaagaatcacacctctcccgacgtggatctgggcgacatctccggcatcaatgcctctgtggtgaacatccagaaggagatcgaccggctgaacgaggtggccaagaatctgaacgagagcctgatcgatctgcaggagctgggcaagtatgagcagtacatcaagggctctggcagagagaacctgtatttccagggaggaggaggcagcggatacatccctgaggcaccaagggacggacaggcctacgtgcgcaaggatggcgagtgggtgctgctgtccacctttctgggccatcatcaccaccaccaccaccactga

SEQ ID NO: 1340 - DNA, 3846 bp, Artificial Sequence
  Description of Artificial Sequence: Synthetic polynucleotide
atgggcatcctgccaagcccaggaatgcccgccctgctgtctctggtgagcctgctgtccgtgctgctgatgggatgcgtggcagagacaggcacacagtgcgtgaacctgaccacaaggacccagctgccccctgcctataccaattctttcacacggggcgtgtactatcccgacaaggtgtttagaagctccgtgctgcactccacacaggatctgtttctgcctttcttttctaacgtgacctggttccacgccatccacgtgtccggcaccaatggcacaaagcggttcgacaatcccgtgctgccttttaacgatggcgtgtacttcgccagcaccgagaagtccaacatcatcagaggctggatctttggcaccacactggactctaagacacagagcctgctgatcgtgaacaatgccaccaacgtggtgatcaaggtgtgcgagttccagttttgtaatgatccattcctgggcgtgtactatcacaagaacaataagtcctggatggagtctgagtttcgcgtgtattctagcgccaacaattgcacatttgagtacgtgagccagcccttcctgatggacctggagggcaagcagggcaatttcaagaacctgagggagttcgtgtttaagaatatcgatggctacttcaagatctacagcaagcacaccccaatcaacctggtgcgcgacctgccacagggattctccgccctggagccactggtggatctgcccatcggcatcaacatcacccggtttcagacactgctggccctgcacagatcctacctgacaccaggcgactcctctagcggatggaccgcaggagctgccgcctactatgtgggctatctgcagccccggaccttcctgctgaagtacaacgagaatggcaccatcacagacgcagtggattgcgccctggaccccctgtctgagacaaagtgtacactgaagagctttaccgtggagaagggcatctatcagacaagcaatttcagggtgcagcctaccgagtccatcgtgcgctttcccaatatcacaaacctgtgcccttttggcgaggtgttcaacgccaccagattcgccagcgtgtacgcctggaatcggaagagaatctccaactgcgtggccgactattctgtgctgtacaactccgcctctttcagcacctttaagtgctatggcgtgtctcccacaaagctgaatgatctgtgctttaccaacgtgtacgccgatagcttcgtgatcaggggagacgaagtgagacagatcgcaccaggacagacaggaaagatcgcagactacaattataagctgcctgacgatttcaccggctgcgtgatcgcctggaactccaacaatctggattctaaagtgggcggcaactacaattatctgtacaggctgtttcgcaagtccaatctgaagccattcgagcgggacatctccacagagatctaccaggccggctctaccccctgcaatggcgtggagggctttaactgttatttccctctgcagtcttacggcttccagccaacaaacggcgtgggctatcagccctacagagtggtggtgctgtcctttgagctgctgcacgcaccagcaacagtgtgcggcccaaagaagtctaccaatctggtgaagaacaagtgcgtgaacttcaacttcaacggactgaccggcacaggcgtgctgaccgagagcaataagaagttcctgccttttcagcagttcggcagggacatcgcagataccacagacgccgtgcgcgaccctcagaccctggagatcctggacatcacaccatgcagcttcggcggcgtgtccgtgatcacaccaggcaccaatacatccaaccaggtggccgtgctgtatcaggacgtgaattgtaccgaggtgcccgtggcaatccacgcagatcagctgacccctacatggcgggtgtactctaccggcagcaacgtgttccagacaagagccggatgcctgatcggagcagagcacgtgaacaatagctatgagtgcgacatccctatcggcgccggcatctgtgccagctaccagacccagacaaactccccatctggagcaggctccgtggccagccagtccatcatcgcctataccatgagcctgggcgccgagaacagcgtggcctactccaacaattctatcgccatccctaccaacttcacaatcagcgtgaccacagagatcattccagtgtctatgaccaagacaagcgtggactgcacaatgtatatctgtggcgatagcaccgagtgctccaacctgctgctgcagtacggctccttttgtacccagctgaatagagccctgaacggcatcgcccgagagcaggataagaacacacaggaggtgttcgcccaggtgaagcagatctacaagaccccacccatcaaggactttggcggcttcaacttcagccagatcctgcctgatccaagcaagccctccaagaggtcttttatcgaggacctgctgttcaacaaggtgaccctggccgatgccggcttcatcaagcagtatggagattgcctgggagacatcgcagcccgcgacctgatctgtgcccagaagtttaatggcctgaccgtgctgcctccactgctgacagatgagatgatcgcccagtacacatctgccctgctggccggcaccatcacaagcggatggaccttcggcgcaggagccgccctgcagatcccttttgccatgcagatggcctataggttcaacggcatcggcgtgacccagaatgtgctgtacgagaaccagaagctgatcgccaatcagtttaacagcgccatcggcaagatccaggactctctgtcctctacagccagcgccctgggcaagctgcaggatgtggtgaatcagaacgcccaggccctgaataccctggtgaagcagctgagctccaacttcggcgccatctctagcgtgctgaatgacatcctgagccggctggacccccctgaggcagaggtgcagatcgacaggctgatcacaggccgcctgcagagcctgcagacctacgtgacacagcagctgatcagggcagcagagatcagagcctccgccaatctggccgccaccaagatgagcgagtgcgtgctgggacagtccaagagggtggacttttgtggcaagggctatcacctgatgtctttcccacagagcgcccctcacggcgtggtgtttctgcacgtgacctacgtgccagcccaggagaagaacttcaccacagcaccagccatctgccacgatggaaaggcacactttcctagggagggcgtgttcgtgtctaacggcacccactggtttgtgacacagcgcaatttctacgagccacagatcatcaccacagacaatacattcgtgagcggcaactgtgatgtggtgatcggcatcgtgaacaataccgtgtatgatccactgcagcccgagctggactcctttaaggaggagctggataagtacttcaagaatcacacctctcccgacgtggatctgggcgacatctccggcatcaatgcctctgtggtgaacatccagaaggagatcgaccggctgaacgaggtggccaagaatctgaacgagagcctgatcgatctgcaggagctgggcaagtatgagcagtacatcaagggctctggcagagagaacctgtatttccagggaggaggaggcagcggatacatccctgaggcaccaagggacggacaggcctacgtgcgcaaggatggcgagtgggtgctgctgtccacctttctgggccatcatcaccaccaccaccaccactga

SEQ ID NO: 1341 - DNA, 3846 bp, Artificial Sequence
  Description of Artificial Sequence: Synthetic polynucleotide
atgggcatcctgccaagcccaggaatgcccgccctgctgtctctggtgagcctgctgtccgtgctgctgatgggatgcgtggcagagacaggcacacagtgcgtgaacctgaccacaaggacccagctgccccctgcctataccaattctttcacacggggcgtgtactatcccgacaagatatttagaagctccgtgctgcacttaacacaggatctgtttctgcctttcttttctaacgtgacctggttccacgccatccacgtgtccggcaccaatggcacaaagcggttcgacaatcccgtgctgccttttaacgatggcgtgtacttcgccgctaccgagaagtccaacatcatcagaggctggatctttggcaccacactggactctaagacacagagcctgctgatcgtgaacaatgccaccaacgtggtgatcaaggtgtgcaatttccagttttgtaatgatccattcctgggcgtgtactatcacaagaacaataagtcctggatggagtctgagtttcgcgtgtattctagcgccaacaattgcacatttgagtacgtgagccagcccttcctgatggacctggagggcaagcagggcaatttcaagaacctgagggagttcgtgtttaagaatatcgatggctacttcaagatctacagcaagtataccccaatcaacctggtgcgcgacctgccacagggattctccgccctggagccactggtgaaactgcccatcggcatcaacatcacccggtttcagacactgctggccctgcacagatcctacctgacaccaggcgactcctctagcggatggaccgcaggagctgccgcctactatgtgggctatctgcagccccggaccttcctgctgaagtacaacgagaatggcaccatcacagacgcagtggattgcgccctggaccccctgtctgagacaaagtgtacactgaagagctttaccgtggagaagggcatctatcagacaagcaatttcagggtgcagcctaccgagtccatcgtgcgctttcccaatatcacaaacctgtgcccttttggcgaggtgttcaacgccaccagattcgccagcgtgtacgcctggaatcggaagagaatctccaactgcgtggccgactattctgtgctgtacaactccgcctctttcagcacctttaagtgctatggcgtgtctcccacaaagctgaatgatctgtgctttaccaacgtgtacgccgatagcttcgtgatcaggggagacgaagtgagacagatcgcaccaggacagacaggaaagatcgcagactacaattataagctgcctgacgatttcaccggctgcgtgatcgcctggaactccaacaatctggattctaaagtgggcggcaactacaattatctgtacaggctgtttcgcaagtccaatctgaagccattcgagcgggacatctccacagagatctaccaggccggctctaccccctgcaatggcgtggagggctttaactgttatttccctctgcagtcttacggcttccagccaacaaacggcgtgggctatcagccctacagagtggtggtgctgtcctttgagctgctgcacgcaccagcaacagtgtgcggcccaaagaagtctaccaatctggtgaagaacaagtgcgtgaacttcaacttcaacggactgaccggcacaggcgtgctgaccgagagcaataagaagttcctgccttttcagcagttcggcagggacatcagtgataccacagacgccgtgcgcgaccctcagaccctggagatcctggacatcacaccatgcagcttcggcggcgtgtccgtgatcacaccaggcaccaatacatccaaccaggtggccgtgctgtatcaggacgtgaattgtaccgatgtgcccgtggcaatccacgcagatcagctgacccctacatggcgggtgtactctaccggcagcaacgtgttccagacacaagccggatgcctgatcggagcagagcacgtgaacaatagctatgagtgcgacatccctatcggcgccggcatctgtgccagctaccagacccagacaaactccccatctggagcaggctccgtggccagccagtccatcatcgcctataccatgagcctgggcgccgagaacagcgtggcctactccaacaattctatcgccatccctaccaacttcacaatcagcgtgaccacagagatcctgccagtgtctatgaccaagacaagcgtggactgcacaatgtatatctgtggcgatagcaccgagtgctccaacctgctgctgcagtacggctccttttgtacccagctgaatagagccctgacaggcatcgccgtggagcaggataagaacacacaggaggtgttcgcccaggtgaagcagatctacaagaccccacccatcaaggactttggcggcttcaacttcagccagatcctgcctgatccaagcaagccctccaagaggtcttttatcgaggacctgctgttcaacaaggtgaccctggccgatgccggcttcatcaagcagtatggagattgcctgggagacatcgcagcccgcgacctgatctgtgcccagaagtttaatggcctgaccgtgctgcctccactgctgacagatgagatgatcgccgcgtacacagctgccctgctggccggcaccgctacagcgggatggaccttcggcgcaggagccgccctgcagatcccttttgccatgcagatggcctataggttcaacggcatcggcgtgacccagaatgtgctgtacgagaaccagaagctgatcgccaatcagtttaacagcgccatcggcaagatccaggactctctgtcctctacagccagcgccctgggcaagctgcaggatgtggtgaatcagaacgcccaggccctgaataccctggtgaagcagctgagctccaacttcggcgccatctctagcgtgctgaatgacatcctgagccggctggacccccctgaggcagaggtgcagatcgacaggctgatcacaggccgcctgcagagcctgcagacctacgtgacacagcagctgatcagggcagcagagatcagagcctccgccaatctggccgccaccaagatgagcgagtgcgtgctgggacagtccaagagggtggacttttgtggcaagggctatcacctgatgtctttcccacagagcgcccctcacggcgtggtgtttctgcacgtgacctacgtgccagcccaggagaagaacttcaccacagcaccagccatctgccacgatggaaaggcacactttcctagggagggcgtgttcgtgtctaacggcacccactggtttgtgacacagcgcaatttctacgagccacagatcatcaccacagacaatacattcgtgagcggcaactgtgatgtggtgatcggcatcgtgaacaataccgtgtatgatccactgcagcccgagctggactcctttaaggaggagctggataagtacttcaagaatcacacctctcccgacgtggatctgggcgacatctccggcatcaatgcctctgtggtgaacatccagaaggagatcgaccggctgaacgaggtggccaagaatctgaacgagagcctgatcgatctgcaggagctgggcaagtatgagcagtacatcaagggctctggcagagagaacctgtatttccagggaggaggaggcagcggatacatccctgaggcaccaagggacggacaggcctacgtgcgcaaggatggcgagtgggtgctgctgtccacctttctgggccatcatcaccaccaccaccaccactga

SEQ ID NO: 1342 - DNA, 3846 bp, Artificial Sequence
  Description of Artificial Sequence: Synthetic polynucleotide
atgggcatcctgccaagcccaggaatgcccgccctgctgtctctggtgagcctgctgtccgtgctgctgatgggatgcgtggcagagacaggcacacagtgcgtgaacctgaccacaaggacccagctgccccctgcctataccaattctttcacacggggcgtgtactatcccgacaaggtgtttagaagcgatgtgctgcactccacacaggatctgtttctgcctttcttttctaacgtgacctggttccacgccatccacgtgtccggcaccaatggcacaaagcggttcgacaatcccgtgctgccttttaacgatggcgtgtacttcgccagcaccgagaagtccaacatcatcagaggctggatctttggcaccacactggactctaagacacagagcctgctgatcgtgaacaatgccaccaacgtggtgatcaaggtgtgcgagttccagttttgtgaaaatccattcctgggcgtgtactatcacaagaacaataagtcctggatggagaaagagtttcgcgtgtattctagcgccaacaattgcacatttgagtacgtgagccagcccttcctgatggacctgggtggcaagcagggcaatttcaagaacctgagggagttcgtgtttaagaatatcgatggctacttcaagatctacagcaagcacaccccaatcaacctggtgcgcgacctgccacagggattctccgccctggagccactgatggatctgcccatcggcatcaacatcacccggtttcagacactgctggccctgcacagatcctacctgacaccaggcgactcctctagcggatggaccgcaggagctgccgcctactatgtgggctatctgcagccccggaccttcctgctgaagtacaacgagaatggcaccatcacagacgcagtggattgcgccctggaccccctgtctgagacaaagtgtacactgaagagctttaccgtggagaagggcatctatcagacaagcaatttcagggtgcagcctaccgagtccatcgtgcgctttcccaatatcacaaacctgtgcccttttggcgaggtgttcaacgccaccagattcgccagcgtgtacgcctggaatcggaagagaatctccaactgcgtggccgactattctgtgctgtacaactccgcctctttcagcacctttaagtgctatggcgtgtctcccacaaagctgaatgatctgtgctttaccaacgtgtacgccgatagcttcgtgatcaggggagacgaagtgagacagatcgcaccaggacagacaggaaagatcgcagactacaattataagctgcctgacgatttcaccggctgcgtgatcgcctggaactccaacaatctggattctaaagtgggcggcaactacaattatctgtacaggctgtttcgcaagtccaatctgaagccattcgagcgggacatctccacagagatctaccaggccggctctaccccctgcaatggcgtggagggctttaactgttatttccctctgcagtcttacggcttccagccaacaaacggcgtgggctatcagccctacagagtggtggtgctgtcctttgagctgctgcacgcaccagcaacagtgtgcggcccaaagaagtctaccaatctggtgaagaacaagtgcgtgaacttcaacttcaacggactgaccggcacaggcgtgctgaccgagagcaataagaagttcctgccttttcagcagttcggcagggacatcgcagataacacagacgccgtgcgcgaccctcagaccctggagatcctggacatcacaccatgcagcttcggcggcgtgtccgtgatcacaccaggcaccaatacatccaaccaggtggccgtgctgtatcaggacgtgaattgtaccgaggtgcccaatgcaatccacgcagatcagctgacccctacatggcgggtgtactctaccggcagcaacgtgttccagacaagagccggatgcctgatcggagcagagcacgtgaacaatagctatgagtgcgacatccctatcggcgccggcatctgtgccagctaccagacccagacaaactccccatctggagcaggctccgtggccagccagtccatcatcgcctataccatgagcctgggcgccgagaacagcgtggcctactccaacaattctatcgccatccctaccaacttcacaatcagcgtgaccacagagatcctgccagtgtctatgaccaagacaagcgtggactgcacaatgtatatctgtggcgatagcaccgagtgctccaacctgctgctgcagtacggctccttttgtacccagctgaatagagccctgcatggcatcgcccgagagcaggataagaacacacaggaggtgttcgcccaggtgaagcagatctacaagaccccacccatcaaggactttggcggcttcaacttcagccagatcctgcctgatccaagcaagccctccaagaggtcttttatcgaggacctgctgttcaacaaggtgaccctggccgatgccggcttcatcaagcagtatggagattgcctgggagacatcgcagcccgcgacctgatctgtgcccagaagtttaatggcctgaccgtgctgcctccactgctgacagatgagatgatcgcccagtacacatctgccctgctggccggcaccatcacaagcggatggaccttcggcgcaggagccgccctgcagatcccttttgccatgcagatggcctataggttcaacggcatcggcgtgacccagaatgtgctgtacgagaaccagaagctgatcgccaatcagtttaacaaagccatcggcaagatccaggactctctgtcctctacagccagcgccctgggcaagctgcaggatgtggtgaatcagaacgcccaggccctgaataccctggtgaagcagctgagctccaacttcggcgccatctctagcgtgctgaatgacatcctgagccggctggacccccctgaggcagaggtgcagatcgacaggctgatcacaggccgcctgcagagcctgcagacctacgtgacacagcagctgatcagggcagcagagatcagagcctccgccaatctggccgccaccaagatgagcgagtgcgtgctgggacagtccaagagggtggacttttgtggcaagggctatcacctgatgtctttcccacagagcgcccctcacggcgtggtgtttctgcacgtgacctacgtgccagcccaggagaagaacttcaccacagcaccagccatctgccacgatggaaaggcattttttcctagggagggcgtgttcgtgtctaacggcacccaatggtttgtgacacagcgcaatttctacgagccacagatcatcaccacagacaatacattcgtgagcggcaactgtgatgtggtgatcggcatcgtgaacaataccgtgtatgatccactgcagcccgagctggactcctttaaggaggagctggataagtacttcaagaatcacacctctcccgacgtggatctgggcgacatctccggcatcaatgcctctgtggtgaacatccagaaggagatcgaccggctgaacgaggtggccaagaatctgaacgagagcctgatcgatctgcaggagctgggcaagtatgagcagtacatcaagggctctggcagagagaacctgtatttccagggaggaggaggcagcggatacatccctgaggcaccaagggacggacaggcctacgtgcgcaaggatggcgagtgggtgctgctgtccacctttctgggccatcatcaccaccaccaccaccactga

SEQ ID NO: 1343 - DNA, 3846 bp, Artificial Sequence
  Description of Artificial Sequence: Synthetic polynucleotide
atgggcatcctgccaagcccaggaatgcccgccctgctgtctctggtgagcctgctgtccgtgctgctgatgggatgcgtggcagagacaggcacacagtgcgtgaacctgaccacaaggacccagctgccccctgcctataccaattctttcacacggggcgtgtactatcccgacaaggtgtttagaagctccgtgctgcactccacacaggatctgtttctgcctttcttttctaacgtgacctggttccacgccatccacgtgtccggcaccaatggcacaaagcggttcgacaatcccgtgctgccttttaacgatggcgtgtacttcgccagcaccgagaagtccaacatcatcagaggctggatctttggcaccacactggactctaagacacagagcctgctgatcgtgaacaatgccaccaacgtggtgatcaaggtgtgcgagttccagttttgtgaagatccattcctgggcgtgtactatcacaagaacaataagtcctggatggagtctgagtttcgcgtgtattctagcgccaacaattgcacatttgagtacgtgagccagcccttcctgatggacctggagggcaagcagggcaatttcaagaacctgagggagttcgtgtttaagaatatcgatggctacttcaagatctacagcaagcacaccccaatcaacctggtgcgcgacctgccacagggattctccgccctggagccactggtggatctgcccatcggcatcaacatcacccggtttcagacactgctggccctgcacagatcctacctgacaccaggcgactcctctagcggatggaccgcaggagctgccgcctactatgtgggctatctgcagccccggaccttcctgctgaagtacaacgagaatggcaccatcacagacgcagtggattgcgccctggaccccctgtctgagacaaagtgtacactgaagagctttaccgtggagaagggcatctatcagacaagcaatttcagggtgcagcctaccgagtccatcgtgcgctttcccaatatcacaaacctgtgcccttttggcgaggtgttcaacgccaccagattcgccagcgtgtacgcctggaatcggaagagaatctccaactgcgtggccgactattctgtgctgtacaactccgcctctttcagcacctttaagtgctatggcgtgtctcccacaaagctgaatgatctgtgctttaccaacgtgtacgccgatagcttcgtgatcaggggagacgaagtgagacagatcgcaccaggacagacaggaaagatcgcagactacaattataagctgcctgacgatttcaccggctgcgtgatcgcctggaactccaacaatctggattctaaagtgggcggcaactacaattatctgtacaggctgtttcgcaagtccaatctgaagccattcgagcgggacatctccacagagatctaccaggccggctctaccccctgcaatggcgtggagggctttaactgttatttccctctgcagtcttacggcttccagccaacaaacggcgtgggctatcagccctacagagtggtggtgctgtcctttgagctgctgcacgcaccagcaacagtgtgcggcccaaagaagtctaccaatctggtgaagaacaagtgcgtgaacttcaacttcaacggactgaccggcacaggcgtgctgaccgagagcaataagaagttcctgccttttcagcagttcggcagggacatcgcagataccacagacgccgtgcgcgaccctcagaccctggagatcctggacatcacaccatgcagcttcggcggcgtgtccgtgatcacaccaggcaccaatacatccaaccaggtggccgtgctgtatcaggacgtgaattgtaccgaggtgcccgtggcaatccacgcagatcagctgacccctacatggcgggtgtactctaccggcagcaacgtgttccagacaagagccggatgcctgatcggagcagagcacgtgaacaatagctatgagtgcgacatccctatcggcgccggcatctgtgccagctaccagacccagacaaactccccatctggagcaggctccgtggccagccagtccatcatcgcctataccatgagcctgggcgccgagaacagcgtggcctactccaacaattctatcgccatccctaccaacttcacaatcagcgtgaccacagagatcctgccagtgtctatgaccaagacaagcgtggactgcacaatgtatatctgtggcgatagcaccgagtgctccaacctgctgctgcagtacggctccttttgtacccagctgaatagagccctgacaggcatcgccgtggagcaggataagaacacacaggaggtgttcgcccaggtgaagcagatctacaagaccccacccatcaaggactttggcggcttcaacttcagccagatcctgcctgatccaagcaagccctccaagaggtcttttatcgaggacctgctgttcaacaaggtgaccctggccgatgccggcttcatcaagcagtatggagattgcctgggagacatcgcagcccgcgacctgatctgtgcccagaagtttaatggcctgaccgtgctgcctccactgctgacagatgagatgatcgcccagtacacatctgccctgctggccggcaccatcacaagcggatggaccttcggcgcaggagccgccctgcagatcccttttgccatgcagatggcctataggttcaacggcatcggcgtgacccagaatgtgctgtacgagaaccagaagctgatcgccaatcagtttaacagcgccatcggcaagatccaggactctctgtcctctacagccagcgccctgggcaagctgcaggatgtggtgaatcagaacgcccaggccctgaataccctggtgaagcagctgagctccaacttcggcgccatctctagcgtgctgaatgacatcctgagccggctggacccccctgaggcagaggtgcagatcgacaggctgatcacaggccgcctgcagagcctgcagacctacgtgacacagcagctgatcagggcagcagagatcagagcctccgccaatctggccgccaccaagatgagcgagtgcgtgctgggacagtccaagagggtggacttttgtggcaagggctatcacctgatgtctttcccacagagcgcccctcacggcgtggtgtttctgcacgtgacctacgtgccagcccaggagaagaacttcaccacagcaccagccatctgccacgatggaaaggcacactttcctagggagggcgtgttcgtgtctaacggcacccactggtttgtgacacagcgcaatttctacgagccacagatcatcaccacagacaatacattcgtgagcggcaactgtgatgtggtgatcggcatcgtgaacaataccgtgtatgatccactgcagcccgagctggactcctttaaggaggagctggataagtacttcaagaatcacacctctcccgacgtggatctgggcgacatctccggcatcaatgcctctgtggtgaacatccagaaggagatcgaccggctgaacgaggtggccaagaatctgaacgagagcctgatcgatctgcaggagctgggcaagtatgagcagtacatcaagggctctggcagagagaacctgtatttccagggaggaggaggcagcggatacatccctgaggcaccaagggacggacaggcctacgtgcgcaaggatggcgagtgggtgctgctgtccacctttctgggccatcatcaccaccaccaccaccactga

SEQ ID NO: 1344 - DNA, 3846 bp, Artificial Sequence
  Description of Artificial Sequence: Synthetic polynucleotide
atgggcatcctgccaagcccaggaatgcccgccctgctgtctctggtgagcctgctgtccgtgctgctgatgggatgcgtggcagagacaggcacacagtgcgtgaacctgaccacaaggacccagctgccccctgcctataccaattctttcacacggggcgtgtactatcccgacaaggtgtttagaagctccgtgctgcactccacacaggatctgtttctgcctttcttttctaacgtgacctggttccacgccatccacgtgtccggcaccaatggcacaaagcggttcgacaatcccgtgctgccttttaacgatggcgtgtacttcgccagcaccgagaagtccaacatcatcagaggctggatctttggcaccacactggactctaagacacagagcctgctgatcgtgaacaatgccaccaacgtggtgatcaaggtgtgcgagttccagttttgtaatgatccattcctgggcgtgtactatcacaagaacaataagtcctggatggagtctgagtttcgcgtgtattctagcgccaacaattgcacatttgagtacgtgagccagcccttcctgatggacctggagggcaagcagggcaatttcaagaacctgagggagttcgtgtttaagaatatcgatggctacttcaagatctacagcaagcacaccccaatcaacctggtgcgcgacctgccacagggattctccgccctggagccactggtggatctgcccatcggcatcaacatcacccggtttcagacactgctggccctgcacagatcctacctgacaccaggcgactcctctagcggatggagtgcaggagctgccgcctactatgtgggctatctgcagccccggaccttcctgctgaagtacaacgagaatggcaccatcacagacgcagtggattgcgccctggaccccctgtctgagacaaagtgtacactgaagagctttaccgtggagaagggcatctatcagacaagcaatttcagggtgcagcctaccgagtccatcgtgcgctttcccaatatcacaaacctgtgcccttttggcgaggtgttcaacgccaccagattcgccagcgtgtacgcctggaatcggaagagaatctccaactgcgtggccgactattctgtgctgtacaactccgcctctttcagcacctttaagtgctatggcgtgtctcccacaaagctgaatgatctgtgctttaccaacgtgtacgccgatagcttcgtgatcaggggagacgaagtgagacagatcgcaccaggacagacaggaaagatcgcagactacaattataagctgcctgacgatttcaccggctgcgtgatcgcctggaactccaacaatctggattctaaagtgggcggcaactacaattatctgtacaggctgtttcgcaagtccaatctgaagccattcgagcgggacatctccacagagatctaccaggccggctctaccccctgcaatggcgtggagggctttaactgttatttccctctgcagtcttacggcttccagccaacaaacggcgtgggctatcagccctacagagtggtggtgctgtcctttgagctgctgcacgcaccagcaacagtgtgcggcccaaagaagtctaccaatctggtgaagaacaagtgcgtgaacttcaacttcaacggactgaccggcacaggcgtgctgaccgagagcaataagaagttcctgccttttcagcagttcggcagggacatcgcagataccacagacgccgtgcgcgaccctcagaccctggagatcctggacatcacaccatgcagcttcggcggcgtgtccgtgatcacaccaggcaccaatacatccaaccaggtggccgtgctgtatcaggacgtgaattgtaccgaggtgcccgtggcaatccacgcagatcagctgacccctacatggcgggtgtactctaccggcagcaacgtgttccagacaagagccggatgcctgatcggagcagagcacgtgaacaatagctatgagtgcgacatccctatcggcgccggcatctgtgccagctaccagacccagacaaactccccatctggagcaggctccgtggccagccagtccatcatcgcctataccatgagcctgggcgccgagaacagcgtggcctactccaacaattctatcgccatccctaccaacttcacaatcagcgtgaccacagagatcctgccagtgtctatgaccaagacaagcgtggactgcacaatgtatatctgtggcgatagcaccgagtgctccaacctgctgctgcagtacggctccttttgtacccagctgaatagagccctgacaggcatcgccgtggagcaggataagaacacacaggaggtgttcgcccaggtgaagcagatctacaagaccccacccatcaaggactttggcggcttcaacttcagccagatcctgcctgatccaagcaagccctccaagaggtcttttatcgaggacctgctgttcaacaaggtgaccctggccgatgccggcttcatcaagcagtatggagattgcctgggagacatcgcagcccgcgacctgatctgtgcccagaagtttaatggcctgaccgtgctgcctccactgctgacagatgagatgatcgcccagtacacatctgccctgctggccggcaccatcacaagcggatggaccttcggcgcaggagccgccctgcagatcccttttgccatgcagatggcctataggttcaacggcatcggcgtgacccagaatgtgctgtacgagaaccagaagctgatcgccaatcagtttaacagcgccatcggcaagatccaggactctctgtcctctacagccagcgccctgggcaagctgcaggatgtggtgaatcagaacgcccaggccctgaataccctggtgaagcagctgagctccaacttcggcgccatctctagcgtgctgaatgacatcctgagccggctggacccccctgaggcagaggtgcagatcgacaggctgatcacaggccgcctgcagagcctgcagacctacgtgacacagcagctgatcagggcagcagagatcagagcctccgccaatctggccgccaccaagatgagcgagtgcgtgctgggacagtccaagagggtggacttttgtggcaagggctatcacctgatgtctttcccacagagcgcccctcacggcgtggtgtttctgcacgtgacctacgtgccagcccaggagaagaacttcaccacagcaccagccatctgccacgatggaaaggcacactttcctagggagggcgtgttcgtgtctaacggcacccactggtttgtgacacagcgcaatttctacgagccacagatcatcaccacagacaatacattcgtgagcggcaactgtgatgtggtgatcggcatcgtgaacaataccgtgtatgatccactgcagcccgagctggactcctttaaggaggagctggataagtacttcaagaatcacacctctcccgacgtggatctgggcgacatctccggcatcaatgcctctgtggtgaacatccagaaggagatcgaccggctgaacgaggtggccaagaatctgaacgagagcctgatcgatctgcaggagctgggcaagtatgagcagtacatcaagggctctggcagagagaacctgtatttccagggaggaggaggcagcggatacatccctgaggcaccaagggacggacaggcctacgtgcgcaaggatggcgagtgggtgctgctgtccacctttctgggccatcatcaccaccaccaccaccactga

SEQ ID NO: 1345 - DNA, 3846 bp, Artificial Sequence
  Description of Artificial Sequence: Synthetic polynucleotide
atgggcatcctgccaagcccaggaatgcccgccctgctgtctctggtgagcctgctgtccgtgctgctgatgggatgcgtggcagagacaggcacacagtgcgtgaacctgaccacaaggacccagctgccccctgcctataccaattctttcacacggggcgtgtactatcccgacaaggtgtttagaagctccgtgctgcactccacacaggatctgtttctgcctttcttttctaacgtgacctggttccacgccatccacgtgtccggcaccaatggcacaaagcggttcgacaatcccgtgctgccttttaacgatggcgtgtacttcgccagcaccgagaagtccaacatcatcagaggctggatctttggcaccacactggactctaagacacagagcctgctgatcgtgaacaatgccaccaacgtggtgatcaaggtgtgcgagttccagttttgtaatgatccattcctgggcgtgtactatcacaagaacaataagtcctggatggagtctgagtttcgcgtgtattctagcgccaacaattgcacatttgagtacgtgagccagcccttcctgatggacctggagggcaagcagggcaatttcaagaacctgagggagttcgtgtttaagaatatcgatggctacttcaagatctacagcaagcacaccccaatcaacctggtgcgcgacctgccacagggattctccgccctggagccactggtggatctgcccatcggcatcaacatcacccattttcagacactgctggccctgcacagatcctacctgacaccaggcgactcctctagcggatggaccgcaggagctgccgcctactatgtgggctatctgcagccccggaccttcctgctgaagtacaacgagaatggcaccatcacagacgcagtggattgcgccctggaccccctgtctgagacaaagtgtacactgaagagctttaccgtggagaagggcatctatcagacaagcaatttcagggtgcagcctaccgagtccatcgtgcgctttcccaatatcacaaacctgtgcccttttggcgaggtgttcaacgccaccagattcgccagcgtgtacgcctggaatcggaagagaatctccaactgcgtggccgactattctgtgctgtacaactccgcctctttcagcacctttaagtgctatggcgtgtctcccacaaagctgaatgatctgtgctttaccaacgtgtacgccgatagcttcgtgatcaggggagacgaagtgagacagatcgcaccaggacagacaggaaagatcgcagactacaattataagctgcctgacgatttcaccggctgcgtgatcgcctggaactccaacaatctggattctaaagtgggcggcaactacaattatctgtacaggctgtttcgcaagtccaatctgaagccattcgagcgggacatctccacagagatctaccaggccggctctaccccctgcaatggcgtggagggctttaactgttatttccctctgcagtcttacggcttccagccaacaaacggcgtgggctatcagccctacagagtggtggtgctgtcctttgagctgctgcacgcaccagcaacagtgtgcggcccaaagaagtctaccaatctggtgaagaacaagtgcgtgaacttcaacttcaacggactgaccggcacaggcgtgctgaccgagagcaataagaagttcctgccttttcagcagttcggcagggacatcgcagataccacagacgccgtgcgcgaccctcagaccctggagatcctggacatcacaccatgcagcttcggcggcgtgtccgtgatcacaccaggcaccaatacatccaaccaggtggccgtgctgtatcaggacgtgaattgtaccgaggtgcccgtggcaatccacgcagatcagctgacccctacatggcgggtgtactctaccggcagcaacgtgttccagacaagagccggatgcctgatcggagcagagcacgtgaacaatagctatgagtgcgacatccctatcggcgccggcatctgtgccagctaccagacccagacaaactccccatctggagcaggctccgtggccagccagtccatcatcgcctataccatgagcctgggcgccgagaacagcgtggcctactccaacaattctatcgccatccctaccaacttcacaatcagcgtgaccacagagatcctgccagtgtctatgaccaagacaagcgtggactgcacaatgtatatctgtggcgatagcaccgagtgctccaacctgctgctgcagtacggctccttttgtacccagctgaatagagccctgacaggcatcgccgtggagcaggataagaacacacaggaggtgttcgcccaggtgaagcagatctacaagaccccacccatcaaggactttggcggcttcaacttcagccagatcctgcctgatccaagcaagccctccaagaggtcttttatcgaggacctgctgttcaacaaggtgaccctggccgatgccggcttcatcaagcagtatggagattgcctgggagacatcgcagcccgcgacctgatctgtgcccagaagtttaatggcctgaccgtgctgcctccactgctgacagatgagatgatcgcccagtacacatctgccctgctggccggcaccatcacaagcggatggaccttcggcgcaggagccgccctgcagatcccttttgccatgcagatggcctataggttcaacggcatcggcgtgacccagaatgtgctgtacgagaaccagaagctgatcgccaatcagtttaacagcgccatcggcaagatccaggactctctgtcctctacagccagcgccctgggcaagctgcaggatgtggtgaatcagaacgcccaggccctgaataccctggtgaagcagctgagctccaacttcggcgccatctctagcgtgctgaatgacatcctgagccggctggacccccctgaggcagaggtgcagatcgacaggctgatcacaggccgcctgcagagcctgcagacctacgtgacacagcagctgatcagggcagcagagatcagagcctccgccaatctggccgccaccaagatgagcgagtgcgtgctgggacagtccaagagggtggacttttgtggcaagggctatcacctgatgtctttcccacagagcgcccctcacggcgtggtgtttctgcacgtgacctacgtgccagcccaggagaagaacttcaccacagcaccagccatctgccacgatggaaaggcacactttcctagggagggcgtgttcgtgtctaacggcacccactggtttgtgacacagcgcaatttctacgagccacagatcatcaccacagacaatacattcgtgagcggcaactgtgatgtggtgatcggcatcgtgaacaataccgtgtatgatccactgcagcccgagctggactcctttaaggaggagctggataagtacttcaagaatcacacctctcccgacgtggatctgggcgacatctccggcatcaatgcctctgtggtgaacatccagaaggagatcgaccggctgaacgaggtggccaagaatctgaacgagagcctgatcgatctgcaggagctgggcaagtatgagcagtacatcaagggctctggcagagagaacctgtatttccagggaggaggaggcagcggatacatccctgaggcaccaagggacggacaggcctacgtgcgcaaggatggcgagtgggtgctgctgtccacctttctgggccatcatcaccaccaccaccaccactga

SEQ ID NO: 1346 - DNA, 3846 bp, Artificial Sequence
  Description of Artificial Sequence: Synthetic polynucleotide
atgggcatcctgccaagcccaggaatgcccgccctgctgtctctggtgagcctgctgtccgtgctgctgatgggatgcgtggcagagacaggcacacagtgcgtgaacctgaccacaaggacccagctgccccctgcctataccaattctttcacacggggcgtgtactatcccgacaaggtgtttagaagctccgtgctgcactccacacaggatctgtttctgcctttcttttctaacgtgacctggttccacgccatccacgtgtccggcaccaatggcacaaagcggttcgacaatcccgtgctgccttttaacgatggcgtgtacttcgccagcaccgagaagtccaacatcatcagaggctggatctttggcaccacactggactctaagacacagagcctgctgatcgtgaacaatgccaccaacgtggtgatcaaggtgtgcgagttccagttttgtaatgatccattcctgggcgtgtactatcacaagaacaataagtcctggatggagtctgagtttcgcgtgtattctagcgccaacaattgcacatttgagtacgtgagccagcccttcctgatggacctggagggcaagcagggcaatttcaagaacctgagggagttcgtgtttaagaatatcgatggctacttcaagatctacagcaagcacaccccaatcaacctggtgcgcgacctgccacagggattctccgccctggagccactggtggatctgcccatcggcatcaacatcacccggtttcagacactgctggccctgcacagatcctacctgacaccaggcgactcctctagcggatggaccgcaggagctgccgcctactatgtgggctatctgcagccccggaccttcctgctgaagtacaacgagaatggcaccatcacagacgcagtggattgcgccctggaccccctgtctgagacaaagtgtacactgaagagctttaccgtggagaagggcatctatcagacaagcaatttcagggtgcagcctaccgagtccatcgtgcgctttcccaatatcacaaacctgtgcccttttggcgaggtgttcaacgccaccagattcgccagcgtgtacgcctggaatcggaagagaatctccaactgcgtggccgactattctgtgctgtacaactccgcctctttcagcacctttaagtgctatggcgtgtctcccacaaagctgaatgatctgtgctttaccaacgtgtacgccgatagcttcgtgatcaggggagacgaagtgagacagatcgcaccaggacagacaggaaagatcgcagactacaattataagctgcctgacgatttcaccggctgcgtgatcgcctggaactccaacaatctggattctaaagtgggcggcaactacaattatctgtacaggctgtttcgcaagtccaatctgaagccattcgagcgggacatctccacagagatctaccaggccggctctaccccctgcaatggcgtggagggctttaactgttatttccctctgcagtcttacggcttccagccaacaaacggcgtgggctatcagccctacagagtggtggtgctgtcctttgagctgctgcacgcaccagcaacagtgtgcggcccaaagaagtctaccaatctggtgaagaacaagtgcgtgaacttcaacttcaacggactgaccggcacaggcgtgctgaccgagagcaataagaagttcctgccttttcagcagttcggcagggacatcgcagataccacagacgccgtgcgcgaccctcagaccctggagatcctggacatcacaccatgcagcttcggcggcgtgtccgtgatcacaccaggcaccaatacatccaaccaggtggccgtgctgtatcaggacgtgaattgtaccgaggtgcccgtggcaatccacgcagatcagctgacccctacatggcgggtgtactctaccggcagcaacgtgttccagacaagagccggatgcctgatcggagcagagcacgtgaacaatagctatgagtgcgacatccctatcggcgccggcatctgtgccagctaccagacccagacaaactccccatctggagcaggctccgtggccagccagtccatcatcgcctataccatgagcctgggcgccgagaacagcgtggcctactccaacaattctatcgccatccctaccaacttcacaatcagcgtgaccacagagatcctgccagtgtctatgaccaagacaagcgtggactgcacaatgtatatctgtggcgatagcaccgagtgctccaacctgctgctgcagtacggctccttttgtacccagctgaatagagccctgacaggcatcgccgtggagcaggataagaacacacaggaggtgttcgcccaggtgaagcagatctacaagaccccacccatcaaggactttggcggcttcaacttcagccagatcctgcctgatccaagcaagccctccaagaggtcttttatcgaggacctgctgttcaacaaggtgaccctggccgatgccggcttcatcaagcagtatggagattgcctgggagacatcgcagcccgcgacctgatctgtgcccagaagtttaatggcctgaccgtgctgcctccactgctgacagatgagatgatcgcccagtacacatctgccctgctggccggcaccatcacaagcggatggaccttcggcgcaggagccgccctgcagatcccttttgccatgcagatggcctataggttcaacggcatcggcgtgacccagaatgtgctgtacgagaaccagaagctgatcgccaatcagtttaacagcgccatcggcaagatccaggaatctctgtcctctacagccagcgccctgggcaagctgcaggatgtggtgaatcagaacgcccaggccctgaataccctggtgaagcagctgagctccaacttcggcgccatctctagcgtgctgaatgacatcctgagccggctggacccccctgaggcagaggtgcagatcgacaggctgatcacaggccgcctgcagagcctgcagacctacgtgacacagcagctgatcagggcagcagagatcagagcctccgccaatctggccgccaccaagatgagcgagtgcgtgctgggacagtccaagagggtggacttttgtggcaagggctatcacctgatgtctttcccacagagcgcccctcacggcgtggtgtttctgcacgtgacctacgtgccagcccaggagaagaacttcaccacagcaccagccatctgccacgatggaaaggcacactttcctagggagggcgtgttcgtgtctaacggcacccactggtttgtgacacagcgcaatttctacgagccacagatcatcaccacagacaatacattcgtgagcggcaactgtgatgtggtgatcggcatcgtgaacaataccgtgtatgatccactgcagcccgagctggactcctttaaggaggagctggataagtacttcaagaatcacacctctcccgacgtggatctgggcgacatctccggcatcaatgcctctgtggtgaacatccagaaggagatcgaccggctgaacgaggtggccaagaatctgaacgagagcctgatcgatctgcaggagctgggcaagtatgagcagtacatcaagggctctggcagagagaacctgtatttccagggaggaggaggcagcggatacatccctgaggcaccaagggacggacaggcctacgtgcgcaaggatggcgagtgggtgctgctgtccacctttctgggccatcatcaccaccaccaccaccactga

SEQ ID NO: 1347 - DNA, 3846 bp, Artificial Sequence
  Description of Artificial Sequence: Synthetic polynucleotide
atgggcatcctgccaagcccaggaatgcccgccctgctgtctctggtgagcctgctgtccgtgctgctgatgggatgcgtggcagagacaggcacacagtgcgtgaacctgaccacaaggacccagctgccccctgcctataccaattctttcacacggggcgtgtactatcccgacaaggtgtttagaagctccgtgctgcactccacacaggatctgtttctgcctttcttttctaacgtgacctggttccacgccatccacgtgtccggcaccaatggcacaaagcggttcgacaatcccgtgctgccttttaacgatggcgtgtacttcgccagcaccgagaagtccaacatcatcagaggctggatctttggcaccacactggactctaagacacagagcctgctgatcgtgaacaatgccaccaacgtggtgatcaaggtgtgcgagttccagttttgtaatgatccattcctgggcgtgtactatcacaagaacaataagtcctggatggagtctgagtttcgcgtgtattctagcgccaacaattgcacatttgagtacgtgagccaggacttcctgatggacctggagggcaagcagggcaatttcaagaacctgagggagttcgtgtttaagaatatcgatggctacttcaagatctacagcaagcacaccccaatcaacctggtgcgcgacctgccacagggattctccgccctggagccactggtggatctgcccatcggcatcaacatcacccggtttcagacactgctggccctgcacagatcctacctgacaccaggcgactcctctagcggatggaccgcaggagctgccgcctactatgtgggctatctgcagccccggaccttcctgctgaagtacaacgagaatggcaccatcacagacgcagtggattgcgccctggaccccctgtctgagacaaagtgtacactgaagagctttaccgtggagaagggcatctatcagacaagcaatttcagggtgcagcctaccgagtccatcgtgcgctttcccaatatcacaaacctgtgcccttttggcgaggtgttcaacgccaccagattcgccagcgtgtacgcctggaatcggaagagaatctccaactgcgtggccgactattctgtgctgtacaactccgcctctttcagcacctttaagtgctatggcgtgtctcccacaaagctgaatgatctgtgctttaccaacgtgtacgccgatagcttcgtgatcaggggagacgaagtgagacagatcgcaccaggacagacaggaaagatcgcagactacaattataagctgcctgacgatttcaccggctgcgtgatcgcctggaactccaacaatctggattctaaagtgggcggcaactacaattatctgtacaggctgtttcgcaagtccaatctgaagccattcgagcgggacatctccacagagatctaccaggccggctctaccccctgcaatggcgtggagggctttaactgttatttccctctgcagtcttacggcttccagccaacaaacggcgtgggctatcagccctacagagtggtggtgctgtcctttgagctgctgcacgcaccagcaacagtgtgcggcccaaagaagtctaccaatctggtgaagaacaagtgcgtgaacttcaacttcaacggactgaccggcacaggcgtgctgaccgagagcaataagaagttcctgccttttcagcagttcggcagggacatcgcagataccacagacgccgtgcgcgaccctcagaccctggagatcctggacatcacaccatgcagcttcggcggcgtgtccgtgatcacaccaggcaccaatacatccaaccaggtggccgtgctgtatcaggacgtgaattgtaccgaggtgcccgtggcaatccacgcagatcagctgacccctacatggcgggtgtactctaccggcagcaacgtgttccagacaagagccggatgcctgatcggagcagagcacgtgaacaatagctatgagtgcgacatccctatcggcgccggcatctgtgccagctaccagacccagacaaactccccatctggagcaggctccgtggccagccagtccatcatcgcctataccatgagcctgggcgccgagaacagcgtggcctactccaacaattctatcgccatccctaccaacttcacaatcagcgtgaccacagagatcctgccagtgtctatgaccaagacaagcgtggactgcacaatgtatatctgtggcgatagcaccgagtgctccaacctgctgctgcagtacggctccttttgtacccagctgaatagagccctgacaggcatcgccgtggagcaggataagaacacacaggaggtgttcgcccaggtgaagcagatctacaagaccccacccatcaaggactttggcggcttcaacttcagccagatcctgcctgatccaagcaagccctccaagaggtcttttatcgaggacctgctgttcaacaaggtgaccctggccgatgccggcttcatcaagcagtatggagattgcctgggagacatcgcagcccgcgacctgatctgtgcccagaagtttaatggcctgaccgtgctgcctccactgctgacagatgagatgatcgcccagtacacatctgccctgctggccggcaccatcacaagcggatggaccttcggcgcaggagccgccctgcagatcccttttgccatgcagatggcctataggttcaacggcatcggcgtgacccagaatgtgctgtacgagaaccagaagctgatcgccaatcagtttaacagcgccatcggcaagatccaggactctctgtcctctacagccagcgccctgggcaagctgcaggatgtggtgaatcagaacgcccaggccctgaataccctggtgaagcagctgagctccaacttcggcgccatctctagcgtgctgaatgacatcctgagccggctggacccccctgaggcagaggtgcagatcgacaggctgatcacaggccgcctgcagagcctgcagacctacgtgacacagcagctgatcagggcagcagagatcagagcctccgccaatctggccgccaccaagatgagcgagtgcgtgctgggacagtccaagagggtggacttttgtggcaagggctatcacctgatgtctttcccacagagcgcccctcacggcgtggtgtttctgcacgtgacctacgtgccagcccaggagaagaacttcaccacagcaccagccatctgccacgatggaaaggcacactttcctagggagggcgtgttcgtgtctaacggcacccactggtttgtgacacagcgcaatttctacgagccacagatcatcaccacagacaatacattcgtgagcggcaactgtgatgtggtgatcggcatcgtgaacaataccgtgtatgatccactgcagcccgagctggactcctttaaggaggagctggataagtacttcaagaatcacacctctcccgacgtggatctgggcgacatctccggcatcaatgcctctgtggtgaacatccagaaggagatcgaccggctgaacgaggtggccaagaatctgaacgagagcctgatcgatctgcaggagctgggcaagtatgagcagtacatcaagggctctggcagagagaacctgtatttccagggaggaggaggcagcggatacatccctgaggcaccaagggacggacaggcctacgtgcgcaaggatggcgagtgggtgctgctgtccacctttctgggccatcatcaccaccaccaccaccactga

SEQ ID NO: 1348 - DNA, 3846 bp, Artificial Sequence
  Description of Artificial Sequence: Synthetic polynucleotide
atgggcatcctgccaagcccaggaatgcccgccctgctgtctctggtgagcctgctgtccgtgctgctgatgggatgcgtggcagagacaggcacacagtgcgtgaacctgaccacaaggacccagctgccccctgcctataccaattctttcacacggggcgtgtactatcccgacaaggtgtttagaagctccgtgctgcactccacacaggatctgtttctgcctttcttttctaacgtgacctggttccacgccatccacgtgtccggcaccaatggcacaaagcggttcgacaatcccgtgctgccttttaacgatggcgtgtacttcgccagcaccgagaagtccaacatcatcagaggctggatctttggcaccacactggactctaagacacagagcctgctgatcgtgaacaatgccaccaacgtggtgatcaaggtgtgcgagttccagttttgtaatgatccattcctgggcgtgtactatcacaagaacaataagtcctggatggagtctgagtttcgcgtgtattctagcgccaacaattgcacatttgagtacgtgagccagcccttcctgatggacctggagggcaagcagggcaatttcaagaacctgagggagttcgtgtttaagaatatcgatggctacttcaagatctacagcaagcacaccccaatcaacctggtgcgcgacctgccacagggattctccgtcctggagccactggtggatctgcccatcggcatcaacatcacccggtttcagacactgctggccctgcacagatcctacctgacaccaggcgactcctctagcggatggaccgcaggagctgccgcctactatgtgggctatctgcagccccggaccttcctgctgaagtacaacgagaatggcaccatcacagacgcagtggattgcgccctggaccccctgtctgagacaaagtgtacactgaagagctttaccgtggagaagggcatctatcagacaagcaatttcagggtgcagcctaccgagtccatcgtgcgctttcccaatatcacaaacctgtgcccttttggcgaggtgttcaacgccaccagattcgccagcgtgtacgcctggaatcggaagagaatctccaactgcgtggccgactattctgtgctgtacaactccgcctctttcagcacctttaagtgctatggcgtgtctcccacaaagctgaatgatctgtgctttaccaacgtgtacgccgatagcttcgtgatcaggggagacgaagtgagacagatcgcaccaggacagacaggaaagatcgcagactacaattataagctgcctgacgatttcaccggctgcgtgatcgcctggaactccaacaatctggattctaaagtgggcggcaactacaattatctgtacaggctgtttcgcaagtccaatctgaagccattcgagcgggacatctccacagagatctaccaggccggctctaccccctgcaatggcgtggagggctttaactgttatttccctctgcagtcttacggcttccagccaacaaacggcgtgggctatcagccctacagagtggtggtgctgtcctttgagctgctgcacgcaccagcaacagtgtgcggcccaaagaagtctaccaatctggtgaagaacaagtgcgtgaacttcaacttcaacggactgaccggcacaggcgtgctgaccgagagcaataagaagttcctgccttttcagcagttcggcagggacatcgcagataccacagacgccgtgcgcgaccctcagaccctggagatcctggacatcacaccatgcagcttcggcggcgtgtccgtgatcacaccaggcaccaatacatccaaccaggtggccgtgctgtatcaggacgtgaattgtaccgaggtgcccgtggcaatccacgcagatcagctgacccctacatggcgggtgtactctaccggcagcaacgtgttccagacaagagccggatgcctgatcggagcagagcacgtgaacaatagctatgagtgcgacatccctatcggcgccggcatctgtgccagctaccagacccagacaaactccccatctggagcaggctccgtggccagccagtccatcatcgcctataccatgagcctgggcgccgagaacagcgtggcctactccaacaattctatcgccatccctaccaacttcacaatcagcgtgaccacagagatcctgccagtgtctatgaccaagacaagcgtggactgcacaatgtatatctgtggcgatagcaccgagtgctccaacctgctgctgcagtacggctccttttgtacccagctgaatagagccctgacaggcatcgccgtggagcaggataagaacacacaggaggtgttcgcccaggtgaagcagatctacaagaccccacccatcaaggactttggcggcttcaacttcagccagatcctgcctgatccaagcaagccctccaagaggtcttttatcgaggacctgctgttcaacaaggtgaccctggccgatgccggcttcatcaagcagtatggagattgcctgggagacatcgcagcccgcgacctgatctgtgcccagaagtttaatggcctgaccgtgctgcctccactgctgacagatgagatgatcgcccagtacacatctgccctgctggccggcaccatcacaagcggatggaccttcggcgcaggagccgccctgcagatcccttttgccatgcagatggcctataggttcaacggcatcggcgtgacccagaatgtgctgtacgagaaccagaagctgatcgccaatcagtttaacagcgccatcggcaagatccaggactctctgtcctctacagccagcgccctgggcaagctgcaggatgtggtgaatcagaacgcccaggccctgaataccctggtgaagcagctgagctccaacttcggcgccatctctagcgtgctgaatgacatcctgagccggctggacccccctgaggcagaggtgcagatcgacaggctgatcacaggccgcctgcagagcctgcagacctacgtgacacagcagctgatcagggcagcagagatcagagcctccgccaatctggccgccaccaagatgagcgagtgcgtgctgggacagtccaagagggtggacttttgtggcaagggctatcacctgatgtctttcccacagagcgcccctcacggcgtggtgtttctgcacgtgacctacgtgccagcccaggagaagaacttcaccacagcaccagccatctgccacgatggaaaggcacactttcctagggagggcgtgttcgtgtctaacggcacccactggtttgtgacacagcgcaatttctacgagccacagatcatcaccacagacaatacattcgtgagcggcaactgtgatgtggtgatcggcatcgtgaacaataccgtgtatgatccactgcagcccgagctggactcctttaaggaggagctggataagtacttcaagaatcacacctctcccgacgtggatctgggcgacatctccggcatcaatgcctctgtggtgaacatccagaaggagatcgaccggctgaacgaggtggccaagaatctgaacgagagcctgatcgatctgcaggagctgggcaagtatgagcagtacatcaagggctctggcagagagaacctgtatttccagggaggaggaggcagcggatacatccctgaggcaccaagggacggacaggcctacgtgcgcaaggatggcgagtgggtgctgctgtccacctttctgggccatcatcaccaccaccaccaccactga

SEQ ID NO: 1349 - DNA, 3846 bp, Artificial Sequence
  Description of Artificial Sequence: Synthetic polynucleotide
atgggcatcctgccaagcccaggaatgcccgccctgctgtctctggtgagcctgctgtccgtgctgctgatgggatgcgtggcagagacaggcacacagtgcgtgaacctgaccacaaggacccagctgccccctgcctataccaattctttcacacggggcgtgtactatcccgacaaggtgtttagaagctccgtgctgcactccacacaggatctgtttctgcctttcttttctaacgtgacctggttccacgccatccacgtgtccggcaccaatggcacaaagcggttcgacaatcccgtgctgccttttaacgatggcgtgtacttcgccagcaccgagaagtccaacatcatcagaggctggatctttggcaccacactggactctaagacacagagcctgctgatcgtgaacaatgccaccaacgtggtgatcaaggtgtgcgagttccagttttgtaatgatccattcctgggcgtgtactatcacaagaacaataagtcctggatggagtctgagtttcgcgtgtattctagcgccaacaattgcacatttgagtacgtgagccagcccttcctgatggacctggagggcaagcagggcaatttcaagaacctgagggagttcgtgtttaagaatatcgatggctacttcaagatctacagcaagcacaccccaatcaacctggtgcgcgacctgccacagggattctccgccctggagccactggtggatctgcccatcggcatcaacatcacccggtttcagacactgctggccctgcacagatcctacctgacaccaggcgactcctctagcggatggaccgcaggagctgccgcctactatgtgggctatctgcagccccggaccttcctgctgaagtacaacgagaatggcaccatcacagacgcagtggattgcgccctggaccccctgtctgagacaaagtgtacactgaagagctttaccgtggagaagggcatctatcagacaagcaatttcagggtgcagcctaccgagtccatcgtgcgctttcccaatatcacaaacctgtgcccttttggcgaggtgttcaacgccaccagattcgccagcgtgtacgcctggaatcggaagagaatctccaactgcgtggccgactattctgtgctgtacaactccgcctctttcagcacctttaagtgctatggcgtgtctcccacaaagctgaatgatctgtgctttaccaacgtgtacgccgatagcttcgtgatcaggggagacgaagtgagacagatcgcaccaggacagacaggaaagatcgcagactacaattataagctgcctgacgatttcaccggctgcgtgatcgcctggaactccaacaatctggattctaaagtgggcggcaactacaattatctgtacaggctgtttcgcaagtccaatctgaagccattcgagcgggacatctccacagagatctaccaggccggctctaccccctgcaatggcgtggagggctttaactgttatttccctctgcagtcttacggcttccagccaacaaacggcgtgggctatcagccctacagagtggtggtgctgtcctttgagctgctgcacgcaccagcaacagtgtgcggcccaaagaagtctaccaatctggtgaagaacaagtgcgtgaacttcaacttcaacggactgaccggcacaggcgtgctgaccgagagcaataagaagttcctgccttttcagcagttcggcagggacatcgcagataccacagacgccgtgcgcgaccctcagaccctggagatcctggacatcacaccatgcagcttcggcggcgtgtccgtgatcacaccaggcaccaatacatccaaccaggtggccgtgctgtatcaggacgtgaattgtaccgaggtgcccgtggcaatccacgcagatcagctgacccctacatggcgggtgtactctaccggcagcaacgtgttccagacaagagccggatgcctgatcggagcagagcacgtgaacaatagctatgagtgcgacatccctatcggcgccggcatctgtgccagctaccagacccagacaaactccccatctggagcaggctccgtggccagccagtccatcatcgcctataccatgagcctgggcgccgagaacagcgtggcctactccaacaattctatcgccatccctaccaacttcacaatcagcgtgaccacagagatcctgccagtgtctatgaccaagacaagcgtggactgcacaatgtatatctgtggcgatagcaccgagtgctccaacctgctgctgcagtacggctccttttgtacccagctgaatagagccctgacaggcatcgccgtggagcaggataagaacacacaggaggtgttcgcccaggtgaagcagatctacaagaccccacccatcaaggactttggcggcttcaacttcagccagatcctgcctgatccaagcaagccctccaagaggtcttttatcgaggacctgctgttcaacaaggtgaccctggccgatgccggcttcatcaagcagtatggagattgcctgggagacatcgcagcccgcgacctgatctgtgcccagaagtttaatggcctgaccgtgctgcctccactgctgacagatgagatgatcgcccagtacacatctgccctgctggccggcaccatcacaagcggatggaccttcggcgcaggagccgccctgcagatcccttttgccatgcagatggcctataggttcaacggcatcggcgtgacccagaatgtgctgtacgagaaccagaagctgatcgccaatcagtttaacagcgccatcggcaagatccaggactctctgacttctacagccagcgccctgggcaagctgcaggatgtggtgaatcagaacgcccaggccctgaataccctggtgaagcagctgagctccaacttcggcgccatctctagcgtgctgaatgacatcctgagccggctggacccccctgaggcagaggtgcagatcgacaggctgatcacaggccgcctgcagagcctgcagacctacgtgacacagcagctgatcagggcagcagagatcagagcctccgccaatctggccgccaccaagatgagcgagtgcgtgctgggacagtccaagagggtggacttttgtggcaagggctatcacctgatgtctttcccacagagcgcccctcacggcgtggtgtttctgcacgtgacctacgtgccagcccaggagaagaacttcaccacagcaccagccatctgccacgatggaaaggcacactttcctagggagggcgtgttcgtgtctaacggcacccactggtttgtgacacagcgcaatttctacgagccacagatcatcaccacagacaatacattcgtgagcggcaactgtgatgtggtgatcggcatcgtgaacaataccgtgtatgatccactgcagcccgagctggactcctttaaggaggagctggataagtacttcaagaatcacacctctcccgacgtggatctgggcgacatctccggcatcaatgcctctgtggtgaacatccagaaggagatcgaccggctgaacgaggtggccaagaatctgaacgagagcctgatcgatctgcaggagctgggcaagtatgagcagtacatcaagggctctggcagagagaacctgtatttccagggaggaggaggcagcggatacatccctgaggcaccaagggacggacaggcctacgtgcgcaaggatggcgagtgggtgctgctgtccacctttctgggccatcatcaccaccaccaccaccactga

SEQ ID NO: 1350 - DNA, 3846 bp, Artificial Sequence
  Description of Artificial Sequence: Synthetic polynucleotide
atgggcatcctgccaagcccaggaatgcccgccctgctgtctctggtgagcctgctgtccgtgctgctgatgggatgcgtggcagagacaggcacacagtgcgtgaacctgaccacaaggacccagctgccccctgcctataccaattctttcacacggggcgtgtactatcccgacaaggtgtttagaagctccgtgctgcactccacacaggatctgtttctgcctttcttttctaacgtgacctggttccacgccatccacgtgtccggcaccaatggcacaaagcggttcgacaatcccgtgctgccttttaacgatggcgtgtacttcgccagcaccgagaagtccaacatcatcagaggctggatctttggcaccacactggactctaagacacagagcctgctgatcgtgaacaatgccaccaacgtggtgatcaaggtgtgcgagttccagttttgtcaagatccattcctgggcgtgtactatcacaagaacaataagtcctggatggagtctgagtttcgcgtgtattctagcgccaacaattgcacatttgagtacgtgagccagcccttcctgatggacctggagggcaagcagggcaatttcaagaacctgagggagttcgtgtttaagaatatcgatggctacttcaagatctacagcaagcacaccccaatcaacctggtgcgcgacctgccacagggattctccgccctggagccactggtggatctgcccatcggcatcaacatcacccggtttcagacactgctggccctgcacagatcctacctgacaccaggcgactcctctagcggatggaccgcaggagctgccgcctactatgtgggctatctgcagccccggaccttcctgctgaagtacaacgagaatggcaccatcacagacgcagtggattgcgccctggaccccctgtctgagacaaagtgtacactgaagagctttaccgtggagaagggcatctatcagacaagcaatttcagggtgcagcctaccgagtccatcgtgcgctttcccaatatcacaaacctgtgcccttttggcgaggtgttcaacgccaccagattcgccagcgtgtacgcctggaatcggaagagaatctccaactgcgtggccgactattctgtgctgtacaactccgcctctttcagcacctttaagtgctatggcgtgtctcccacaaagctgaatgatctgtgctttaccaacgtgtacgccgatagcttcgtgatcaggggagacgaagtgagacagatcgcaccaggacagacaggaaagatcgcagactacaattataagctgcctgacgatttcaccggctgcgtgatcgcctggaactccaacaatctggattctaaagtgggcggcaactacaattatctgtacaggctgtttcgcaagtccaatctgaagccattcgagcgggacatctccacagagatctaccaggccggctctaccccctgcaatggcgtggagggctttaactgttatttccctctgcagtcttacggcttccagccaacaaacggcgtgggctatcagccctacagagtggtggtgctgtcctttgagctgctgcacgcaccagcaacagtgtgcggcccaaagaagtctaccaatctggtgaagaacaagtgcgtgaacttcaacttcaacggactgaccggcacaggcgtgctgaccgagagcaataagaagttcctgccttttcagcagttcggcagggacatcgcagataccacagacgccgtgcgcgaccctcagaccctggagatcctggacatcacaccatgcagcttcggcggcgtgtccgtgatcacaccaggcaccaatacatccaaccaggtggccgtgctgtatcaggacgtgaattgtaccgaggtgcccgtggcaatccacgcagatcagctgacccctacatggcgggtgtactctaccggcagcaacgtgttccagacaagagccggatgcctgatcggagcagagcacgtgaacaatagctatgagtgcgacatccctatcggcgccggcatctgtgccagctaccagacccagacaaactccccatctggagcaggctccgtggccagccagtccatcatcgcctataccatgagcctgggcgccgagaacagcgtggcctactccaacaattctatcgccatccctaccaacttcacaatcagcgtgaccacagagatcctgccagtgtctatgaccaagacaagcgtggactgcacaatgtatatctgtggcgatagcaccgagtgctccaacctgctgctgcagtacggctccttttgtacccagctgaatagagccctgacaggcatcgccgtggagcaggataagaacacacaggaggtgttcgcccaggtgaagcagatctacaagaccccacccatcaaggactttggcggcttcaacttcagccagatcctgcctgatccaagcaagccctccaagaggtcttttatcgaggacctgctgttcaacaaggtgaccctggccgatgccggcttcatcaagcagtatggagattgcctgggagacatcgcagcccgcgacctgatctgtgcccagaagtttaatggcctgaccgtgctgcctccactgctgacagatgagatgatcgcccagtacacatctgccctgctggccggcaccatcacaagcggatggaccttcggcgcaggagccgccctgcagatcccttttgccatgcagatggcctataggttcaacggcatcggcgtgacccagaatgtgctgtacgagaaccagaagctgatcgccaatcagtttaacagcgccatcggcaagatccaggactctctgtcctctacagccagcgccctgggcaagctgcaggatgtggtgaatcagaacgcccaggccctgaataccctggtgaagcagctgagctccaacttcggcgccatctctagcgtgctgaatgacatcctgagccggctggacccccctgaggcagaggtgcagatcgacaggctgatcacaggccgcctgcagagcctgcagacctacgtgacacagcagctgatcagggcagcagagatcagagcctccgccaatctggccgccaccaagatgagcgagtgcgtgctgggacagtccaagagggtggacttttgtggcaagggctatcacctgatgtctttcccacagagcgcccctcacggcgtggtgtttctgcacgtgacctacgtgccagcccaggagaagaacttcaccacagcaccagccatctgccacgatggaaaggcacactttcctagggagggcgtgttcgtgtctaacggcacccactggtttgtgacacagcgcaatttctacgagccacagatcatcaccacagacaatacattcgtgagcggcaactgtgatgtggtgatcggcatcgtgaacaataccgtgtatgatccactgcagcccgagctggactcctttaaggaggagctggataagtacttcaagaatcacacctctcccgacgtggatctgggcgacatctccggcatcaatgcctctgtggtgaacatccagaaggagatcgaccggctgaacgaggtggccaagaatctgaacgagagcctgatcgatctgcaggagctgggcaagtatgagcagtacatcaagggctctggcagagagaacctgtatttccagggaggaggaggcagcggatacatccctgaggcaccaagggacggacaggcctacgtgcgcaaggatggcgagtgggtgctgctgtccacctttctgggccatcatcaccaccaccaccaccactga

SEQ ID NO: 1351 - DNA, 3846 bp, Artificial Sequence
  Description of Artificial Sequence: Synthetic polynucleotide
atgggcatcctgccaagcccaggaatgcccgccctgctgtctctggtgagcctgctgtccgtgctgctgatgggatgcgtggcagagacaggcacacagtgcgtgaacctgaccacaaggacccagctgccccctgcctataccaattctttcacacggggcgtgtactatcccgacaaggtgtttagaagctccgtgctgcactccacacaggatctgtttctgcctttcttttctaacgtgacctggttccacgccatccacgtgtccggcaccaatggcacaaagcggttcgacaatcccgtgctgccttttaacgatggcgtgtacttcgccagcaccgagaagtccaacatcatcagaggctggatctttggcaccacactggactctaagacacagagcctgctgatcgtgaacaatgccaccaacgtggtgatcaaggtgtgcgagttccagttttgtaatgatccattcctgggcgtgtactatcacaagaacaataagtcctggatggagtctgagtttcgcgtgtattctagcgccaacaattgcacatttgagtacgtgagccagcccttcctgatggacctggagggcaagcagggcaatttcaagaacctgagggagttcgtgtttaagaatatcgatggctacttcaagatctacagcaagcacaccccaatcaacctggtgcgcgacctgccacagggattctccgccctggagccactggtggatctgcccatcggcatcaacatcacccggtttcagacactgctggccctgcacagatcctacctgacaccaggcgactcctctagcggatggaccgcaggagctgccgcctactatgtgggctatctgcagccccggaccttcctgctgaagtacaacgagaatggcaccatcacagacgcagtggattgcgccctggaccccctgtctgagacaaagtgtacactgaagagctttaccgtggagaagggcatctatcagacaagcaatttcagggtgcagcctaccgagtccatcgtgcgctttcccaatatcacaaacctgtgcccttttggcgaggtgttcaacgccaccagattcgccagcgtgtacgcctggaatcggaagagaatctccaactgcgtggccgactattctgtgctgtacaactccgcctctttcagcacctttaagtgctatggcgtgtctcccacaaagctgaatgatctgtgctttaccaacgtgtacgccgatagcttcgtgatcaggggagacgaagtgagacagatcgcaccaggacagacaggaaagatcgcagactacaattataagctgcctgacgatttcaccggctgcgtgatcgcctggaactccaacaatctggattctaaagtgggcggcaactacaattatctgtacaggctgtttcgcaagtccaatctgaagccattcgagcgggacatctccacagagatctaccaggccggctctaccccctgcaatggcgtggagggctttaactgttatttccctctgcagtcttacggcttccagccaacaaacggcgtgggctatcagccctacagagtggtggtgctgtcctttgagctgctgcacgcaccagcaacagtgtgcggcccaaagaagtctaccaatctggtgaagaacaagtgcgtgaacttcaacttcaacggactgaccggcacaggcgtgctgaccgagagcaataagaagttcctgccttttcagcagttcggcagggacatcgcagatcaaacagacgccgtgcgcgaccctcagaccctggagatcctggacatcacaccatgcagcttcggcggcgtgtccgtgatcacaccaggcaccaatacatccaaccaggtggccgtgctgtatcaggacgtgaattgtaccgaggtgcccgtggcaatccacgcagatcagctgacccctacatggcgggtgtactctaccggcagcaacgtgttccagacaagagccggatgcctgatcggagcagagcacgtgaacaatagctatgagtgcgacatccctatcggcgccggcatctgtgccagctaccagacccagacaaactccccatctggagcaggctccgtggccagccagtccatcatcgcctataccatgagcctgggcgccgagaacagcgtggcctactccaacaattctatcgccatccctaccaacttcacaatcagcgtgaccacagagatcctgccagtgtctatgaccaagacaagcgtggactgcacaatgtatatctgtggcgatagcaccgagtgctccaacctgctgctgcagtacggctccttttgtacccagctgaatagagccctgacaggcatcgccgtggagcaggataagaacacacaggaggtgttcgcccaggtgaagcagatctacaagaccccacccatcaaggactttggcggcttcaacttcagccagatcctgcctgatccaagcaagccctccaagaggtcttttatcgaggacctgctgttcaacaaggtgaccctggccgatgccggcttcatcaagcagtatggagattgcctgggagacatcgcagcccgcgacctgatctgtgcccagaagtttaatggcctgaccgtgctgcctccactgctgacagatgagatgatcgcccagtacacatctgccctgctggccggcaccatcacaagcggatggaccttcggcgcaggagccgccctgcagatcccttttgccatgcagatggcctataggttcaacggcatcggcgtgacccagaatgtgctgtacgagaaccagaagctgatcgccaatcagtttaacagcgccatcggcaagatccaggactctctgtcctctacagccagcgccctgggcaagctgcaggatgtggtgaatcagaacgcccaggccctgaataccctggtgaagcagctgagctccaacttcggcgccatctctagcgtgctgaatgacatcctgagccggctggacccccctgaggcagaggtgcagatcgacaggctgatcacaggccgcctgcagagcctgcagacctacgtgacacagcagctgatcagggcagcagagatcagagcctccgccaatctggccgccaccaagatgagcgagtgcgtgctgggacagtccaagagggtggacttttgtggcaagggctatcacctgatgtctttcccacagagcgcccctcacggcgtggtgtttctgcacgtgacctacgtgccagcccaggagaagaacttcaccacagcaccagccatctgccacgatggaaaggcacactttcctagggagggcgtgttcgtgtctaacggcacccactggtttgtgacacagcgcaatttctacgagccacagatcatcaccacagacaatacattcgtgagcggcaactgtgatgtggtgatcggcatcgtgaacaataccgtgtatgatccactgcagcccgagctggactcctttaaggaggagctggataagtacttcaagaatcacacctctcccgacgtggatctgggcgacatctccggcatcaatgcctctgtggtgaacatccagaaggagatcgaccggctgaacgaggtggccaagaatctgaacgagagcctgatcgatctgcaggagctgggcaagtatgagcagtacatcaagggctctggcagagagaacctgtatttccagggaggaggaggcagcggatacatccctgaggcaccaagggacggacaggcctacgtgcgcaaggatggcgagtgggtgctgctgtccacctttctgggccatcatcaccaccaccaccaccactga

SEQ ID NO: 1352 - DNA, 3846 bp, Artificial Sequence
  Description of Artificial Sequence: Synthetic polynucleotide
atgggcatcctgccaagcccaggaatgcccgccctgctgtctctggtgagcctgctgtccgtgctgctgatgggatgcgtggcagagacaggcacacagtgcgtgaacctgaccacaaggacccagctgccccctgcctataccaattctttcacacggggcgtgtactatcccgacaaggtgtttagaagctccgtgctgcactccacacaggatctgtttctgcctttcttttctaacgtgacctggttccacgccatccacgtgtccggcaccaatggcacaaagcggttcgacaatcccgtgctgccttttaacgatggcgtgtacttcgccagcaccgagaagtccaacatcatcagaggctggatctttggcaccacactggactctaagacacagagcctgctgatcgtgaacaatgccaccaacgtggtgatcaaggtgtgcgagttccagttttgtaatgatccattcctgggcgtgtactatcacaagaacaataagtcctggatggagtctgagtttcgcgtgtattctagcgccaacaattgcacatttgagtacgtgagccagcccttcctgatggacctggagggcaagcagggcaatttcaagaacctgagggagttcgtgtttaagaatatcgatggctacttcaagatctacagcaagcacaccccaatcaacctggtgcgcgacctgccacagggattctccgccctggagccactggtggatctgcccatcggcatcaacatcacccggtttcagacactgctggccctgcacagatcctacctgacaccaggcgactcctctagcggatggaccgcaggagctgccgcctactatgtgggctatctgcagccccggaccttcctgctgaagtacaacgagaatggcaccatcacagacgcagtggattgcgccctggaccccctgtctgagacaaagtgtacactgaagagctttaccgtggagaagggcatctatcagacaagcaatttcagggtgcagcctaccgagtccatcgtgcgctttcccaatatcacaaacctgtgcccttttggcgaggtgttcaacgccaccagattcgccagcgtgtacgcctggaatcggaagagaatctccaactgcgtggccgactattctgtgctgtacaactccgcctctttcagcacctttaagtgctatggcgtgtctcccacaaagctgaatgatctgtgctttaccaacgtgtacgccgatagcttcgtgatcaggggagacgaagtgagacagatcgcaccaggacagacaggaaagatcgcagactacaattataagctgcctgacgatttcaccggctgcgtgatcgcctggaactccaacaatctggattctaaagtgggcggcaactacaattatctgtacaggctgtttcgcaagtccaatctgaagccattcgagcgggacatctccacagagatctaccaggccggctctaccccctgcaatggcgtggagggctttaactgttatttccctctgcagtcttacggcttccagccaacaaacggcgtgggctatcagccctacagagtggtggtgctgtcctttgagctgctgcacgcaccagcaacagtgtgcggcccaaagaagtctaccaatctggtgaagaacaagtgcgtgaacttcaacttcaacggactgaccggcacaggcgtgctgaccgagagcaataagaagttcctgccttttcagcagttcggcagggacatcgcagataccacagacgccgtgcgcgaccctcagaccctggagatcctggacatcacaccatgcagcttcggcggcgtgtccgtgatcacaccaggcaccaatacatccaaccaggtggccgtgctgtatcaggacgtgaattgtaccgaggtgcccgtggcaatccacgcagatcagctgacccctacatggcgggtgtactctaccggcagcaacgtgttccagacaagagccggatgcctgatcggagcagagcacgtgaacaatagctatgagtgcgacatccctatcggcgccggcatctgtgccagctaccagacccagacaaactccccatctggagcaggctccgtggccagccagtccatcatcgcctataccatgagcctgggcgccgagaacagcgtggcctactccaacaattctatcgccatccctaccaacttcacaatcagcgtgaccacagagatcctgccagtgtctatgaccaagacaagcgtggactgcacaatgtatatctgtggcgatagcaccgagtgctccaacctgctgctgcagtacggctccttttgtacccagctgaatagagccctgacaggcatcgccgtggagcaggataagaacacacaggaggtgttcgcccaggtgaagcagatctacaagaccccacccatcaaggactttggcggcttcaacttcagccagatcctgcctgatccaagcaagccctccaagaggtcttttatcgaggacctgctgttcaacaaggtgaccctggccgatgccggcttcatcaagcagtatggagattgcctgggagacatcgcagcccgcgacctgatctgtgcccagaagtttaatggcctgaccgtgctgcctccactgctgacagatgagatgatcgcccagtacacatctgccctgctggccggcaccatcacaagcggatggaccttcggcgcaggagccgccctgcagatcccttttgccatgcagatggcctataggttcaacggcatcggcgtgacccagaatgtgctgtacgagaaccagaagatgatcgccaatcagtttaacagcgccatcggcaagatccaggactctctgtcctctacagccagcgccctgggcaagctgcaggatgtggtgaatcagaacgcccaggccctgaataccctggtgaagcagctgagctccaacttcggcgccatctctagcgtgctgaatgacatcctgagccggctggacccccctgaggcagaggtgcagatcgacaggctgatcacaggccgcctgcagagcctgcagacctacgtgacacagcagctgatcagggcagcagagatcagagcctccgccaatctggccgccaccaagatgagcgagtgcgtgctgggacagtccaagagggtggacttttgtggcaagggctatcacctgatgtctttcccacagagcgcccctcacggcgtggtgtttctgcacgtgacctacgtgccagcccaggagaagaacttcaccacagcaccagccatctgccacgatggaaaggcacactttcctagggagggcgtgttcgtgtctaacggcacccactggtttgtgacacagcgcaatttctacgagccacagatcatcaccacagacaatacattcgtgagcggcaactgtgatgtggtgatcggcatcgtgaacaataccgtgtatgatccactgcagcccgagctggactcctttaaggaggagctggataagtacttcaagaatcacacctctcccgacgtggatctgggcgacatctccggcatcaatgcctctgtggtgaacatccagaaggagatcgaccggctgaacgaggtggccaagaatctgaacgagagcctgatcgatctgcaggagctgggcaagtatgagcagtacatcaagggctctggcagagagaacctgtatttccagggaggaggaggcagcggatacatccctgaggcaccaagggacggacaggcctacgtgcgcaaggatggcgagtgggtgctgctgtccacctttctgggccatcatcaccaccaccaccaccactga

SEQ ID NO: 1353 - DNA, 3846 bp, Artificial Sequence
  Description of Artificial Sequence: Synthetic polynucleotide
atgggcatcctgccaagcccaggaatgcccgccctgctgtctctggtgagcctgctgtccgtgctgctgatgggatgcgtggcagagacaggcacacagtgcgtgaacctgaccacaaggacccagctgccccctgcctataccaattctttcacacggggcgtgtactatcccgacaaggtgtttagaagcgatgtgctgcactccacacaggatctgtttctgcctttcttttctaacgtgacctggttccacgccatccacgtgtccggcaccaatggcacaaagcggttcgacaatcccgtgctgccttttaacgatggcgtgtacttcgccagcaccgagaagtccaacatcatcagaggctggatctttggcaccacactggactctaagacacagagcctgctgatcgtgaacaatgccaccaacgtggtgatcaaggtgtgcgagttccagttttgtaatgatccattcctgggcgtgtactatcacaagaacaataagtcctggatggagtctgagtttcgcgtgtattctagcgccaacaattgcacatttgagtacgtgagccagcccttcctgatggacctggagggcaagcagggcaatttcaagaacctgagggagttcgtgtttaagaatatcgatggctacttcaagatctacagcaagcacaccccaatcaacctggtgcgcgacctgccacagggattctccgccctggagccactggtggatctgcccatcggcatcaacatcacccggtttcagacactgctggccctgcacagatcctacctgacaccaggcgactcctctagcggatggaccgcaggagctgccgcctactatgtgggctatctgcagccccggaccttcctgctgaagtacaacgagaatggcaccatcacagacgcagtggattgcgccctggaccccctgtctgagacaaagtgtacactgaagagctttaccgtggagaagggcatctatcagacaagcaatttcagggtgcagcctaccgagtccatcgtgcgctttcccaatatcacaaacctgtgcccttttggcgaggtgttcaacgccaccagattcgccagcgtgtacgcctggaatcggaagagaatctccaactgcgtggccgactattctgtgctgtacaactccgcctctttcagcacctttaagtgctatggcgtgtctcccacaaagctgaatgatctgtgctttaccaacgtgtacgccgatagcttcgtgatcaggggagacgaagtgagacagatcgcaccaggacagacaggaaagatcgcagactacaattataagctgcctgacgatttcaccggctgcgtgatcgcctggaactccaacaatctggattctaaagtgggcggcaactacaattatctgtacaggctgtttcgcaagtccaatctgaagccattcgagcgggacatctccacagagatctaccaggccggctctaccccctgcaatggcgtggagggctttaactgttatttccctctgcagtcttacggcttccagccaacaaacggcgtgggctatcagccctacagagtggtggtgctgtcctttgagctgctgcacgcaccagcaacagtgtgcggcccaaagaagtctaccaatctggtgaagaacaagtgcgtgaacttcaacttcaacggactgaccggcacaggcgtgctgaccgagagcaataagaagttcctgccttttcagcagttcggcagggacatcgcagataccacagacgccgtgcgcgaccctcagaccctggagatcctggacatcacaccatgcagcttcggcggcgtgtccgtgatcacaccaggcaccaatacatccaaccaggtggccgtgctgtatcaggacgtgaattgtaccgaggtgcccgtggcaatccacgcagatcagctgacccctacatggcgggtgtactctaccggcagcaacgtgttccagacaagagccggatgcctgatcggagcagagcacgtgaacaatagctatgagtgcgacatccctatcggcgccggcatctgtgccagctaccagacccagacaaactccccatctggagcaggctccgtggccagccagtccatcatcgcctataccatgagcctgggcgccgagaacagcgtggcctactccaacaattctatcgccatccctaccaacttcacaatcagcgtgaccacagagatcctgccagtgtctatgaccaagacaagcgtggactgcacaatgtatatctgtggcgatagcaccgagtgctccaacctgctgctgcagtacggctccttttgtacccagctgaatagagccctgacaggcatcgccgtggagcaggataagaacacacaggaggtgttcgcccaggtgaagcagatctacaagaccccacccatcaaggactttggcggcttcaacttcagccagatcctgcctgatccaagcaagccctccaagaggtcttttatcgaggacctgctgttcaacaaggtgaccctggccgatgccggcttcatcaagcagtatggagattgcctgggagacatcgcagcccgcgacctgatctgtgcccagaagtttaatggcctgaccgtgctgcctccactgctgacagatgagatgatcgcccagtacacatctgccctgctggccggcaccatcacaagcggatggaccttcggcgcaggagccgccctgcagatcccttttgccatgcagatggcctataggttcaacggcatcggcgtgacccagaatgtgctgtacgagaaccagaagctgatcgccaatcagtttaacagcgccatcggcaagatccaggactctctgtcctctacagccagcgccctgggcaagctgcaggatgtggtgaatcagaacgcccaggccctgaataccctggtgaagcagctgagctccaacttcggcgccatctctagcgtgctgaatgacatcctgagccggctggacccccctgaggcagaggtgcagatcgacaggctgatcacaggccgcctgcagagcctgcagacctacgtgacacagcagctgatcagggcagcagagatcagagcctccgccaatctggccgccaccaagatgagcgagtgcgtgctgggacagtccaagagggtggacttttgtggcaagggctatcacctgatgtctttcccacagagcgcccctcacggcgtggtgtttctgcacgtgacctacgtgccagcccaggagaagaacttcaccacagcaccagccatctgccacgatggaaaggcacactttcctagggagggcgtgttcgtgtctaacggcacccactggtttgtgacacagcgcaatttctacgagccacagatcatcaccacagacaatacattcgtgagcggcaactgtgatgtggtgatcggcatcgtgaacaataccgtgtatgatccactgcagcccgagctggactcctttaaggaggagctggataagtacttcaagaatcacacctctcccgacgtggatctgggcgacatctccggcatcaatgcctctgtggtgaacatccagaaggagatcgaccggctgaacgaggtggccaagaatctgaacgagagcctgatcgatctgcaggagctgggcaagtatgagcagtacatcaagggctctggcagagagaacctgtatttccagggaggaggaggcagcggatacatccctgaggcaccaagggacggacaggcctacgtgcgcaaggatggcgagtgggtgctgctgtccacctttctgggccatcatcaccaccaccaccaccactga

SEQ ID NO: 1354 - DNA, 3846 bp, Artificial Sequence
  Description of Artificial Sequence: Synthetic polynucleotide
atgggcatcctgccaagcccaggaatgcccgccctgctgtctctggtgagcctgctgtccgtgctgctgatgggatgcgtggcagagacaggcacacagtgcgtgaacctgaccacaaggacccagctgccccctgcctataccaattctttcacacggggcgtgtactatcccgacaaggtgtttagaagctccgtgctgcacgggacacaggatctgtttctgcctttcttttctaacgtgacctggttccacgccatccacgtgtccggcaccaatggcacaaagcggttcgacaatcccgtgctgccttttaacgatggcgtgtacttcgccagcaccgagaagtccaacatcatcagaggctggatctttggcaccacactggactctaagacacagagcctgctgatcgtgaacaatgccaccaacgtggtgatcaaggtgtgcgagttccagttttgtaatgatccattcctgggcgtgtactatcacaagaacaataagtcctggatggagtctgagtttcgcgtgtattctagcgccaacaattgcacatttgagtacgtgagccagcccttcctgatggacctggagggcaagcagggcaatttcaagaacctgagggagttcgtgtttaagaatatcgatggctacttcaagatctacagcaagcacaccccaatcaacctggtgcgcgacctgccacagggattctccgccctggagccactggtggatctgcccatcggcatcaacatcacccggtttcagacactgctggccctgcacagatcctacctgacaccaggcgactcctctagcggatggaccgcaggagctgccgcctactatgtgggctatctgcagccccggaccttcctgctgaagtacaacgagaatggcaccatcacagacgcagtggattgcgccctggaccccctgtctgagacaaagtgtacactgaagagctttaccgtggagaagggcatctatcagacaagcaatttcagggtgcagcctaccgagtccatcgtgcgctttcccaatatcacaaacctgtgcccttttggcgaggtgttcaacgccaccagattcgccagcgtgtacgcctggaatcggaagagaatctccaactgcgtggccgactattctgtgctgtacaactccgcctctttcagcacctttaagtgctatggcgtgtctcccacaaagctgaatgatctgtgctttaccaacgtgtacgccgatagcttcgtgatcaggggagacgaagtgagacagatcgcaccaggacagacaggaaagatcgcagactacaattataagctgcctgacgatttcaccggctgcgtgatcgcctggaactccaacaatctggattctaaagtgggcggcaactacaattatctgtacaggctgtttcgcaagtccaatctgaagccattcgagcgggacatctccacagagatctaccaggccggctctaccccctgcaatggcgtggagggctttaactgttatttccctctgcagtcttacggcttccagccaacaaacggcgtgggctatcagccctacagagtggtggtgctgtcctttgagctgctgcacgcaccagcaacagtgtgcggcccaaagaagtctaccaatctggtgaagaacaagtgcgtgaacttcaacttcaacggactgaccggcacaggcgtgctgaccgagagcaataagaagttcctgccttttcagcagttcggcagggacatcgcagataccacagacgccgtgcgcgaccctcagaccctggagatcctggacatcacaccatgcagcttcggcggcgtgtccgtgatcacaccaggcaccaatacatccaaccaggtggccgtgctgtatcaggacgtgaattgtaccgaggtgcccgtggcaatccacgcagatcagctgacccctacatggcgggtgtactctaccggcagcaacgtgttccagacaagagccggatgcctgatcggagcagagcacgtgaacaatagctatgagtgcgacatccctatcggcgccggcatctgtgccagctaccagacccagacaaactccccatctggagcaggctccgtggccagccagtccatcatcgcctataccatgagcctgggcgccgagaacagcgtggcctactccaacaattctatcgccatccctaccaacttcacaatcagcgtgaccacagagatcctgccagtgtctatgaccaagacaagcgtggactgcacaatgtatatctgtggcgatagcaccgagtgctccaacctgctgctgcagtacggctccttttgtacccagctgaatagagccctgacaggcatcgccgtggagcaggataagaacacacaggaggtgttcgcccaggtgaagcagatctacaagaccccacccatcaaggactttggcggcttcaacttcagccagatcctgcctgatccaagcaagccctccaagaggtcttttatcgaggacctgctgttcaacaaggtgaccctggccgatgccggcttcatcaagcagtatggagattgcctgggagacatcgcagcccgcgacctgatctgtgcccagaagtttaatggcctgaccgtgctgcctccactgctgacagatgagatgatcgcccagtacacatctgccctgctggccggcaccatcacaagcggatggaccttcggcgcaggagccgccctgcagatcccttttgccatgcagatggcctataggttcaacggcatcggcgtgacccagaatgtgctgtacgagaaccagaagctgatcgccaatcagtttaacagcgccatcggcaagatccaggactctctgtcctctacagccagcgccctgggcaagctgcaggatgtggtgaatcagaacgcccaggccctgaataccctggtgaagcagctgagctccaacttcggcgccatctctagcgtgctgaatgacatcctgagccggctggacccccctgaggcagaggtgcagatcgacaggctgatcacaggccgcctgcagagcctgcagacctacgtgacacagcagctgatcagggcagcagagatcagagcctccgccaatctggccgccaccaagatgagcgagtgcgtgctgggacagtccaagagggtggacttttgtggcaagggctatcacctgatgtctttcccacagagcgcccctcacggcgtggtgtttctgcacgtgacctacgtgccagcccaggagaagaacttcaccacagcaccagccatctgccacgatggaaaggcacactttcctagggagggcgtgttcgtgtctaacggcacccactggtttgtgacacagcgcaatttctacgagccacagatcatcaccacagacaatacattcgtgagcggcaactgtgatgtggtgatcggcatcgtgaacaataccgtgtatgatccactgcagcccgagctggactcctttaaggaggagctggataagtacttcaagaatcacacctctcccgacgtggatctgggcgacatctccggcatcaatgcctctgtggtgaacatccagaaggagatcgaccggctgaacgaggtggccaagaatctgaacgagagcctgatcgatctgcaggagctgggcaagtatgagcagtacatcaagggctctggcagagagaacctgtatttccagggaggaggaggcagcggatacatccctgaggcaccaagggacggacaggcctacgtgcgcaaggatggcgagtgggtgctgctgtccacctttctgggccatcatcaccaccaccaccaccactga

SEQ ID NO: 1355 - DNA, 3846 bp, Artificial Sequence
  Description of Artificial Sequence: Synthetic polynucleotide
atgggcatcctgccaagcccaggaatgcccgccctgctgtctctggtgagcctgctgtccgtgctgctgatgggatgcgtggcagagacaggcacacagtgcgtgaacctgaccacaaggacccagctgccccctgcctataccaattctttcacacggggcgtgtactatcccgacaaggtgtttagaagctccgtgctgcactccacacaggatctgtttctgcctttcttttctaacgtgacctggttccacgccatccacgtgtccggcaccaatggcacaaagcggttcgacaatcccgtgctgccttttaacgatggcgtgtacttcgccagcaccgagaagtccaacatcatcagaggctggatctttggcaccacactggactctaagacacagagcctgctgatcgtgaacaatgccaccaacgtggtgatcaaggtgtgcgagttccagttttgtaatgatccattcctgggcgtgtactatcacaagaacaataagtcctggatggagtctgagtttcgcgtgtattctagcgccaacaattgcacatttgagtacgtgagccagcccttcctgatggacctggagggcaagcagggcaatttcaagaacctgagggagttcgtgtttaagaatatcgatggctacttcaagatctacagcaagcacaccccaatcaacctggtgcgcgacctgccacagggattctccgccctggagccactggtggatctgcccatcggcatcaacatcacccggtttcagacactgctggccctgcacagatcctacctgacaccaggcgactcctctagcggatggaccgcaggagctgccgcctactatgtgggctatctgcagccccggaccttcctgctgaagtacaacgagaatggcaccatcacagacgcagtggattgcgccctggaccccctgtctgagacaaagtgtacactgaagagctttaccgtggagaagggcatctatcagacaagcaatttcagggtgcagcctaccgagtccatcgtgcgctttcccaatatcacaaacctgtgcccttttggcgaggtgttcaacgccaccagattcgccagcgtgtacgcctggaatcggaagagaatctccaactgcgtggccgactattctgtgctgtacaactccgcctctttcagcacctttaagtgctatggcgtgtctcccacaaagctgaatgatctgtgctttaccaacgtgtacgccgatagcttcgtgatcaggggagacgaagtgagacagatcgcaccaggacagacaggaaagatcgcagactacaattataagctgcctgacgatttcaccggctgcgtgatcgcctggaactccaacaatctggattctaaagtgggcggcaactacaattatctgtacaggctgtttcgcaagtccaatctgaagccattcgagcgggacatctccacagagatctaccaggccggctctaccccctgcaatggcgtggagggctttaactgttatttccctctgcagtcttacggcttccagccaacaaacggcgtgggctatcagccctacagagtggtggtgctgtcctttgagctgctgcacgcaccagcaacagtgtgcggcccaaagaagtctaccaatctggtgaagaacaagtgcgtgaacttcaacttcaacggactgaccggcacaggcgtgctgaccgagagcaataagaagttcctgccttttcagcagttcggcagggacatcgcagataccacagacgccgtgcgcgaccctcagaccctggagatcctggacatcacaccatgcagcttcggcggcgtgtccgtgatcacaccaggcaccaatacatccaaccaggtggccgtgctgtatcaggacgtgaattgtaccgaggtgcccgtggcaatccacgcagatcagctgacccctacatggcgggtgtactctaccggcagcaacgtgttccagacaagagccggatgcctgatcggagcagagcacgtgaacaatagctatgagtgcgacatccctatcggcgccggcatctgtgccagctaccagacccagacaaactccccatctggagcaggctccgtggccagccagtccatcatcgcctataccatgagcctgggcgccgagaacagcgtggcctactccaacaattctatcgccatccctaccaacttcacaatcagcgtgaccacagagatcctgccagtgtctatgaccaagacaagcgtggactgcacaatgtatatctgtggcgatagcaccgagtgctccaacctgctgctgcagtacggctccttttgtacccagctgaatagagccctgacaggcatcgccgtggagcaggataagaacacacaggaggtgttcgcccaggtgaagcagatctacaagaccccacccatcaaggactttggcggcttcaacttcagccagatcctgcctgatccaagcaagccctccaagaggtcttttatcgaggacctgctgttcaacaaggtgaccctggccgatgccggcttcatcaagcagtatggagattgcctgggagacatcgcagcccgcgacctgatctgtgcccagaagtttaatggcctgaccgtgctgcctccactgctgacagatgagatgatcgcccagtacacatctgccctgctggccggcaccatcacaagcggatggaccttcggcgcaggagccgccctgcagatcccttttgccatgcagatggcctataggttcaacggcatcggcgtgacccagaatgtgctgtacgagaaccagaagctgatcgccaatcagtttaacagcgccatcggcaagatccaggactctctgtcctctacagccagcgccctgggcaagctgcaggatgtggtggaacagaacgcccaggccctgaataccctggtgaagcagctgagctccaacttcggcgccatctctagcgtgctgaatgacatcctgagccggctggacccccctgaggcagaggtgcagatcgacaggctgatcacaggccgcctgcagagcctgcagacctacgtgacacagcagctgatcagggcagcagagatcagagcctccgccaatctggccgccaccaagatgagcgagtgcgtgctgggacagtccaagagggtggacttttgtggcaagggctatcacctgatgtctttcccacagagcgcccctcacggcgtggtgtttctgcacgtgacctacgtgccagcccaggagaagaacttcaccacagcaccagccatctgccacgatggaaaggcacactttcctagggagggcgtgttcgtgtctaacggcacccactggtttgtgacacagcgcaatttctacgagccacagatcatcaccacagacaatacattcgtgagcggcaactgtgatgtggtgatcggcatcgtgaacaataccgtgtatgatccactgcagcccgagctggactcctttaaggaggagctggataagtacttcaagaatcacacctctcccgacgtggatctgggcgacatctccggcatcaatgcctctgtggtgaacatccagaaggagatcgaccggctgaacgaggtggccaagaatctgaacgagagcctgatcgatctgcaggagctgggcaagtatgagcagtacatcaagggctctggcagagagaacctgtatttccagggaggaggaggcagcggatacatccctgaggcaccaagggacggacaggcctacgtgcgcaaggatggcgagtgggtgctgctgtccacctttctgggccatcatcaccaccaccaccaccactga

SEQ ID NO: 1356 - DNA, 3846 bp, Artificial Sequence
  Description of Artificial Sequence: Synthetic polynucleotide
atgggcatcctgccaagcccaggaatgcccgccctgctgtctctggtgagcctgctgtccgtgctgctgatgggatgcgtggcagagacaggcacacagtgcgtgaacctgaccacaaggacccagctgccccctgcctataccaattctttcacacggggcgtgtactatcccgacaaggtgtttagaagctccgtgctgcactccacacaggatctgtttctgcctttcttttctaacgtgacctggttccacgccatccacgtgtccggcaccaatggcacaaagcggttcgacaatcccgtgctgccttttaacgatggcgtgtacttcgccagcaccgagaagtccaacatcatcagaggctggatctttggcaccacactggactctaagacacagagcctgctgatcgtgaacaatgccaccaacgtggtgatcaaggtgtgcgagttccagttttgtaatgatccattcctgggcgtgtactatcacaagaacaataagtcctggatggagtctgagtttcgcgtgtattctagcgccaacaattgcacatttgagtacgtgagccagcccttcctgatggacctggagggcaagcagggcaatttcaagaacctgagggagttcgtgtttaagaatatcgatggctacttcaagatctacagcaagcacaccccaatcaacctggtgcgcgacctgccacagggattctccgccctggagccactggtggatctgcccatcggcatcaacatcacccggtttcagacactgctggccctgcacagatcctacctgacaccaggcgactcctctagcggatggaccgcaggagctgccgcctactatgtgggctatctgcagccccggaccttcctgctgaagtacaacgagaatggctatatcacagacgcagtggattgcgccctggaccccctgtctgagacaaagtgtacactgaagagctttaccgtggagaagggcatctatcagacaagcaatttcagggtgcagcctaccgagtccatcgtgcgctttcccaatatcacaaacctgtgcccttttggcgaggtgttcaacgccaccagattcgccagcgtgtacgcctggaatcggaagagaatctccaactgcgtggccgactattctgtgctgtacaactccgcctctttcagcacctttaagtgctatggcgtgtctcccacaaagctgaatgatctgtgctttaccaacgtgtacgccgatagcttcgtgatcaggggagacgaagtgagacagatcgcaccaggacagacaggaaagatcgcagactacaattataagctgcctgacgatttcaccggctgcgtgatcgcctggaactccaacaatctggattctaaagtgggcggcaactacaattatctgtacaggctgtttcgcaagtccaatctgaagccattcgagcgggacatctccacagagatctaccaggccggctctaccccctgcaatggcgtggagggctttaactgttatttccctctgcagtcttacggcttccagccaacaaacggcgtgggctatcagccctacagagtggtggtgctgtcctttgagctgctgcacgcaccagcaacagtgtgcggcccaaagaagtctaccaatctggtgaagaacaagtgcgtgaacttcaacttcaacggactgaccggcacaggcgtgctgaccgagagcaataagaagttcctgccttttcagcagttcggcagggacatcgcagataccacagacgccgtgcgcgaccctcagaccctggagatcctggacatcacaccatgcagcttcggcggcgtgtccgtgatcacaccaggcaccaatacatccaaccaggtggccgtgctgtatcaggacgtgaattgtaccgaggtgcccgtggcaatccacgcagatcagctgacccctacatggcgggtgtactctaccggcagcaacgtgttccagacaagagccggatgcctgatcggagcagagcacgtgaacaatagctatgagtgcgacatccctatcggcgccggcatctgtgccagctaccagacccagacaaactccccatctggagcaggctccgtggccagccagtccatcatcgcctataccatgagcctgggcgccgagaacagcgtggcctactccaacaattctatcgccatccctaccaacttcacaatcagcgtgaccacagagatcctgccagtgtctatgaccaagacaagcgtggactgcacaatgtatatctgtggcgatagcaccgagtgctccaacctgctgctgcagtacggctccttttgtacccagctgaatagagccctgacaggcatcgccgtggagcaggataagaacacacaggaggtgttcgcccaggtgaagcagatctacaagaccccacccatcaaggactttggcggcttcaacttcagccagatcctgcctgatccaagcaagccctccaagaggtcttttatcgaggacctgctgttcaacaaggtgaccctggccgatgccggcttcatcaagcagtatggagattgcctgggagacatcgcagcccgcgacctgatctgtgcccagaagtttaatggcctgaccgtgctgcctccactgctgacagatgagatgatcgcccagtacacatctgccctgctggccggcaccatcacaagcggatggaccttcggcgcaggagccgccctgcagatcccttttgccatgcagatggcctataggttcaacggcatcggcgtgacccagaatgtgctgtacgagaaccagaagctgatcgccaatcagtttaacagcgccatcggcaagatccaggactctctgtcctctacagccagcgccctgggcaagctgcaggatgtggtgaatcagaacgcccaggccctgaataccctggtgaagcagctgagctccaacttcggcgccatctctagcgtgctgaatgacatcctgagccggctggacccccctgaggcagaggtgcagatcgacaggctgatcacaggccgcctgcagagcctgcagacctacgtgacacagcagctgatcagggcagcagagatcagagcctccgccaatctggccgccaccaagatgagcgagtgcgtgctgggacagtccaagagggtggacttttgtggcaagggctatcacctgatgtctttcccacagagcgcccctcacggcgtggtgtttctgcacgtgacctacgtgccagcccaggagaagaacttcaccacagcaccagccatctgccacgatggaaaggcacactttcctagggagggcgtgttcgtgtctaacggcacccactggtttgtgacacagcgcaatttctacgagccacagatcatcaccacagacaatacattcgtgagcggcaactgtgatgtggtgatcggcatcgtgaacaataccgtgtatgatccactgcagcccgagctggactcctttaaggaggagctggataagtacttcaagaatcacacctctcccgacgtggatctgggcgacatctccggcatcaatgcctctgtggtgaacatccagaaggagatcgaccggctgaacgaggtggccaagaatctgaacgagagcctgatcgatctgcaggagctgggcaagtatgagcagtacatcaagggctctggcagagagaacctgtatttccagggaggaggaggcagcggatacatccctgaggcaccaagggacggacaggcctacgtgcgcaaggatggcgagtgggtgctgctgtccacctttctgggccatcatcaccaccaccaccaccactga

SEQ ID NO: 1357 - DNA, 3846 bp, Artificial Sequence
  Description of Artificial Sequence: Synthetic polynucleotide
atgggcatcctgccaagcccaggaatgcccgccctgctgtctctggtgagcctgctgtccgtgctgctgatgggatgcgtggcagagacaggcacacagtgcgtgaacctgaccacaaggacccagctgccccctgcctataccaattctttcacacggggcgtgtactatcccgacaaggtgtttagaagcaacgtgctgcactccacacaggatctgtttctgcctttcttttctaacgtgacctggttccacgccatccacgtgtccggcaccaatggcacaaagcggttcgacaatcccgtgctgccttttaacgatggcgtgtacttcgccagcaccgagaagtccaacatcatcagaggctggatctttggcaccacactggactctaagacacagagcctgctgatcgtgaacaatgccaccaacgtggtgatcaaggtgtgcgagttccagttttgtaatgatccattcctgggcgtgtactatcacaagaacaataagtcctggatggagtctgagtttcgcgtgtattctagcgccaacaattgcacatttgagtacgtgagccagcccttcctgatggacctggagggcaagcagggcaatttcaagaacctgagggagttcgtgtttaagaatatcgatggctacttcaagatctacagcaagcacaccccaatcaacctggtgcgcgacctgccacagggattctccgccctggagccactggtggatctgcccatcggcatcaacatcacccggtttcagacactgctggccctgcacagatcctacctgacaccaggcgactcctctagcggatggaccgcaggagctgccgcctactatgtgggctatctgcagccccggaccttcctgctgaagtacaacgagaatggcaccatcacagacgcagtggattgcgccctggaccccctgtctgagacaaagtgtacactgaagagctttaccgtggagaagggcatctatcagacaagcaatttcagggtgcagcctaccgagtccatcgtgcgctttcccaatatcacaaacctgtgcccttttggcgaggtgttcaacgccaccagattcgccagcgtgtacgcctggaatcggaagagaatctccaactgcgtggccgactattctgtgctgtacaactccgcctctttcagcacctttaagtgctatggcgtgtctcccacaaagctgaatgatctgtgctttaccaacgtgtacgccgatagcttcgtgatcaggggagacgaagtgagacagatcgcaccaggacagacaggaaagatcgcagactacaattataagctgcctgacgatttcaccggctgcgtgatcgcctggaactccaacaatctggattctaaagtgggcggcaactacaattatctgtacaggctgtttcgcaagtccaatctgaagccattcgagcgggacatctccacagagatctaccaggccggctctaccccctgcaatggcgtggagggctttaactgttatttccctctgcagtcttacggcttccagccaacaaacggcgtgggctatcagccctacagagtggtggtgctgtcctttgagctgctgcacgcaccagcaacagtgtgcggcccaaagaagtctaccaatctggtgaagaacaagtgcgtgaacttcaacttcaacggactgaccggcacaggcgtgctgaccgagagcaataagaagttcctgccttttcagcagttcggcagggacatcgcagataccacagacgccgtgcgcgaccctcagaccctggagatcctggacatcacaccatgcagcttcggcggcgtgtccgtgatcacaccaggcaccaatacatccaaccaggtggccgtgctgtatcaggacgtgaattgtaccgaggtgcccgtggcaatccacgcagatcagctgacccctacatggcgggtgtactctaccggcagcaacgtgttccagacaagagccggatgcctgatcggagcagagcacgtgaacaatagctatgagtgcgacatccctatcggcgccggcatctgtgccagctaccagacccagacaaactccccatctggagcaggctccgtggccagccagtccatcatcgcctataccatgagcctgggcgccgagaacagcgtggcctactccaacaattctatcgccatccctaccaacttcacaatcagcgtgaccacagagatcctgccagtgtctatgaccaagacaagcgtggactgcacaatgtatatctgtggcgatagcaccgagtgctccaacctgctgctgcagtacggctccttttgtacccagctgaatagagccctgacaggcatcgccgtggagcaggataagaacacacaggaggtgttcgcccaggtgaagcagatctacaagaccccacccatcaaggactttggcggcttcaacttcagccagatcctgcctgatccaagcaagccctccaagaggtcttttatcgaggacctgctgttcaacaaggtgaccctggccgatgccggcttcatcaagcagtatggagattgcctgggagacatcgcagcccgcgacctgatctgtgcccagaagtttaatggcctgaccgtgctgcctccactgctgacagatgagatgatcgcccagtacacatctgccctgctggccggcaccatcacaagcggatggaccttcggcgcaggagccgccctgcagatcccttttgccatgcagatggcctataggttcaacggcatcggcgtgacccagaatgtgctgtacgagaaccagaagctgatcgccaatcagtttaacagcgccatcggcaagatccaggactctctgtcctctacagccagcgccctgggcaagctgcaggatgtggtgaatcagaacgcccaggccctgaataccctggtgaagcagctgagctccaacttcggcgccatctctagcgtgctgaatgacatcctgagccggctggacccccctgaggcagaggtgcagatcgacaggctgatcacaggccgcctgcagagcctgcagacctacgtgacacagcagctgatcagggcagcagagatcagagcctccgccaatctggccgccaccaagatgagcgagtgcgtgctgggacagtccaagagggtggacttttgtggcaagggctatcacctgatgtctttcccacagagcgcccctcacggcgtggtgtttctgcacgtgacctacgtgccagcccaggagaagaacttcaccacagcaccagccatctgccacgatggaaaggcacactttcctagggagggcgtgttcgtgtctaacggcacccactggtttgtgacacagcgcaatttctacgagccacagatcatcaccacagacaatacattcgtgagcggcaactgtgatgtggtgatcggcatcgtgaacaataccgtgtatgatccactgcagcccgagctggactcctttaaggaggagctggataagtacttcaagaatcacacctctcccgacgtggatctgggcgacatctccggcatcaatgcctctgtggtgaacatccagaaggagatcgaccggctgaacgaggtggccaagaatctgaacgagagcctgatcgatctgcaggagctgggcaagtatgagcagtacatcaagggctctggcagagagaacctgtatttccagggaggaggaggcagcggatacatccctgaggcaccaagggacggacaggcctacgtgcgcaaggatggcgagtgggtgctgctgtccacctttctgggccatcatcaccaccaccaccaccactga

SEQ ID NO: 1358 - DNA, 3846 bp, Artificial Sequence
  Description of Artificial Sequence: Synthetic polynucleotide
atgggcatcctgccaagcccaggaatgcccgccctgctgtctctggtgagcctgctgtccgtgctgctgatgggatgcgtggcagagacaggcacacagtgcgtgaacctgaccacaaggacccagctgccccctgcctataccaattctttcacacggggcgtgtactatcccgacaaggtgtttagaagctccgtgctgcactccacacaggatctgtttctgcctttcttttctaacgtgacctggttccacgccatccacgtgtccggcaccaatggcacaaagcggttcgacaatcccgtgctgccttttaacgatggcgtgtacttcgccagcaccgagaagtccaacatcatcagaggctggatctttggcaccacactggactctaagacacagagcctgctgatcgtgaacaatgccaccaacgtggtgatcaaggtgtgcgagttccagttttgtaatgatccattcctgggcgtgtactatcacaagaacaataagtcctggatggagtctgagtttcgcgtgtattctagcgccaacaattgcacatttgagtacgtgagccagcccttcctgatggacctggagggcaagcagggcaatttcaagaacctgagggagttcgtgtttaagaatatcgatggctacttcaagatctacagcaagcacaccccaatcaacctggtgcgcgacctgccacagggattctccgccctggagccactggtggatctgcccatcggcatcaacatcacccggtttcagacactgctggccctgcacagatcctacctgacaccaggcgactcctctagcggatggaccgcaggagctgccgcctactatgtgggctatctgcagccccggaccttcctgctgaagtacaacgagaatggcaccatcacagacgcagtggattgcgccctggaccccctgtctgagacaaagtgtacactgaagagctttaccgtggagaagggcatctatcagacaagcaatttcagggtgcagcctaccgagtccatcgtgcgctttcccaatatcacaaacctgtgcccttttggcgaggtgttcaacgccaccagattcgccagcgtgtacgcctggaatcggaagagaatctccaactgcgtggccgactattctgtgctgtacaactccgcctctttcagcacctttaagtgctatggcgtgtctcccacaaagctgaatgatctgtgctttaccaacgtgtacgccgatagcttcgtgatcaggggagacgaagtgagacagatcgcaccaggacagacaggaaagatcgcagactacaattataagctgcctgacgatttcaccggctgcgtgatcgcctggaactccaacaatctggattctaaagtgggcggcaactacaattatctgtacaggctgtttcgcaagtccaatctgaagccattcgagcgggacatctccacagagatctaccaggccggctctaccccctgcaatggcgtggagggctttaactgttatttccctctgcagtcttacggcttccagccaacaaacggcgtgggctatcagccctacagagtggtggtgctgtcctttgagctgctgcacgcaccagcaacagtgtgcggcccaaagaagtctaccaatctggtgaagaacaagtgcgtgaacttcaacttcaacggactgaccggcacaggcgtgctgaccgacagcaataagaagttcctgccttttcagcagttcggcagggacatctcagataccacagacgccgtgcgcgaccctcagaccctggagatcctggacatcacaccatgcagcttcggcggcgtgtccgtgatcacaccaggcaccaatacatccaaccaggtggccgtgctgtatcaggacgtgaattgtaccgaggtgcccgtggcaatccacgcagatcagctgacccctacatggcgggtgtactctaccggcagcaacgtgttccagacacaagccggatgcctgatcggagcagagcacgtgaacaatagctatgagtgcgacatccctatcggcgccggcatctgtgccagctaccagacccagacaaactccccatctggagcaggctccgtggccagccagtccatcatcgcctataccatgagcctgggcgccgagaacagcgtggcctactccaacaattctatcgccatccctaccaacttcacaatcagcgtgaccacagagatcctgccagtgtctatgaccaagacaagcgtggactgcacaatgtatatctgtggcgatagcaccgagtgctccaacctgctgctgcagtacggctccttttgtacccagctgaatagagccctgacaggcatcgccgtggagcaggataagaacacacaggaggtgttcgcccaggtgaagcagatctacaagaccccacccatcaaggactttggcggcttcaacttcagccagatcctgcctgatccaagcaagccctccaagaggtcttttatcgaggacctgctgttcaacaaggtgaccctggccgatgccggcttcatcaagcagtatggagattgcctgggagacatcgcagcccgcgacctgatctgtgcccagaagtttaatggcctgaccgtgctgcctccactgctgacagatgagatgatcgcccagtacacatctgccctgctggccggcaccatcacaagcggatggaccttcggcgcaggagccgccctgcagatcccttttgccatgcagatggcctataggttcaacggcatcggcgtgacccagaatgtgctgtacgagaaccagaagctgatcgccaatcagtttaacagcgccatcggcaagatccaggactctctgtcctctacagccagcgccctgggcaagctgcaggatgtggtgaatcagaacgcccaggccctgaataccctggtgaagcagctgagctccaacttcggcgccatctctagcgtgctgaatgacatcctgagccggctggacccccctgaggcagaggtgcagatcgacaggctgatcacaggccgcctgcagagcctgcagacctacgtgacacagcagctgatcagggcagcagagatcagagcctccgccaatctggccgccaccaagatgagcgagtgcgtgctgggacagtccaagagggtggacttttgtggcaagggctatcacctgatgtctttcccacagagcgcccctcacggcgtggtgtttctgcacgtgacctacgtgccagcccaggagaagaacttcaccacagcaccagccatctgccacgatggaaaggcacactttcctagggagggcgtgttcgtgtctaacggcacccactggtttgtgacacagcgcaatttctacgagccacagatcatcaccacagacaatacattcgtgagcggcaactgtgatgtggtgatcggcatcgtgaacaataccgtgtatgatccactgcagcccgagctggactcctttaaggaggagctggataagtacttcaagaatcacacctctcccgacgtggatctgggcgacatctccggcatcaatgcctctgtggtgaacatccagaaggagatcgaccggctgaacgaggtggccaagaatctgaacgagagcctgatcgatctgcaggagctgggcaagtatgagcagtacatcaagggctctggcagagagaacctgtatttccagggaggaggaggcagcggatacatccctgaggcaccaagggacggacaggcctacgtgcgcaaggatggcgagtgggtgctgctgtccacctttctgggccatcatcaccaccaccaccaccactga

SEQ ID NO: 1359 - DNA, 3846 bp, Artificial Sequence
  Description of Artificial Sequence: Synthetic polynucleotide
atgggcatcctgccaagcccaggaatgcccgccctgctgtctctggtgagcctgctgtccgtgctgctgatgggatgcgtggcagagacaggcacacagtgcgtgaacctgaccacaaggacccagctgccccctgcctataccaattctttcacacggggcgtgtactatcccgacaaggtgtttagaagctccgtgctgcactccacacaggatctgtttctgcctttcttttctaacgtgacctggttccacgccatccacgtgtccggcaccaatggcacaaagcggttcgacaatcccgtgctgccttttaacgatggcgtgtacttcgccagcaccgagaagtccaacatcatcagaggctggatctttggcaccacactggactctaagacacagagcctgctgatcgtgaacaatgccaccaacgtggtgatcaaggtgtgcgagttccagttttgtaatgatccattcctgggcgtgtactatcacaagaacaataagtcctggatggagtctgagtttcgcgtgtattctagcgccaacaattgcacatttgagtacgtgagccagcccttcctgatggacctggagggcaagcagggcaatttcaagaacctgagggagttcgtgtttaagaatatcgatggctacttcaagatctacagcaagcacaccccaatcaacctggtgcgcgacctgccacagggattctccgccctggagccactggtggatctgcccatcggcatcaacatcacccggtttcagacactgctggccctgcacagatcctacctgacaccaggcgactcctctagcggatggaccgcaggagctgccgcctactatgtgggctatctgcagccccggaccttcctgctgaagtacaacgagaatggcaccatcacagacgcagtggattgcgccctggaccccctgtctgagacaaagtgtacactgaagagctttaccgtggagaagggcatctatcagacaagcaatttcagggtgcagcctaccgagtccatcgtgcgctttcccaatatcacaaacctgtgcccttttggcgaggtgttcaacgccaccagattcgccagcgtgtacgcctggaatcggaagagaatctccaactgcgtggccgactattctgtgctgtacaactccgcctctttcagcacctttaagtgctatggcgtgtctcccacaaagctgaatgatctgtgctttaccaacgtgtacgccgatagcttcgtgatcaggggagacgaagtgagacagatcgcaccaggacagacaggaaagatcgcagactacaattataagctgcctgacgatttcaccggctgcgtgatcgcctggaactccaacaatctggattctaaagtgggcggcaactacaattatctgtacaggctgtttcgcaagtccaatctgaagccattcgagcgggacatctccacagagatctaccaggccggctctaccccctgcaatggcgtggagggctttaactgttatttccctctgcagtcttacggcttccagccaacaaacggcgtgggctatcagccctacagagtggtggtgctgtcctttgagctgctgcacgcaccagcaacagtgtgcggcccaaagaagtctaccaatctggtgaagaacgtctgcgtgaacttcaacttcaacggactgaccggcacaggcgtgctgaccgagagcaataagaagttcctgccttttcagcagttcggcagggacatcgcagataccacagacgccgtgcgcgaccctcagaccctggagatcctggacatcacaccatgcagcttcggcggcgtgtccgtgatcacaccaggcaccaatacatccaaccaggtggccgtgctgtatcaggacgtgaattgtaccgaggtgcccgtggcaatccacgcagatcagctgacccctacatggcgggtgtactctaccggcagcaacgtgttccagacaagagccggatgcctgatcggagcagagcacgtgaacaatagctatgagtgcgacatccctatcggcgccggcatctgtgccagctaccagacccagacaaactccccatctggagcaggctccgtggccagccagtccatcatcgcctataccatgagcctgggcgccgagaacagcgtggcctactccaacaattctatcgccatccctaccaacttcacaatcagcgtgaccacagagatcctgccagtgtctatgaccaagacaagcgtggactgcacaatgtatatctgtggcgatagcaccgagtgctccaacctgctgctgcagtacggctccttttgtacccagctgaatagagccctgacaggcatcgccgtggagcaggataagaacacacaggaggtgttcgcccaggtgaagcagatctacaagaccccacccatcaaggactttggcggcttcaacttcagccagatcctgcctgatccaagcaagccctccaagaggtcttttatcgaggacctgctgttcaacaaggtgaccctggccgatgccggcttcatcaagcagtatggagattgcctgggagacatcgcagcccgcgacctgatctgtgcccagaagtttaatggcctgaccgtgctgcctccactgctgacagatgagatgatcgcccagtacacatctgccctgctggccggcaccatcacaagcggatggaccttcggcgcaggagccgccctgcagatcccttttgccatgcagatggcctataggttcaacggcatcggcgtgacccagaatgtgctgtacgagaaccagaagctgatcgccaatcagtttaacagcgccatcggcaagatccaggactctctgtcctctacagccagcgccctgggcaagctgcaggatgtggtgaatcagaacgcccaggccctgaataccctggtgaagcagctgagctccaacttcggcgccatctctagcgtgctgaatgacatcctgagccggctggacccccctgaggcagaggtgcagatcgacaggctgatcacaggccgcctgcagagcctgcagacctacgtgacacagcagctgatcagggcagcagagatcagagcctccgccaatctggccgccaccaagatgagcgagtgcgtgctgggacagtccaagagggtggacttttgtggcaagggctatcacctgatgtctttcccacagagcgcccctcacggcgtggtgtttctgcacgtgacctacgtgccagcccaggagaagaacttcaccacagcaccagccatctgccacgatggaaaggcacactttcctagggagggcgtgttcgtgtctaacggcacccactggtttgtgacacagcgcaatttctacgagccacagatcatcaccacagacaatacattcgtgagcggcaactgtgatgtggtgatcggcatcgtgaacaataccgtgtatgatccactgcagcccgagctggactcctttaaggaggagctggataagtacttcaagaatcacacctctcccgacgtggatctgggcgacatctccggcatcaatgcctctgtggtgaacatccagaaggagatcgaccggctgaacgaggtggccaagaatctgaacgagagcctgatcgatctgcaggagctgggcaagtatgagcagtacatcaagggctctggcagagagaacctgtatttccagggaggaggaggcagcggatacatccctgaggcaccaagggacggacaggcctacgtgcgcaaggatggcgagtgggtgctgctgtccacctttctgggccatcatcaccaccaccaccaccactga

SEQ ID NO: 1360 - DNA, 3846 bp, Artificial Sequence
  Description of Artificial Sequence: Synthetic polynucleotide
atgggcatcctgccaagcccaggaatgcccgccctgctgtctctggtgagcctgctgtccgtgctgctgatgggatgcgtggcagagacaggcacacagtgcgtgaacctgaccacaaggacccagctgccccctgcctataccaattctttcacacggggcgtgtactatcccgacaaggtgtttagaagctccgtgctgcactccacacaggatctgtttctgcctttcttttctaacgtgacctggttccacgccatccacgtgtccggcaccaatggcacaaagcggttcgacaatcccgtgctgccttttaacgatggcgtgtacttcgccagcaccgagaagtccaacatcatcagaggctggatctttggcaccacactggactctaagacacagagcctgctgatcgtgaacaatgccaccaacgtggtgatcaaggtgtgcgagttccagttttgtaatgatccattcctgggcgtgtactatcacaagaacaataagtcctggatggagtctgagtttcgcgtgtattctagcgccaacaattgcacatttgagtacgtgagccagcccttcctgatggacctggagggcaagcagggcaatttcaagaacctgagggagttcgtgtttaagaatatcgatggctacttcaagatctacagcaagcacaccccaatcaacctggtgcgcgacctgccacagggattctccgccctggagccactggtggatctgcccatcggcatcaacatcacccggtttcagacactgctggccctgcacagatcctacctgacaccaggcgactcctctagcggatggaccgcaggagctgccgcctactatgtgggctatctgcagccccggaccttcatgctgaagtacaacgagaatggcaccatcacagacgcagtggattgcgccctggaccccctgtctgagacaaagtgtacactgaagagctttaccgtggagaagggcatctatcagacaagcaatttcagggtgcagcctaccgagtccatcgtgcgctttcccaatatcacaaacctgtgcccttttggcgaggtgttcaacgccaccagattcgccagcgtgtacgcctggaatcggaagagaatctccaactgcgtggccgactattctgtgctgtacaactccgcctctttcagcacctttaagtgctatggcgtgtctcccacaaagctgaatgatctgtgctttaccaacgtgtacgccgatagcttcgtgatcaggggagacgaagtgagacagatcgcaccaggacagacaggaaagatcgcagactacaattataagctgcctgacgatttcaccggctgcgtgatcgcctggaactccaacaatctggattctaaagtgggcggcaactacaattatctgtacaggctgtttcgcaagtccaatctgaagccattcgagcgggacatctccacagagatctaccaggccggctctaccccctgcaatggcgtggagggctttaactgttatttccctctgcagtcttacggcttccagccaacaaacggcgtgggctatcagccctacagagtggtggtgctgtcctttgagctgctgcacgcaccagcaacagtgtgcggcccaaagaagtctaccaatctggtgaagaacaagtgcgtgaacttcaacttcaacggactgaccggcacaggcgtgctgaccgagagcaataagaagttcctgccttttcagcagttcggcagggacatcgcagataccacagacgccgtgcgcgaccctcagaccctggagatcctggacatcacaccatgcagcttcggcggcgtgtccgtgatcacaccaggcaccaatacatccaaccaggtggccgtgctgtatcaggacgtgaattgtaccgaggtgcccgtggcaatccacgcagatcagctgacccctacatggcgggtgtactctaccggcagcaacgtgttccagacaagagccggatgcctgatcggagcagagcacgtgaacaatagctatgagtgcgacatccctatcggcgccggcatctgtgccagctaccagacccagacaaactccccatctggagcaggctccgtggccagccagtccatcatcgcctataccatgagcctgggcgccgagaacagcgtggcctactccaacaattctatcgccatccctaccaacttcacaatcagcgtgaccacagagatcctgccagtgtctatgaccaagacaagcgtggactgcacaatgtatatctgtggcgatagcaccgagtgctccaacctgctgctgcagtacggctccttttgtacccagctgaatagagccctgacaggcatcgccgtggagcaggataagaacacacaggaggtgttcgcccaggtgaagcagatctacaagaccccacccatcaaggactttggcggcttcaacttcagccagatcctgcctgatccaagcaagccctccaagaggtcttttatcgaggacctgctgttcaacaaggtgaccctggccgatgccggcttcatcaagcagtatggagattgcctgggagacatcgcagcccgcgacctgatctgtgcccagaagtttaatggcctgaccgtgctgcctccactgctgacagatgagatgatcgcccagtacacatctgccctgctggccggcaccatcacaagcggatggaccttcggcgcaggagccgccctgcagatcccttttgccatgcagatggcctataggttcaacggcatcggcgtgacccagaatgtgctgtacgagaaccagaagctgatcgccaatcagtttaacagcgccatcggcaagatccaggactctctgtcctctacagccagcgccctgggcaagctgcaggatgtggtgaatcagaacgcccaggccctgaataccctggtgaagcagctgagctccaacttcggcgccatctctagcgtgctgaatgacatcctgagccggctggacccccctgaggcagaggtgcagatcgacaggctgatcacaggccgcctgcagagcctgcagacctacgtgacacagcagctgatcagggcagcagagatcagagcctccgccaatctggccgccaccaagatgagcgagtgcgtgctgggacagtccaagagggtggacttttgtggcaagggctatcacctgatgtctttcccacagagcgcccctcacggcgtggtgtttctgcacgtgacctacgtgccagcccaggagaagaacttcaccacagcaccagccatctgccacgatggaaaggcacactttcctagggagggcgtgttcgtgtctaacggcacccactggtttgtgacacagcgcaatttctacgagccacagatcatcaccacagacaatacattcgtgagcggcaactgtgatgtggtgatcggcatcgtgaacaataccgtgtatgatccactgcagcccgagctggactcctttaaggaggagctggataagtacttcaagaatcacacctctcccgacgtggatctgggcgacatctccggcatcaatgcctctgtggtgaacatccagaaggagatcgaccggctgaacgaggtggccaagaatctgaacgagagcctgatcgatctgcaggagctgggcaagtatgagcagtacatcaagggctctggcagagagaacctgtatttccagggaggaggaggcagcggatacatccctgaggcaccaagggacggacaggcctacgtgcgcaaggatggcgagtgggtgctgctgtccacctttctgggccatcatcaccaccaccaccaccactga

SEQ ID NO: 1361 - DNA, 3846 bp, Artificial Sequence
  Description of Artificial Sequence: Synthetic polynucleotide
atgggcatcctgccaagcccaggaatgcccgccctgctgtctctggtgagcctgctgtccgtgctgctgatgggatgcgtggcagagacaggcacacagtgcgtgaacctgaccacaaggacccagctgccccctgcctataccaattctttcacacggggcgtgtactatcccgacaaggtgtttagaagctccgtgctgcactccacacaggatctgtttctgcctttcttttctaacgtgacctggttccacgccatccacgtgtccggcaccaatggcacaaagcggttcgacaatcccgtgctgccttttaacgatggcgtgtacttcgccagcaccgagaagtccaacatcatcagaggctggatctttggcaccacactggactctaagacacagagcctgctgatcgtgaacaatgccaccaacgtggtgatcaaggtgtgcgagttccagttttgtaatgatccattcctgggcgtgtactatcacaagaacaataagtcctggatggagtctgagtttcgcgtgtattctagcgccaacaattgcacatttgagtacgtgagccagcccttcctgatggacctggagggcaagcagggcaatttcaagaacctgagggagttcgtgtttaagaatatcgatggctacttcaagatctacagcaagcacaccccaatcaacctggtgcgcgacctgccacagggattctccgccctggagccactggtggatctgcccatcggcatcaacatcacccggtttcagacactgctggccctgcacagatcctacctgacaccaggcgactcctctagcggatggaccgcaggagctgccgcctactatgtgggctatctgcagccccggaccttcctgctgaagtacaacgagaatggcaccatcacagacgcagtggattgcgccctggaccccctgtctgagacaaagtgtacactgaagagctttaccgtggagaagggcatctatcagacaagcaatttcagggtgcagcctaccgagtccatcgtgcgctttcccaatatcacaaacctgtgcccttttggcgaggtgttcaacgccaccagattcgccagcgtgtacgcctggaatcggaagagaatctccaactgcgtggccgactattctgtgctgtacaactccgcctctttcagcacctttaagtgctatggcgtgtctcccacaaagctgaatgatctgtgctttaccaacgtgtacgccgatagcttcgtgatcaggggagacgaagtgagacagatcgcaccaggacagacaggaaagatcgcagactacaattataagctgcctgacgatttcaccggctgcgtgatcgcctggaactccaacaatctggattctaaagtgggcggcaactacaattatctgtacaggctgtttcgcaagtccaatctgaagccattcgagcgggacatctccacagagatctaccaggccggctctaccccctgcaatggcgtggagggctttaactgttatttccctctgcagtcttacggcttccagccaacaaacggcgtgggctatcagccctacagagtggtggtgctgtcctttgagctgctgcacgcaccagcaacagtgtgcggcccaaagaagtctaccaatctggtgaagaacaagtgcgtgaacttcaacttcaacggactgaccggcacaggcgtgctgaccgagagcaataagaagttcctgccttttcagcagttcggcagggacatcgcagataccacagacgccgtgcgcgaccctcagaccctggagatcctggacatcacaccatgcagcttcggcggcgtgtccgtgatcacaccaggcaccaatacatccaaccaggtggccgtgctgtatcaggacgtgaattgtaccgaggtgcccgtggcaatccacgcagatcagctgacccctacatggcgggtgtactctaccggcagcaacgtgttccagacaagagccggatgcctgatcggagcagagcacgtgaacaatagctatgagtgcgacatccctatcggcgccggcatctgtgccagctaccagacccagacaaactccccatctggagcaggctccgtggccagccagtccatcatcgcctataccatgagcctgggcgccgagaacagcgtggcctactccaacaattctatcgccatccctaccaacttcacaatcagcgtgaccacagagatcctgccagtgtctatgaccaagacaagcgtggactgcacaatgtatatctgtggcgatagcaccgagtgctccaacctgctgctgcagtacggctccttttgtacccagctgaatagagccctgacaggcatcgccgtggagcaggataagaacacacaggaggtgttcgcccaggtgaagcagatctacaagaccccacccatcaaggactttggcggcttcaacttcagccagatcctgcctgatccaagcaagccctccaagaggtcttttatcgaggacctgctgttcaacaaggtgaccctggccgatgccggcttcatcaagcagtatggagattgcctgggagacatcgcagcccgcgacctgatctgtgcccagaagtttaatggcctgaccgtgctgcctccactgctgacagatgagatgatcgcccagtacacatctgccctgctggccggcaccatcacaagcggatggaccttcggcgcaggagccgccctgcagatcccttttgccatgcagatggcctataggttcaacggcatcggcgtgacccagaatgtgctgtacgagaaccagaagctgatcgccaatcagtttaacagcgccatcggcaagatccaggactctctgtcctctacagccagcgccctgggcaagctgcaggatgtggtgaatcagcaagcccaggccctgaataccctggtgaagcagctgagctccaacttcggcgccatctctagcgtgctgaatgacatcctgagccggctggacccccctgaggcagaggtgcagatcgacaggctgatcacaggccgcctgcagagcctgcagacctacgtgacacagcagctgatcagggcagcagagatcagagcctccgccaatctggccgccaccaagatgagcgagtgcgtgctgggacagtccaagagggtggacttttgtggcaagggctatcacctgatgtctttcccacagagcgcccctcacggcgtggtgtttctgcacgtgacctacgtgccagcccaggagaagaacttcaccacagcaccagccatctgccacgatggaaaggcacactttcctagggagggcgtgttcgtgtctaacggcacccactggtttgtgacacagcgcaatttctacgagccacagatcatcaccacagacaatacattcgtgagcggcaactgtgatgtggtgatcggcatcgtgaacaataccgtgtatgatccactgcagcccgagctggactcctttaaggaggagctggataagtacttcaagaatcacacctctcccgacgtggatctgggcgacatctccggcatcaatgcctctgtggtgaacatccagaaggagatcgaccggctgaacgaggtggccaagaatctgaacgagagcctgatcgatctgcaggagctgggcaagtatgagcagtacatcaagggctctggcagagagaacctgtatttccagggaggaggaggcagcggatacatccctgaggcaccaagggacggacaggcctacgtgcgcaaggatggcgagtgggtgctgctgtccacctttctgggccatcatcaccaccaccaccaccactga

SEQ ID NO: 1362 - DNA, 3846 bp, Artificial Sequence
  Description of Artificial Sequence: Synthetic polynucleotide
atgggcatcctgccaagcccaggaatgcccgccctgctgtctctggtgagcctgctgtccgtgctgctgatgggatgcgtggcagagacaggcacacagtgcgtgaacctgaccacaaggacccagctgccccctgcctataccaattctttcacacggggcgtgtactatcccgacaaggtgtttagaagctccgtgctgcacatgacacaggatctgtttctgcctttcttttctaacgtgacctggttccacgccatccacgtgtccggcaccaatggcacaaagcggttcgacaatcccgtgctgccttttaacgatggcgtgtacttcgccagcaccgagaagtccaacatcatcagaggctggatctttggcaccacactggactctaagacacagagcctgctgatcgtgaacaatgccaccaacgtggtgatcaaggtgtgcgagttccagttttgtaatgatccattcctgggcgtgtactatcacaagaacaataagtcctggatggagtctgagtttcgcgtgtattctagcgccaacaattgcacatttgagtacgtgagccagcccttcctgatggacctggagggcaagcagggcaatttcaagaacctgagggagttcgtgtttaagaatatcgatggctacttcaagatctacagcaagcacaccccaatcaacctggtgcgcgacctgccacagggattctccgccctggagccactggtggatctgcccatcggcatcaacatcacccggtttcagacactgctggccctgcacagatcctacctgacaccaggcgactcctctagcggatggaccgcaggagctgccgcctactatgtgggctatctgcagccccggaccttcctgctgaagtacaacgagaatggcaccatcacagacgcagtggattgcgccctggaccccctgtctgagacaaagtgtacactgaagagctttaccgtggagaagggcatctatcagacaagcaatttcagggtgcagcctaccgagtccatcgtgcgctttcccaatatcacaaacctgtgcccttttggcgaggtgttcaacgccaccagattcgccagcgtgtacgcctggaatcggaagagaatctccaactgcgtggccgactattctgtgctgtacaactccgcctctttcagcacctttaagtgctatggcgtgtctcccacaaagctgaatgatctgtgctttaccaacgtgtacgccgatagcttcgtgatcaggggagacgaagtgagacagatcgcaccaggacagacaggaaagatcgcagactacaattataagctgcctgacgatttcaccggctgcgtgatcgcctggaactccaacaatctggattctaaagtgggcggcaactacaattatctgtacaggctgtttcgcaagtccaatctgaagccattcgagcgggacatctccacagagatctaccaggccggctctaccccctgcaatggcgtggagggctttaactgttatttccctctgcagtcttacggcttccagccaacaaacggcgtgggctatcagccctacagagtggtggtgctgtcctttgagctgctgcacgcaccagcaacagtgtgcggcccaaagaagtctaccaatctggtgaagaacaagtgcgtgaacttcaacttcaacggactgaccggcacaggcgtgctgaccgagagcaataagaagttcctgccttttcagcagttcggcagggacatcgcagataccacagacgccgtgcgcgaccctcagaccctggagatcctggacatcacaccatgcagcttcggcggcgtgtccgtgatcacaccaggcaccaatacatccaaccaggtggccgtgctgtatcaggacgtgaattgtaccgaggtgcccgtggcaatccacgcagatcagctgacccctacatggcgggtgtactctaccggcagcaacgtgttccagacaagagccggatgcctgatcggagcagagcacgtgaacaatagctatgagtgcgacatccctatcggcgccggcatctgtgccagctaccagacccagacaaactccccatctggagcaggctccgtggccagccagtccatcatcgcctataccatgagcctgggcgccgagaacagcgtggcctactccaacaattctatcgccatccctaccaacttcacaatcagcgtgaccacagagatcctgccagtgtctatgaccaagacaagcgtggactgcacaatgtatatctgtggcgatagcaccgagtgctccaacctgctgctgcagtacggctccttttgtacccagctgaatagagccctgacaggcatcgccgtggagcaggataagaacacacaggaggtgttcgcccaggtgaagcagatctacaagaccccacccatcaaggactttggcggcttcaacttcagccagatcctgcctgatccaagcaagccctccaagaggtcttttatcgaggacctgctgttcaacaaggtgaccctggccgatgccggcttcatcaagcagtatggagattgcctgggagacatcgcagcccgcgacctgatctgtgcccagaagtttaatggcctgaccgtgctgcctccactgctgacagatgagatgatcgcccagtacacatctgccctgctggccggcaccatcacaagcggatggaccttcggcgcaggagccgccctgcagatcccttttgccatgcagatggcctataggttcaacggcatcggcgtgacccagaatgtgctgtacgagaaccagaagctgatcgccaatcagtttaacagcgccatcggcaagatccaggactctctgtcctctacagccagcgccctgggcaagctgcaggatgtggtgaatcagaacgcccaggccctgaataccctggtgaagcagctgagctccaacttcggcgccatctctagcgtgctgaatgacatcctgagccggctggacccccctgaggcagaggtgcagatcgacaggctgatcacaggccgcctgcagagcctgcagacctacgtgacacagcagctgatcagggcagcagagatcagagcctccgccaatctggccgccaccaagatgagcgagtgcgtgctgggacagtccaagagggtggacttttgtggcaagggctatcacctgatgtctttcccacagagcgcccctcacggcgtggtgtttctgcacgtgacctacgtgccagcccaggagaagaacttcaccacagcaccagccatctgccacgatggaaaggcacactttcctagggagggcgtgttcgtgtctaacggcacccactggtttgtgacacagcgcaatttctacgagccacagatcatcaccacagacaatacattcgtgagcggcaactgtgatgtggtgatcggcatcgtgaacaataccgtgtatgatccactgcagcccgagctggactcctttaaggaggagctggataagtacttcaagaatcacacctctcccgacgtggatctgggcgacatctccggcatcaatgcctctgtggtgaacatccagaaggagatcgaccggctgaacgaggtggccaagaatctgaacgagagcctgatcgatctgcaggagctgggcaagtatgagcagtacatcaagggctctggcagagagaacctgtatttccagggaggaggaggcagcggatacatccctgaggcaccaagggacggacaggcctacgtgcgcaaggatggcgagtgggtgctgctgtccacctttctgggccatcatcaccaccaccaccaccactga

SEQ ID NO: 1363 - DNA, 3846 bp, Artificial Sequence
  Description of Artificial Sequence: Synthetic polynucleotide
atgggcatcctgccaagcccaggaatgcccgccctgctgtctctggtgagcctgctgtccgtgctgctgatgggatgcgtggcagagacaggcacacagtgcgtgaacctgaccacaaggacccagctgccccctgcctataccaattctttcacacggggcgtgtactatcccgacaaggtgtttagaagctccgtgctgcactccacacaggatctgtttctgcctttcttttctaacgtgacctggttccacgccatccacgtgtccggcaccaatggcacaaagcggttcgacaatcccgtgctgccttttaacgatggcgtgtacttcgccgcaaccgagaagtccaacatcatcagaggctggatctttggcaccacactggactctaagacacagagcctgctgatcgtgaacaatgccaccaacgtggtgatcaaggtgtgcgagttccagttttgtaatgatccattcctgggcgtgtactatcacaagaacaataagtcctggatggagtctgagtttcgcgtgtattctagcgccaacaattgcacatttgagtacgtgagccagcccttcctgatggacctggagggcaagcagggcaatttcaagaacctgagggagttcgtgtttaagaatatcgatggctacttcaagatctacagcaagcacaccccaatcaacctggtgcgcgacctgccacagggattctccgccctggagccactggtggatctgcccatcggcatcaacatcacccggtttcagacactgctggccctgcacagatcctacctgacaccaggcgactcctctagcggatggaccgcaggagctgccgcctactatgtgggctatctgcagccccggaccttcctgctgaagtacaacgagaatggcaccatcacagacgcagtggattgcgccctggaccccctgtctgagacaaagtgtacactgaagagctttaccgtggagaagggcatctatcagacaagcaatttcagggtgcagcctaccgagtccatcgtgcgctttcccaatatcacaaacctgtgcccttttggcgaggtgttcaacgccaccagattcgccagcgtgtacgcctggaatcggaagagaatctccaactgcgtggccgactattctgtgctgtacaactccgcctctttcagcacctttaagtgctatggcgtgtctcccacaaagctgaatgatctgtgctttaccaacgtgtacgccgatagcttcgtgatcaggggagacgaagtgagacagatcgcaccaggacagacaggaaagatcgcagactacaattataagctgcctgacgatttcaccggctgcgtgatcgcctggaactccaacaatctggattctaaagtgggcggcaactacaattatctgtacaggctgtttcgcaagtccaatctgaagccattcgagcgggacatctccacagagatctaccaggccggctctaccccctgcaatggcgtggagggctttaactgttatttccctctgcagtcttacggcttccagccaacaaacggcgtgggctatcagccctacagagtggtggtgctgtcctttgagctgctgcacgcaccagcaacagtgtgcggcccaaagaagtctaccaatctggtgaagaacaagtgcgtgaacttcaacttcaacggactgaccggcacaggcgtgctgaccgagagcaataagaagttcctgccttttcagcagttcggcagggacatcgcagataccacagacgccgtgcgcgaccctcagaccctggagatcctggacatcacaccatgcagcttcggcggcgtgtccgtgatcacaccaggcaccaatacatccaaccaggtggccgtgctgtatcaggacgtgaattgtaccgaggtgcccgtggcaatccacgcagatcagctgacccctacatggcgggtgtactctaccggcagcaacgtgttccagacaagagccggatgcctgatcggagcagagcacgtgaacaatagctatgagtgcgacatccctatcggcgccggcatctgtgccagctaccagacccagacaaactccccatctggagcaggctccgtggccagccagtccatcatcgcctataccatgagcctgggcgccgagaacagcgtggcctactccaacaattctatcgccatccctaccaacttcacaatcagcgtgaccacagagatcctgccagtgtctatgaccaagacaagcgtggactgcacaatgtatatctgtggcgatagcaccgagtgctccaacctgctgctgcagtacggctccttttgtacccagctgaatagagccctgacaggcatcgccgtggagcaggataagaacacacaggaggtgttcgcccaggtgaagcagatctacaagaccccacccatcaaggactttggcggcttcaacttcagccagatcctgcctgatccaagcaagccctccaagaggtcttttatcgaggacctgctgttcaacaaggtgaccctggccgatgccggcttcatcaagcagtatggagattgcctgggagacatcgcagcccgcgacctgatctgtgcccagaagtttaatggcctgaccgtgctgcctccactgctgacagatgagatgatcgcccagtacacatctgccctgctggccggcaccatcacaagcggatggaccttcggcgcaggagccgccctgcagatcccttttgccatgcagatggcctataggttcaacggcatcggcgtgacccagaatgtgctgtacgagaaccagaagctgatcgccaatcagtttaacagcgccatcggcaagatccaggactctctgtcctctacagccagcgccctgggcaagctgcaggatgtggtgaatcagaacgcccaggccctgaataccctggtgaagcagctgagctccaacttcggcgccatctctagcgtgctgaatgacatcctgagccggctggacccccctgaggcagaggtgcagatcgacaggctgatcacaggccgcctgcagagcctgcagacctacgtgacacagcagctgatcagggcagcagagatcagagcctccgccaatctggccgccaccaagatgagcgagtgcgtgctgggacagtccaagagggtggacttttgtggcaagggctatcacctgatgtctttcccacagagcgcccctcacggcgtggtgtttctgcacgtgacctacgtgccagcccaggagaagaacttcaccacagcaccagccatctgccacgatggaaaggcacactttcctagggagggcgtgttcgtgtctaacggcacccactggtttgtgacacagcgcaatttctacgagccacagatcatcaccacagacaatacattcgtgagcggcaactgtgatgtggtgatcggcatcgtgaacaataccgtgtatgatccactgcagcccgagctggactcctttaaggaggagctggataagtacttcaagaatcacacctctcccgacgtggatctgggcgacatctccggcatcaatgcctctgtggtgaacatccagaaggagatcgaccggctgaacgaggtggccaagaatctgaacgagagcctgatcgatctgcaggagctgggcaagtatgagcagtacatcaagggctctggcagagagaacctgtatttccagggaggaggaggcagcggatacatccctgaggcaccaagggacggacaggcctacgtgcgcaaggatggcgagtgggtgctgctgtccacctttctgggccatcatcaccaccaccaccaccactga

SEQ ID NO: 1364 - DNA, 3846 bp, Artificial Sequence
  Description of Artificial Sequence: Synthetic polynucleotide
atgggcatcctgccaagcccaggaatgcccgccctgctgtctctggtgagcctgctgtccgtgctgctgatgggatgcgtggcagagacaggcacacagtgcgtgaacctgaccacaaggacccagctgccccctgcctataccaattctttcacacggggcgtgtactatcccgacaaggtgtttagaagctccgtgctgcactccacacaggatctgtttctgcctttcttttctaacgtgacctggttccacgccatccacgtgtccggcaccaatggcacaaagcggttcgacaatcccgtgctgccttttaacgatggcgtgtacttcgccagcaccgagaagtccaacatcatcagaggctggatctttggcaccacactggactctaagacacagagcctgctgatcgtgaacaatgccaccaacgtggtgatcaaggtgtgcgagttccagttttgtaatgatccattcctgggcgtgtactatcacaagaacaataagtcctggatggagtctgagtttcgcgtgtattctagcgccaacaattgcacatttgagtacgtgagccagcccttcctgatggacctggagggcaagcagggcaatttcaagaacctgagggagttcgtgtttaagaatatcgatggctacttcaagatctacagcaagcacaccccaatcaacctggtgcgcgacctgccacagggattctccgccctggagccactggtggatctgcccatcggcatcaacatcacccggtttcagacactgctggccctgcacagatcctacctgacaccaggcgactcctctagcggatggaccgcatcagctgccgcctactatgtgggctatctgcagccccggaccttcctgctgaagtacaacgagaatggcaccatcacagacgcagtggattgcgccctggaccccctgtctgagacaaagtgtacactgaagagctttaccgtggagaagggcatctatcagacaagcaatttcagggtgcagcctaccgagtccatcgtgcgctttcccaatatcacaaacctgtgcccttttggcgaggtgttcaacgccaccagattcgccagcgtgtacgcctggaatcggaagagaatctccaactgcgtggccgactattctgtgctgtacaactccgcctctttcagcacctttaagtgctatggcgtgtctcccacaaagctgaatgatctgtgctttaccaacgtgtacgccgatagcttcgtgatcaggggagacgaagtgagacagatcgcaccaggacagacaggaaagatcgcagactacaattataagctgcctgacgatttcaccggctgcgtgatcgcctggaactccaacaatctggattctaaagtgggcggcaactacaattatctgtacaggctgtttcgcaagtccaatctgaagccattcgagcgggacatctccacagagatctaccaggccggctctaccccctgcaatggcgtggagggctttaactgttatttccctctgcagtcttacggcttccagccaacaaacggcgtgggctatcagccctacagagtggtggtgctgtcctttgagctgctgcacgcaccagcaacagtgtgcggcccaaagaagtctaccaatctggtgaagaacaagtgcgtgaacttcaacttcaacggactgaccggcacaggcgtgctgaccgagagcaataagaagttcctgccttttcagcagttcggcagggacatcgcagataccacagacgccgtgcgcgaccctcagaccctggagatcctggacatcacaccatgcagcttcggcggcgtgtccgtgatcacaccaggcaccaatacatccaaccaggtggccgtgctgtatcaggacgtgaattgtaccgaggtgcccgtggcaatccacgcagatcagctgacccctacatggcgggtgtactctaccggcagcaacgtgttccagacaagagccggatgcctgatcggagcagagcacgtgaacaatagctatgagtgcgacatccctatcggcgccggcatctgtgccagctaccagacccagacaaactccccatctggagcaggctccgtggccagccagtccatcatcgcctataccatgagcctgggcgccgagaacagcgtggcctactccaacaattctatcgccatccctaccaacttcacaatcagcgtgaccacagagatcctgccagtgtctatgaccaagacaagcgtggactgcacaatgtatatctgtggcgatagcaccgagtgctccaacctgctgctgcagtacggctccttttgtacccagctgaatagagccctgacaggcatcgccgtggagcaggataagaacacacaggaggtgttcgcccaggtgaagcagatctacaagaccccacccatcaaggactttggcggcttcaacttcagccagatcctgcctgatccaagcaagccctccaagaggtcttttatcgaggacctgctgttcaacaaggtgaccctggccgatgccggcttcatcaagcagtatggagattgcctgggagacatcgcagcccgcgacctgatctgtgcccagaagtttaatggcctgaccgtgctgcctccactgctgacagatgagatgatcgcccagtacacatctgccctgctggccggcaccatcacaagcggatggaccttcggcgcaggagccgccctgcagatcccttttgccatgcagatggcctataggttcaacggcatcggcgtgacccagaatgtgctgtacgagaaccagaagctgatcgccaatcagtttaacagcgccatcggcaagatccaggactctctgtcctctacagccagcgccctgggcaagctgcaggatgtggtgaatcagaacgcccaggccctgaataccctggtgaagcagctgagctccaacttcggcgccatctctagcgtgctgaatgacatcctgagccggctggacccccctgaggcagaggtgcagatcgacaggctgatcacaggccgcctgcagagcctgcagacctacgtgacacagcagctgatcagggcagcagagatcagagcctccgccaatctggccgccaccaagatgagcgagtgcgtgctgggacagtccaagagggtggacttttgtggcaagggctatcacctgatgtctttcccacagagcgcccctcacggcgtggtgtttctgcacgtgacctacgtgccagcccaggagaagaacttcaccacagcaccagccatctgccacgatggaaaggcacactttcctagggagggcgtgttcgtgtctaacggcacccactggtttgtgacacagcgcaatttctacgagccacagatcatcaccacagacaatacattcgtgagcggcaactgtgatgtggtgatcggcatcgtgaacaataccgtgtatgatccactgcagcccgagctggactcctttaaggaggagctggataagtacttcaagaatcacacctctcccgacgtggatctgggcgacatctccggcatcaatgcctctgtggtgaacatccagaaggagatcgaccggctgaacgaggtggccaagaatctgaacgagagcctgatcgatctgcaggagctgggcaagtatgagcagtacatcaagggctctggcagagagaacctgtatttccagggaggaggaggcagcggatacatccctgaggcaccaagggacggacaggcctacgtgcgcaaggatggcgagtgggtgctgctgtccacctttctgggccatcatcaccaccaccaccaccactga

SEQ ID NO: 1365 - DNA, 3846 bp, Artificial Sequence
  Description of Artificial Sequence: Synthetic polynucleotide
atgggcatcctgccaagcccaggaatgcccgccctgctgtctctggtgagcctgctgtccgtgctgctgatgggatgcgtggcagagacaggcacacagtgcgtgaacctgaccacaaggacccagctgccccctgcctataccaattctttcacacggggcgtgtactatcccgacaaggtgtttagaagctccgtgctgcactccacacaggatctgtttctgcctttcttttctaacgtgacctggttccacgccatccacgtgtccggcaccaatggcacaaagcggttcgacaatcccgtgctgccttttaacgatggcgtgtacttcgccagcaccgagaagtccaacatcatcagaggctggatctttggcaccacactggactctaagacacagagcctgctgatcgtgaacaatgccaccaacgtggtgatcaaggtgtgcgagttccagttttgtaatgatccattcctgggcgtgtactatcacaagaacaataagtcctggatggagtctgagtttcgcgtgtattctagcgccaacaattgcacatttgagtacgtgagccagcccttcctgatggacctggagggcaagcagggcaatttcaagaacctgagggagttcgtgtttaagaatatcgatggctacttcaagatctacagcaagcacaccccaatcaacctggtgcgcgacctgccacagggattctccgccctggagccactggtggatctgcccatcggcatcaacatcacccggtttcagacactgctggccctgcacagatcctacctgacaccaggcgactcctctagcggatggaccgcaggagctgccgcctactatgtgggctatctgcagccccggaccttcctgctgaagtacaacgagaatggcaccatcacagacgcagtggattgcgccctggaccccctgtctgagacaaagtgtacactgaagagctttaccgtggagaagggcatctatcagacaagcaatttcagggtgcagcctaccgagtccatcgtgcgctttcccaatatcacaaacctgtgcccttttggcgaggtgttcaacgccaccagattcgccagcgtgtacgcctggaatcggaagagaatctccaactgcgtggccgactattctgtgctgtacaactccgcctctttcagcacctttaagtgctatggcgtgtctcccacaaagctgaatgatctgtgctttaccaacgtgtacgccgatagcttcgtgatcaggggagacgaagtgagacagatcgcaccaggacagacaggaaagatcgcagactacaattataagctgcctgacgatttcaccggctgcgtgatcgcctggaactccaacaatctggattctaaagtgggcggcaactacaattatctgtacaggctgtttcgcaagtccaatctgaagccattcgagcgggacatctccacagagatctaccaggccggctctaccccctgcaatggcgtggagggctttaactgttatttccctctgcagtcttacggcttccagccaacaaacggcgtgggctatcagccctacagagtggtggtgctgtcctttgagctgctgcacgcaccagcaacagtgtgcggcccaaagaagtctaccaatctggtgaagaacaagtgcgtgaacttcaacttcaacggactgaccggcacaggcgtgctgaccgagagcaataagaagttcctgccttttcagcagttcggcagggacatcgcagataccacagacgccgtgcgcgaccctcagaccctggagatcctggacatcacaccatgcagcttcggcggcgtgtccgtgatcacaccaggcaccaatacatccaaccaggtggccgtgctgtatcaggacgtgaattgtaccgaggtgcccgtggcaatccacgcagatcagctgacccctacatggcgggtgtactctaccggcagcaacgtgttccagacaagagccggatgcctgatcggagcagagcacgtgaacaatagctatgagtgcgacatccctatcggcgccggcatctgtgccagctaccagacccagacaaactccccatctggagcaggctccgtggccagccagtccatcatcgcctataccatgagcctgggcgccgagaacagcgtggcctactccaacaattctatcgccatccctaccaacttcacaatcagcgtgaccacagagatcctgccagtgtctatgaccaagacaagcgtggactgcacaatgtatatctgtggcgatagcaccgagtgccttaacctgctgctgcagtacggctccttttgtacccagctgaatagagccctgacaggcatcgccgtggagcaggataagaacacacaggaggtgttcgcccaggtgaagcagatctacaagaccccacccatcaaggactttggcggcttcaacttcagccagatcctgcctgatccaagcaagccctccaagaggtcttttatcgaggacctgctgttcaacaaggtgaccctggccgatgccggcttcatcaagcagtatggagattgcctgggagacatcgcagcccgcgacctgatctgtgcccagaagtttaatggcctgaccgtgctgcctccactgctgacagatgagatgatcgcccagtacacatctgccctgctggccggcaccatcacaagcggatggaccttcggcgcaggagccgccctgcagatcccttttgccatgcagatggcctataggttcaacggcatcggcgtgacccagaatgtgctgtacgagaaccagaagctgatcgccaatcagtttaacagcgccatcggcaagatccaggactctctgtcctctacagccagcgccctgggcaagctgcaggatgtggtgaatcagaacgcccaggccctgaataccctggtgaagcagctgagctccaacttcggcgccatctctagcgtgctgaatgacatcctgagccggctggacccccctgaggcagaggtgcagatcgacaggctgatcacaggccgcctgcagagcctgcagacctacgtgacacagcagctgatcagggcagcagagatcagagcctccgccaatctggccgccaccaagatgagcgagtgcgtgctgggacagtccaagagggtggacttttgtggcaagggctatcacctgatgtctttcccacagagcgcccctcacggcgtggtgtttctgcacgtgacctacgtgccagcccaggagaagaacttcaccacagcaccagccatctgccacgatggaaaggcacactttcctagggagggcgtgttcgtgtctaacggcacccactggtttgtgacacagcgcaatttctacgagccacagatcatcaccacagacaatacattcgtgagcggcaactgtgatgtggtgatcggcatcgtgaacaataccgtgtatgatccactgcagcccgagctggactcctttaaggaggagctggataagtacttcaagaatcacacctctcccgacgtggatctgggcgacatctccggcatcaatgcctctgtggtgaacatccagaaggagatcgaccggctgaacgaggtggccaagaatctgaacgagagcctgatcgatctgcaggagctgggcaagtatgagcagtacatcaagggctctggcagagagaacctgtatttccagggaggaggaggcagcggatacatccctgaggcaccaagggacggacaggcctacgtgcgcaaggatggcgagtgggtgctgctgtccacctttctgggccatcatcaccaccaccaccaccactga

SEQ ID NO: 1366 - DNA, 3846 bp, Artificial Sequence
  Description of Artificial Sequence: Synthetic polynucleotide
atgggcatcctgccaagcccaggaatgcccgccctgctgtctctggtgagcctgctgtccgtgctgctgatgggatgcgtggcagagacaggcacacagtgcgtgaacctgaccacaaggacccagctgccccctgcctataccaattctttcacacggggcgtgtactatcccgacaaggtgtttagaagctccgtgctgcactccacacaggatctgtttctgcctttcttttctaacgtgacctggttccacgccatccacgtgtccggcaccaatggcacaaagcggttcgacaatcccgtgctgccttttaacgatggcgtgtacttcgccagcaccgagaagtccaacatcatcagaggctggatctttggcaccacactggactctaagacacagagcctgctgatcgtgaacaatgccaccaacgtggtgatcaaggtgtgcgagttccagttttgtaatgatccattcctgggcgtgtactatcacaagaacaataagtcctggatggagtctgagtttcgcgtgtattctagcgccaacaattgcacatttgagtacgtgagccagcccttcctgatggacctggagggcaagcagggcaatttcaagaacctgagggagttcgtgtttaagaatatcgatggctacttcaagatctacagcaagcacaccccaatcaacctggtgcgcgacctgccacagggattctccgccctggagccactggtggatctgcccatcggcatcaacatcacccggtttcagacactgctggccctgcacagatcctacctgacaccaggcgactcctctagcggatggaccgcaggagctgccgcctactatgtgggctatctgcagccccggaccttcctgctgaagtacaacgagaatggcaccatcacagacgcagtggattgcgccctggaccccctgtctgagacaaagtgtacactgaagagctttaccgtggagaagggcatctatcagacaagcaatttcagggtgcagcctaccgagtccatcgtgcgctttcccaatatcacaaacctgtgcccttttggcgaggtgttcaacgccaccagattcgccagcgtgtacgcctggaatcggaagagaatctccaactgcgtggccgactattctgtgctgtacaactccgcctctttcagcacctttaagtgctatggcgtgtctcccacaaagctgaatgatctgtgctttaccaacgtgtacgccgatagcttcgtgatcaggggagacgaagtgagacagatcgcaccaggacagacaggaaagatcgcagactacaattataagctgcctgacgatttcaccggctgcgtgatcgcctggaactccaacaatctggattctaaagtgggcggcaactacaattatctgtacaggctgtttcgcaagtccaatctgaagccattcgagcgggacatctccacagagatctaccaggccggctctaccccctgcaatggcgtggagggctttaactgttatttccctctgcagtcttacggcttccagccaacaaacggcgtgggctatcagccctacagagtggtggtgctgtcctttgagctgctgcacgcaccagcaacagtgtgcggcccaaagaagtctaccaatctggtgaagaacaagtgcgtgaacttcaacttcaacggactgaccggcacaggcgtgctgaccgagagcaataagaagttcctgccttttcagcagttcggcagggacatcgcagataccacagacgccgtgcgcgaccctcagaccctggagatcctggacatcacaccatgcagcttcggcggcgtgtccgtgatcacaccaggcaccaatacatccaaccaggtggccgtgctgtatcaggacgtgaattgtaccgaggtgcccgtggcaatccacgcagatcagctgacccctacatggcgggtgtactctaccggcagcaacgtgttccagacaagagccggatgcctgatcggagcagagcacgtgaacaatagctatgagtgcgacatccctatcggcgccggcatctgtgccagctaccagacccagacaaactccccatctggagcaggctccgtggccagccagtccatcatcgcctataccatgagcctgggcgccgagaacagcgtggcctactccaacaattctatcgccatccctaccaacttcacaatcagcgtgaccacagagatcctgccagtgtctatgaccaagacaagcgtggactgcacaatgtatatctgtggcgatagcaccgagtgctccaacctgctgctgcagtacggctccttttgtacccagctgaatagagccctgacaggcatcgccgtggagcaggataagaacacacaggaggtgttcgcccaggtgaagcagatctacaagaccccacccatcaaggactttggcggcttcaacttcagccagatcctgcctgatccaagcaagccctccaagaggtcttttatcgaggacctgctgttcaacaaggtgaccctggccgatgccggcttcatcaagcagtatggagattgcctgggagacatcgcagcccgcgacctgatctgtgcccagaagtttaatggcctgaccgtgctgcctccactgctgacagatgagatgatcgccgcttacacagctgccctggttgccggcaccgctacagcaggatggaccttcggcgcaggagccgccctgcagatcccttttgccatgcagatggcctataggttcaacggcatcggcgtgacccagaatgtgctgtacgagaaccagaagctgatcgccaatcagtttaacagcgccatcggcaagatccaggactctctgtcctctacagccagcgccctgggcaagctgcaggatgtggtgaatcagaacgcccaggccctgaataccctggtgaagcagctgagctccaacttcggcgccatctctagcgtgctgaatgacatcctgagccggctggacccccctgaggcagaggtgcagatcgacaggctgatcacaggccgcctgcagagcctgcagacctacgtgacacagcagctgatcagggcagcagagatcagagcctccgccaatctggccgccaccaagatgagcgagtgcgtgctgggacagtccaagagggtggacttttgtggcaagggctatcacctgatgtctttcccacaggcggcccctcacggcgtggtgtttctgcacgtgacctacgtgccagcccaggagaagaacttcaccacagcaccagccatctgccacgatggaaaggcacactttcctagggagggcgtgttcgtgtctaacggcacccactggtttgtgacacagcgcaatttctacgagccacagatcatcaccacagacaatacattcgtgagcggcaactgtgatgtggtgatcggcatcgtgaacaataccgtgtatgatccactgcagcccgagctggactcctttaaggaggagctggataagtacttcaagaatcacacctctcccgacgtggatctgggcgacatctccggcatcaatgcctctgtggtgaacatccagaaggagatcgaccggctgaacgaggtggccaagaatctgaacgagagcctgatcgatctgcaggagctgggcaagtatgagcagtacatcaagggctctggcagagagaacctgtatttccagggaggaggaggcagcggatacatccctgaggcaccaagggacggacaggcctacgtgcgcaaggatggcgagtgggtgctgctgtccacctttctgggccatcatcaccaccaccaccaccactga

SEQ ID NO: 1367 - DNA, 3846 bp, Artificial Sequence
  Description of Artificial Sequence: Synthetic polynucleotide
atgggcatcctgccaagcccaggaatgcccgccctgctgtctctggtgagcctgctgtccgtgctgctgatgggatgcgtggcagagacaggcacacagtgcgtgaacctgaccacaaggacccagctgccccctgcctataccaattctttcacacggggcgtgtactatcccgacaaggtgtttagaagctccgtgctgcactccacacaggatctgtttctgcctttcttttctaacgtgacctggttccacgccatccacgtgtccggcaccaatggcacaaagcggttcgacaatcccgtgctgccttttaacgatggcgtgtacttcgccagcaccgagaagtccaacatcatcagaggctggatctttggcaccacactggactctaagacacagagcctgctgatcgtgaacaatgccaccaacgtggtgatcaaggtgtgcgagttccagttttgtaatgatccattcctgggcgtgtactatcacaagaacaataagtcctggatggagtctgagtttcgcgtgtattctagcgccaacaattgcacatttgagtacgtgagccagcccttcctgatggacctggagggcaagcagggcaatttcaagaacctgagggagttcgtgtttaagaatatcgatggctacttcaagatctacagcaagcacaccccaatcaacctggtgcgcgacctgccacagggattctccgccctggagccactggtggatctgcccatcggcatcaacatcacccggtttcagacactgctggccctgcacagatcctacctgacaccaggcgactcctctagcggatggaccgcaggagctgccgcctactatgtgggctatctgcagccccggaccttcctgctgaagtacaacgagaatggcaccatcacagacgcagtggattgcgccctggaccccctgtctgagacaaagtgtacactgaagagctttaccgtggagaagggcatctatcagacaagcaatttcagggtgcagcctaccgagtccatcgtgcgctttcccaatatcacaaacctgtgcccttttggcgaggtgttcaacgccaccagattcgccagcgtgtacgcctggaatcggaagagaatctccaactgcgtggccgactattctgtgctgtacaactccgcctctttcagcacctttaagtgctatggcgtgtctcccacaaagctgaatgatctgtgctttaccaacgtgtacgccgatagcttcgtgatcaggggagacgaagtgagacagatcgcaccaggacagacaggaaagatcgcagactacaattataagctgcctgacgatttcaccggctgcgtgatcgcctggaactccaacaatctggattctaaagtgggcggcaactacaattatctgtacaggctgtttcgcaagtccaatctgaagccattcgagcgggacatctccacagagatctaccaggccggctctaccccctgcaatggcgtggagggctttaactgttatttccctctgcagtcttacggcttccagccaacaaacggcgtgggctatcagccctacagagtggtggtgctgtcctttgagctgctgcacgcaccagcaacagtgtgcggcccaaagaagtctaccaatctggtgaagaacaagtgcgtgaacttcaacttcaacggactgaccggcacaggcgtgctgaccgagagcaataagaagttcctgccttttcagcagttcggcagggacatcgcagataccacagacgccgtgcgcgaccctcagaccctggagatcctggacatcacaccatgcagcttcggcggcgtgtccgtgatcacaccaggcaccaatacatccaaccaggtggccgtgctgtatcaggacgtgaattgtaccgaggtgcccgtggcaatccacgcagatcagctgacccctacatggcgggtgtactctaccggcagcaacgtgttccagacaagagccggatgcctgatcggagcagagcacgtgaacaatagctatgagtgcgacatccctatcggcgccggcatctgtgccagctaccagacccagacaaactccccatctggagcaggctccgtggccagccagtccatcatcgcctataccatgagcctgggcgccgagaacagcgtggcctactccaacaattctatcgccatccctaccaacttcacaatcagcgtgaccacagagatcctgccagtgtctatgaccaagacaagcgtggactgcacaatgtatatctgtggcgatagcaccgagtgctccaacctgctgctgcagtacggctccttttgtacccagctgaatagagccctgacaggcatcgccgtggagcaggataagaacacacaggaggtgttcgcccaggtgaagcagatctacaagaccccacccatcaaggactttggcggcttcaacttcagccagatcctgcctgatccaagcaagccctccaagaggtcttttatcgaggacctgctgttcaacaaggcgaccctggccgatgccggcttcatcaagcagtatggagattgcctgggagacatcgcagcccgcgacctgatctgtgcccagaagtttaatggcctgaccgtgctgcctccactgctgacagatgagatgatcgcccagtacacatctgccctgctggccggcaccatcacaagcggatggaccttcggcgcaggagccgccctgcagatcccttttgccatgcagatggcctataggttcaacggcatcggcgtgacccagaatgtgctgtacgagaaccagaagctgatcgccaatcagtttaacagcgccatcggcaagatccaggactctctgtcctctacagccagcgccctgggcaagctgcaggatgtggtgaatcagaacgcccaggccctgaataccctggtgaagcagctgagctccaacttcggcgccatctctagcgtgctgaatgacatcctgagccggctggacccccctgaggcagaggtgcagatcgacaggctgatcacaggccgcctgcagagcctgcagacctacgtgacacagcagctgatcagggcagcagagatcagagcctccgccaatctggccgccaccaagatgagcgagtgcgtgctgggacagtccaagagggtggacttttgtggcaagggctatcacctgatgtctttcccacagagcgcccctcacggcgtggtgtttctgcacgtgacctacgtgccagcccaggagaagaacttcaccacagcaccagccatctgccacgatggaaaggcacactttcctagggagggcgtgttcgtgtctaacggcacccactggtttgtgacacagcgcaatttctacgagccacagatcatcaccacagacaatacattcgtgagcggcaactgtgatgtggtgatcggcatcgtgaacaataccgtgtatgatccactgcagcccgagctggactcctttaaggaggagctggataagtacttcaagaatcacacctctcccgacgtggatctgggcgacatctccggcatcaatgcctctgtggtgaacatccagaaggagatcgaccggctgaacgaggtggccaagaatctgaacgagagcctgatcgatctgcaggagctgggcaagtatgagcagtacatcaagggctctggcagagagaacctgtatttccagggaggaggaggcagcggatacatccctgaggcaccaagggacggacaggcctacgtgcgcaaggatggcgagtgggtgctgctgtccacctttctgggccatcatcaccaccaccaccaccactga

SEQ ID NO: 1368 - DNA, 3846 bp, Artificial Sequence
  Description of Artificial Sequence: Synthetic polynucleotide
atgggcatcctgccaagcccaggaatgcccgccctgctgtctctggtgagcctgctgtccgtgctgctgatgggatgcgtggcagagacaggcacacagtgcgtgaacctgaccacaaggacccagctgccccctgcctataccaattctttcacacggggcgtgtactatcccgacatggtgtttagaagctccgtgctgcactccacacaggatctgtttctgcctttcttttctaacgtgacctggttccacgccatccacgtgtccggcaccaatggcacaaagcggttcgacaatcccgtgctgccttttaacgatggcgtgtacttcgccagcaccgagaagtccaacatcatcagaggctggatctttggcaccacactggactctaagacacagagcctgctgatcgtgaacaatgccaccaacgtggtgatcaaggtgtgcgagttccagttttgtaatgatccattcctgggcgtgtactatcacaagaacaataagtcctggatggagtctgagtttcgcgtgtattctagcgccaacaattgcacatttgagtacgtgagccagcccttcctgatggacctggagggcaagcagggcaatttcaagaacctgagggagttcgtgtttaagaatatcgatggctacttcaagatctacagcaagcacaccccaatcaacctggtgcgcgacctgccacagggattctccgccctggagccactggtggatctgcccatcggcatcaacatcacccggtttcagacactgctggccctgcacagatcctacctgacaccaggcgactcctctagcggatggaccgcaggagctgccgcctactatgtgggctatctgcagccccggaccttcctgctgaagtacaacgagaatggcaccatcacagacgcagtggattgcgccctggaccccctgtctgagacaaagtgtacactgaagagctttaccgtggagaagggcatctatcagacaagcaatttcagggtgcagcctaccgagtccatcgtgcgctttcccaatatcacaaacctgtgcccttttggcgaggtgttcaacgccaccagattcgccagcgtgtacgcctggaatcggaagagaatctccaactgcgtggccgactattctgtgctgtacaactccgcctctttcagcacctttaagtgctatggcgtgtctcccacaaagctgaatgatctgtgctttaccaacgtgtacgccgatagcttcgtgatcaggggagacgaagtgagacagatcgcaccaggacagacaggaaagatcgcagactacaattataagctgcctgacgatttcaccggctgcgtgatcgcctggaactccaacaatctggattctaaagtgggcggcaactacaattatctgtacaggctgtttcgcaagtccaatctgaagccattcgagcgggacatctccacagagatctaccaggccggctctaccccctgcaatggcgtggagggctttaactgttatttccctctgcagtcttacggcttccagccaacaaacggcgtgggctatcagccctacagagtggtggtgctgtcctttgagctgctgcacgcaccagcaacagtgtgcggcccaaagaagtctaccaatctggtgaagaacaagtgcgtgaacttcaacttcaacggactgaccggcacaggcgtgctgaccgagagcaataagaagttcctgccttttcagcagttcggcagggacatcgcagataccacagacgccgtgcgcgaccctcagaccctggagatcctggacatcacaccatgcagcttcggcggcgtgtccgtgatcacaccaggcaccaatacatccaaccaggtggccgtgctgtatcaggacgtgaattgtaccgaggtgcccgtggcaatccacgcagatcagctgacccctacatggcgggtgtactctaccggcagcaacgtgttccagacaagagccggatgcctgatcggagcagagcacgtgaacaatagctatgagtgcgacatccctatcggcgccggcatctgtgccagctaccagacccagacaaactccccatctggagcaggctccgtggccagccagtccatcatcgcctataccatgagcctgggcgccgagaacagcgtggcctactccaacaattctatcgccatccctaccaacttcacaatcagcgtgaccacagagatcctgccagtgtctatgaccaagacaagcgtggactgcacaatgtatatctgtggcgatagcaccgagtgctccaacctgctgctgcagtacggctccttttgtacccagctgaatagagccctgacaggcatcgccgtggagcaggataagaacacacaggaggtgttcgcccaggtgaagcagatctacaagaccccacccatcaaggactttggcggcttcaacttcagccagatcctgcctgatccaagcaagccctccaagaggtcttttatcgaggacctgctgttcaacaaggtgaccctggccgatgccggcttcatcaagcagtatggagattgcctgggagacatcgcagcccgcgacctgatctgtgcccagaagtttaatggcctgaccgtgctgcctccactgctgacagatgagatgatcgcccagtacacatctgccctgctggccggcaccatcacaagcggatggaccttcggcgcaggagccgccctgcagatcccttttgccatgcagatggcctataggttcaacggcatcggcgtgacccagaatgtgctgtacgagaaccagaagctgatcgccaatcagtttaacagcgccatcggcaagatccaggactctctgtcctctacagccagcgccctgggcaagctgcaggatgtggtgaatcagaacgcccaggccctgaataccctggtgaagcagctgagctccaacttcggcgccatctctagcgtgctgaatgacatcctgagccggctggacccccctgaggcagaggtgcagatcgacaggctgatcacaggccgcctgcagagcctgcagacctacgtgacacagcagctgatcagggcagcagagatcagagcctccgccaatctggccgccaccaagatgagcgagtgcgtgctgggacagtccaagagggtggacttttgtggcaagggctatcacctgatgtctttcccacagagcgcccctcacggcgtggtgtttctgcacgtgacctacgtgccagcccaggagaagaacttcaccacagcaccagccatctgccacgatggaaaggcacactttcctagggagggcgtgttcgtgtctaacggcacccactggtttgtgacacagcgcaatttctacgagccacagatcatcaccacagacaatacattcgtgagcggcaactgtgatgtggtgatcggcatcgtgaacaataccgtgtatgatccactgcagcccgagctggactcctttaaggaggagctggataagtacttcaagaatcacacctctcccgacgtggatctgggcgacatctccggcatcaatgcctctgtggtgaacatccagaaggagatcgaccggctgaacgaggtggccaagaatctgaacgagagcctgatcgatctgcaggagctgggcaagtatgagcagtacatcaagggctctggcagagagaacctgtatttccagggaggaggaggcagcggatacatccctgaggcaccaagggacggacaggcctacgtgcgcaaggatggcgagtgggtgctgctgtccacctttctgggccatcatcaccaccaccaccaccactga

SEQ ID NO: 1369 - DNA, 3846 bp, Artificial Sequence
  Description of Artificial Sequence: Synthetic polynucleotide
atgggcatcctgccaagcccaggaatgcccgccctgctgtctctggtgagcctgctgtccgtgctgctgatgggatgcgtggcagagacaggcacacagtgcgtgaacctgaccacaaggacccagctgccccctgcctataccaattctttcacacggggcgtgtactatcccgacaaggtgtttagaagcgatgtgctgcactccacacaggatctgtttctgcctttcttttctaacgtgacctggttccacgccatccacgtgtccggcaccaatggcacaaagcggttcgacaatcccgtgctgccttttaacgatggcgtgtacttcgccagcaccgagaagtccaacatcatcagaggctggatctttggcaccacactggactctaagacacagagcctgctgatcgtgaacaatgccaccaacgtggtgatcaaggtgtgcgagttccagttttgtgacaatccattcctgggcgtgtactatcacaagaacaataagtcctggatggagaaagagtttcgcgtgtattctagcgccaacaattgcacatttgagtacgtgagccagcccttcctgatggacctgggaggcaagcagggcaatttcaagaacctgagggagttcgtgtttaagaatatcgatggctacttcaagatctacagcaagcacaccccaatcaacctggtgcgcgacctgccacagggattctccgccctggagccactgatggatctgcccatcggcatcaacatcacccggtttcagacactgctggccctgcacagatcctacctgacaccaggcgactcctctagcggatggaccgcaggagctgccgcctactatgtgggctatctgcagccccggaccttcctgctgaagtacaacgagaatggcaccatcacagacgcagtggattgcgccctggaccccctgtctgagacaaagtgtacactgaagagctttaccgtggagaagggcatctatcagacaagcaatttcagggtgcagcctaccgagtccatcgtgcgctttcccaatatcacaaacctgtgcccttttggcgaggtgttcaacgccaccagattcgccagcgtgtacgcctggaatcggaagagaatctccaactgcgtggccgactattctgtgctgtacaactccgcctctttcagcacctttaagtgctatggcgtgtctcccacaaagctgaatgatctgtgctttaccaacgtgtacgccgatagcttcgtgatcaggggagacgaagtgagacagatcgcaccaggacagacaggaaagatcgcagactacaattataagctgcctgacgatttcaccggctgcgtgatcgcctggaactccaacaatctggattctaaagtgggcggcaactacaattatctgtacaggctgtttcgcaagtccaatctgaagccattcgagcgggacatctccacagagatctaccaggccggctctaccccctgcaatggcgtggagggctttaactgttatttccctctgcagtcttacggcttccagccaacaaacggcgtgggctatcagccctacagagtggtggtgctgtcctttgagctgctgcacgcaccagcaacagtgtgcggcccaaagaagtctaccaatctggtgaagaacaagtgcgtgaacttcaacttcaacggactgaccggcacaggcgtgctgaccgagagcaataagaagttcctgccttttcagcagttcggcagggacatcgcagataacacagacgccgtgcgcgaccctcagaccctggagatcctggacatcacaccatgcagcttcggcggcgtgtccgtgatcacaccaggcaccaatacatccaaccaggtggccgtgctgtatcaggacgtgaattgtaccgaggtgcccaatgcaatccacgcagatcagctgacccctacatggcgggtgtactctaccggcagcaacgtgttccagacaagagccggatgcctgatcggagcagagcacgtgaacaatagctatgagtgcgacatccctatcggcgccggcatctgtgccagctaccagacccagacaaactccccatctggagcaggctccgtggccagccagtccatcatcgcctataccatgagcctgggcgccgagaacagcgtggcctactccaacaattctatcgccatccctaccaacttcacaatcagcgtgaccacagagatcctgccagtgtctatgaccaagacaagcgtggactgcacaatgtatatctgtggcgatagcaccgagtgctccaacctgctgctgcagtacggctccttttgtacccagctgaatagagccctgcaaggcatcgcccaagagcaggataagaacacacaggaggtgttcgcccaggtgaagcagatctacaagaccccacccatcaaggactttggcggcttcaacttcagccagatcctgcctgatccaagcaagccctccaagaggtcttttatcgaggacctgctgttcaacaaggtgaccctggccgatgccggcttcatcaagcagtatggagattgcctgggagacatcgcagcccgcgacctgatctgtgcccagaagtttaatggcctgaccgtgctgcctccactgctgacagatgagatgatcgcccagtacacatctgccctgctggccggcaccatcacaagcggatggaccttcggcgcaggagccgccctgcagatcccttttgccatgcagatggcctataggttcaacggcatcggcgtgacccagaatgtgctgtacgagaaccagaagctgatcgccaatcagtttaacaaagccatcggcaagatccaggactctctgtcctctacagccagcgccctgggcaagctgcaggatgtggtgaatcagaacgcccaggccctgaataccctggtgaagcagctgagctccaacttcggcgccatctctagcgtgctgaatgacatcctgagccggctggacccccctgaggcagaggtgcagatcgacaggctgatcacaggccgcctgcagagcctgcagacctacgtgacacagcagctgatcagggcagcagagatcagagcctccgccaatctggccgccaccaagatgagcgagtgcgtgctgggacagtccaagagggtggacttttgtggcaagggctatcacctgatgtctttcccacagagcgcccctcacggcgtggtgtttctgcacgtgacctacgtgccagcccaggagaagaacttcaccacagcaccagccatctgccacgatggaaaggcattttttcctagggagggcgtgttcgtgtctaacggcacccaatggtttgtgacacagcgcaatttctacgagccacagatcatcaccacagacaatacattcgtgagcggcaactgtgatgtggtgatcggcatcgtgaacaataccgtgtatgatccactgcagcccgagctggactcctttaaggaggagctggataagtacttcaagaatcacacctctcccgacgtggatctgggcgacatctccggcatcaatgcctctgtggtgaacatccagaaggagatcgaccggctgaacgaggtggccaagaatctgaacgagagcctgatcgatctgcaggagctgggcaagtatgagcagtacatcaagggctctggcagagagaacctgtatttccagggaggaggaggcagcggatacatccctgaggcaccaagggacggacaggcctacgtgcgcaaggatggcgagtgggtgctgctgtccacctttctgggccatcatcaccaccaccaccaccactga

SEQ ID NO: 1370 - DNA, 3846 bp, Artificial Sequence
  Description of Artificial Sequence: Synthetic polynucleotide
atgggcatcctgccaagcccaggaatgcccgccctgctgtctctggtgagcctgctgtccgtgctgctgatgggatgcgtggcagagacaggcacacagtgcgtgaacctgaccacaaggacccagctgccccctgcctataccaattctttcacacggggcgtgtactatcccgacaaggtgtttagaagctccgtgctgcactccacacaggatctgtttctgcctttcttttctaacgtgacctggttccacgccatccacgtgtccggcaccaatggcacaaagcggttcgacaatcccgtgctgccttttaacgatggcgtgtacttcgccagcaccgagaagtccaacatcatcagaggctggatctttggcaccacactggactctaagacacagagcctgctgatcgtgaacaatgccaccaacgtggtgatcaaggtgtgcgagttccagttttgtaatgatccattcctgggcgtgtactatcacaagaacaataagtcctggatggagtctgagtttcgcgtgtattctagcgccaacaattgcacatttgagtacgtgagccagcccttcctgatggacctggagggcaagcagggcaatttcaaggatctgagggagttcgtgtttaagaatatcgatggctacttcaagatctacagcaagcacaccccaatcaacctggtgcgcgacctgccacagggattctccgccctggagccactggtggatctgcccatcggcatcaacatcacccggtttcagacactgctggccctgcacagatcctacctgacaccaggcgactcctctagcggatggaccgcaggagctgccgcctactatgtgggctatctgcagccccggaccttcctgctgaagtacaacgagaatggcaccatcacagacgcagtggattgcgccctggaccccctgtctgagacaaagtgtacactgaagagctttaccgtggagaagggcatctatcagacaagcaatttcagggtgcagcctaccgagtccatcgtgcgctttcccaatatcacaaacctgtgcccttttggcgaggtgttcaacgccaccagattcgccagcgtgtacgcctggaatcggaagagaatctccaactgcgtggccgactattctgtgctgtacaactccgcctctttcagcacctttaagtgctatggcgtgtctcccacaaagctgaatgatctgtgctttaccaacgtgtacgccgatagcttcgtgatcaggggagacgaagtgagacagatcgcaccaggacagacaggaaagatcgcagactacaattataagctgcctgacgatttcaccggctgcgtgatcgcctggaactccaacaatctggattctaaagtgggcggcaactacaattatctgtacaggctgtttcgcaagtccaatctgaagccattcgagcgggacatctccacagagatctaccaggccggctctaccccctgcaatggcgtggagggctttaactgttatttccctctgcagtcttacggcttccagccaacaaacggcgtgggctatcagccctacagagtggtggtgctgtcctttgagctgctgcacgcaccagcaacagtgtgcggcccaaagaagtctaccaatctggtgaagaacaagtgcgtgaacttcaacttcaacggactgaccggcacaggcgtgctgaccgagagcaataagaagttcctgccttttcagcagttcggcagggacatcgcagataccacagacgccgtgcgcgaccctcagaccctggagatcctggacatcacaccatgcagcttcggcggcgtgtccgtgatcacaccaggcaccaatacatccaaccaggtggccgtgctgtatcaggacgtgaattgtaccgaggtgcccgtggcaatccacgcagatcagctgacccctacatggcgggtgtactctaccggcagcaacgtgttccagacaagagccggatgcctgatcggagcagagcacgtgaacaatagctatgagtgcgacatccctatcggcgccggcatctgtgccagctaccagacccagacaaactccccatctggagcaggctccgtggccagccagtccatcatcgcctataccatgagcctgggcgccgagaacagcgtggcctactccaacaattctatcgccatccctaccaacttcacaatcagcgtgaccacagagatcctgccagtgtctatgaccaagacaagcgtggactgcacaatgtatatctgtggcgatagcaccgagtgctccaacctgctgctgcagtacggctccttttgtacccagctgaatagagccctgacaggcatcgccgtggagcaggataagaacacacaggaggtgttcgcccaggtgaagcagatctacaagaccccacccatcaaggactttggcggcttcaacttcagccagatcctgcctgatccaagcaagccctccaagaggtcttttatcgaggacctgctgttcaacaaggtgaccctggccgatgccggcttcatcaagcagtatggagattgcctgggagacatcgcagcccgcgacctgatctgtgcccagaagtttaatggcctgaccgtgctgcctccactgctgacagatgagatgatcgcccagtacacatctgccctgctggccggcaccatcacaagcggatggaccttcggcgcaggagccgccctgcagatcccttttgccatgcagatggcctataggttcaacggcatcggcgtgacccagaatgtgctgtacgagaaccagaagctgatcgccaatcagtttaacagcgccatcggcaagatccaggactctctgtcctctacagccagcgccctgggcaagctgcaggatgtggtgaatcagaacgcccaggccctgaataccctggtgaagcagctgagctccaacttcggcgccatctctagcgtgctgaatgacatcctgagccggctggacccccctgaggcagaggtgcagatcgacaggctgatcacaggccgcctgcagagcctgcagacctacgtgacacagcagctgatcagggcagcagagatcagagcctccgccaatctggccgccaccaagatgagcgagtgcgtgctgggacagtccaagagggtggacttttgtggcaagggctatcacctgatgtctttcccacagagcgcccctcacggcgtggtgtttctgcacgtgacctacgtgccagcccaggagaagaacttcaccacagcaccagccatctgccacgatggaaaggcacactttcctagggagggcgtgttcgtgtctaacggcacccactggtttgtgacacagcgcaatttctacgagccacagatcatcaccacagacaatacattcgtgagcggcaactgtgatgtggtgatcggcatcgtgaacaataccgtgtatgatccactgcagcccgagctggactcctttaaggaggagctggataagtacttcaagaatcacacctctcccgacgtggatctgggcgacatctccggcatcaatgcctctgtggtgaacatccagaaggagatcgaccggctgaacgaggtggccaagaatctgaacgagagcctgatcgatctgcaggagctgggcaagtatgagcagtacatcaagggctctggcagagagaacctgtatttccagggaggaggaggcagcggatacatccctgaggcaccaagggacggacaggcctacgtgcgcaaggatggcgagtgggtgctgctgtccacctttctgggccatcatcaccaccaccaccaccactga

SEQ ID NO: 1371 - DNA, 3846 bp, Artificial Sequence
  Description of Artificial Sequence: Synthetic polynucleotide
atgggcatcctgccaagcccaggaatgcccgccctgctgtctctggtgagcctgctgtccgtgctgctgatgggatgcgtggcagagacaggcacacagtgcgtgaacctgaccacaaggacccagctgccccctgcctataccaattctttcacacggggcgtgtactatcccgacaaggtgtttagaagctccgtgctgcactccacacaggatctgtttctgcctttcttttctaacgtgacctggttccacgccatccacgtgtccggcaccaatggcacaaagcggttcgacaatcccgtgctgccttttaacgatggcgtgtacttcgccagcaccgagaagtccaacatcatcagaggctggatctttggcaccacactggactctaagacacagagcctgctgatcgtgaacaatgccaccaacgtggtgatcaaggtgtgcgagttccagttttgtaatgatccattcctgggcgtgtactatcacaagaacaataagtcctggatggagtctgagtttcgcgtgtattctagcgccaacaattgcacatttgagtacgtgagccagcccttcctgatggacctggagggcaagcagggcaatttcaagaacctgagggagttcgtgtttaagaatatcgatggctacttcaagatctacagcaagcacaccccaatcaacctggtgcgcgacctgccacagggattctccgccctggagccactggtggatctgcccatcggcatcaacatcacccggtttcagacactgctggccctgcacagatcctacctgacaccaggcgactcctctagcggatggaccgcaggagctgccgcctactatgtgggctatctgcagccccggaccttcctgctgaagtacaacgagaatggcaccatcacagacgcagtggattgcgccctggaccccctgtctgagacaaagtgtacactgaagagctttaccgtggagaagggcatctatcagacaagcaatttcagggtgcagcctaccgagtccatcgtgcgctttcccaatatcacaaacctgtgcccttttggcgaggtgttcaacgccaccagattcgccagcgtgtacgcctggaatcggaagagaatctccaactgcgtggccgactattctgtgctgtacaactccgcctctttcagcacctttaagtgctatggcgtgtctcccacaaagctgaatgatctgtgctttaccaacgtgtacgccgatagcttcgtgatcaggggagacgaagtgagacagatcgcaccaggacagacaggaaagatcgcagactacaattataagctgcctgacgatttcaccggctgcgtgatcgcctggaactccaacaatctggattctaaagtgggcggcaactacaattatctgtacaggctgtttcgcaagtccaatctgaagccattcgagcgggacatctccacagagatctaccaggccggctctaccccctgcaatggcgtggagggctttaactgttatttccctctgcagtcttacggcttccagccaacaaacggcgtgggctatcagccctacagagtggtggtgctgtcctttgagctgctgcacgcaccagcaacagtgtgcggcccaaagaagtctaccaatctggtgaagaacaagtgcgtgaacttcaacttcaacggactgaccggcacaggcgtgctgaccgagagcaataagaagttcctgccttttcagcagttcggcagggacatcgcagataccacagacgccgtgcgcgaccctcagaccctggagatcctggacatcacaccatgcagcttcggcggcgtgtccgtgatcacaccaggcaccaatacatccaaccaggtggccgtgctgtatcaggacgtgaattgtaccgaggtgcccgtggcaatccacgcagatcagctgacccctacatggcgggtgtactctaccggcagcaacgtgttccagacaagagccggatgcctgatcggagcagagcacgtgaacaatagctatgagtgcgacatccctatcggcgccggcatctgtgccagctaccagacccagacaaactccccatctggagcaggctccgtggccagccagtccatcatcgcctataccatgagcctgggcgccgagaacagcgtggcctactccaacaattctatcgccatccctaccaacttcacaatcagcgtgaccacagagatcctgccagtgtctatgaccaagacaagcgtggactgcacaatgtatatctgtggcgatagcaccgagtgctccaacctgctgctgcagtacggctccttttgttcacagctgaatagagccctgacaggcatcgccgtggagcaggataagaacacacaggaggtgttcgcccaggtgaagcagatctacaagaccccacccatcaaggactttggcggcttcaacttcagccagatcctgcctgatccaagcaagccctccaagaggtcttttatcgaggacctgctgttcaacaaggtgaccctggccgatgccggcttcatcaagcagtatggagattgcctgggagacatcgcagcccgcgacctgatctgtgcccagaagtttaatggcctgaccgtgctgcctccactgctgacagatgagatgatcgcccagtacacatctgccctgctggccggcaccatcacaagcggatggaccttcggcgcaggagccgccctgcagatcccttttgccatgcagatggcctataggttcaacggcatcggcgtgacccagaatgtgctgtacgagaaccagaagctgatcgccaatcagtttaacagcgccatcggcaagatccaggactctctgtcctctacagccagcgccctgggcaagctgcaggatgtggtgaatcagaacgcccaggccctgaataccctggtgaagcagctgagctccaacttcggcgccatctctagcgtgctgaatgacatcctgagccggctggacccccctgaggcagaggtgcagatcgacaggctgatcacaggccgcctgcagagcctgcagacctacgtgacacagcagctgatcagggcagcagagatcagagcctccgccaatctggccgccaccaagatgagcgagtgcgtgctgggacagtccaagagggtggacttttgtggcaagggctatcacctgatgtctttcccacagagcgcccctcacggcgtggtgtttctgcacgtgacctacgtgccagcccaggagaagaacttcaccacagcaccagccatctgccacgatggaaaggcacactttcctagggagggcgtgttcgtgtctaacggcacccactggtttgtgacacagcgcaatttctacgagccacagatcatcaccacagacaatacattcgtgagcggcaactgtgatgtggtgatcggcatcgtgaacaataccgtgtatgatccactgcagcccgagctggactcctttaaggaggagctggataagtacttcaagaatcacacctctcccgacgtggatctgggcgacatctccggcatcaatgcctctgtggtgaacatccagaaggagatcgaccggctgaacgaggtggccaagaatctgaacgagagcctgatcgatctgcaggagctgggcaagtatgagcagtacatcaagggctctggcagagagaacctgtatttccagggaggaggaggcagcggatacatccctgaggcaccaagggacggacaggcctacgtgcgcaaggatggcgagtgggtgctgctgtccacctttctgggccatcatcaccaccaccaccaccactga

SEQ ID NO: 1372 - DNA, 3846 bp, Artificial Sequence
  Description of Artificial Sequence: Synthetic polynucleotide
atgggcatcctgccaagcccaggaatgcccgccctgctgtctctggtgagcctgctgtccgtgctgctgatgggatgcgtggcagagacaggcacacagtgcgtgaacctgaccacaaggacccagctgccccctgcctataccaattctttcacacggggcgtgtactatcccgacaaggtgtttagaagctccgtgctgcactccacacaggatctgtttctgcctttcttttctaacgtgacctggttccacgccatccacgtgtccggcaccaatggcacaaagcggttcgacaatcccgtgctgccttttaacgatggcgtgtacttcgccagcaccgagaagtccaacatcatcagaggctggatctttggcaccacactggactctaagacacagagcctgctgatcgtgaacaatgccaccaacgtggtgatcaaggtgtgcgagttccagttttgtaatgatccattcctgggcgtgtactatcacaagaacaataagtcctggatggagtctgagtttcgcgtgtattctagcgccaacaattgcacatttgagtacgtgagccagcccttcctgatggacctggagggcaagcagggcaatttcaagaacctgagggagttcgtgtttaagaatatcgatggctacttcaagatctacagcaagcacaccccaatcaacctggtgcgcgacctgccacagggattctccgccctggagccactggtggatctgcccatcggcatcaacatcacccggtttcagacactgctggccctgcacagatcctacctgacaccaggcgactcctctagcggatggaccgcaggagctgccgcctactatgtgggctatctgcagccccggaccttcctgctgaagtacaacgagaatggcaccatcacagacgcagtggattgcgccctggaccccctgtctgagacaaagtgtacactgaagagctttaccgtggagaagggcatctatcagacaagcaatttcagggtgcagcctaccgagtccatcgtgcgctttcccaatatcacaaacctgtgcccttttggcgaggtgttcaacgccaccagattcgccagcgtgtacgcctggaatcggaagagaatctccaactgcgtggccgactattctgtgctgtacaactccgcctctttcagcacctttaagtgctatggcgtgtctcccacaaagctgaatgatctgtgctttaccaacgtgtacgccgatagcttcgtgatcaggggagacgaagtgagacagatcgcaccaggacagacaggaaagatcgcagactacaattataagctgcctgacgatttcaccggctgcgtgatcgcctggaactccaacaatctggattctaaagtgggcggcaactacaattatctgtacaggctgtttcgcaagtccaatctgaagccattcgagcgggacatctccacagagatctaccaggccggctctaccccctgcaatggcgtggagggctttaactgttatttccctctgcagtcttacggcttccagccaacaaacggcgtgggctatcagccctacagagtggtggtgctgtcctttgagctgctgcacgcaccagcaacagtgtgcggcccaaagaagtctaccaatctggtgaagaacaagtgcgtgaacttcaacttcaacggactgaccggcacaggcgtgctgaccgagagcaataagaagttcctgccttttcagcagttcggcagggacatcgcagataccacagacgccgtgcgcgaccctcagaccctggagatcctggacatcacaccatgcagcttcggcggcgtgtccgtgatcacaccaggcaccaatacatccaaccaggtggccgtgctgtatcaggacgtgaattgtaccgaggtgcccgtggcaatccacgcagatcagctgacccctacatggcgggtgtactctaccggcagcaacgtgttccagacaagagccggatgcctgatcggagcagagcacgtgaacaatagctatgagtgcgacatccctatcggcgccggcatctgtgccagctaccagacccagacaaactccccatctggagcaggctccgtggccagccagtccatcatcgcctataccatgagcctgggcgccgagaacagcgtggcctactccaacaattctatcgccatccctaccaacttcacaatcagcgtgaccacagagatcctgccagtgtctatgaccaagacaagcgtggactgcacaatgtatatctgtggcgatagcaccgagtgctccaacctgctgctgcagtacggctccttttgtacccagctgaatagagccctgacaggcatcgccgtggagcaggataagaacacacaggaggtgttcgcccaggtgaagcagatctacaagaccccacccatcaaggactttggcggcttcaacttcagccagatcctgcctgatccaagcaagccctccaagaggtcttttatcgaggacctgctgttcaacaaggtgaccctggccgatgccggcttcatcaagcagtatggagattgcctgggagacatcgcagcccgcgacctgatctgtgcccagaagtttaatggcctgaccgtgctgcctccactgctgacagatgagatgatcgcccagtacacatctgccctgctggccggcaccatcacaagcggatggaccttcggcgcaggagccgccctgcagatcccttttgccatgcagatggcctataggttcaacggcatcggcgtgacccagaatgtgctgtacgagaaccagaagctgatcgccaatcagtttaacagcgccatcggcaagatccaggactctctgtcctctacagccagcgccctgggcaagctgcaggatgtggtgaaacagaacgcccaggccctgaataccctggtgaagcagctgagctccaacttcggcgccatctctagcgtgctgaatgacatcctgagccggctggacccccctgaggcagaggtgcagatcgacaggctgatcacaggccgcctgcagagcctgcagacctacgtgacacagcagctgatcagggcagcagagatcagagcctccgccaatctggccgccaccaagatgagcgagtgcgtgctgggacagtccaagagggtggacttttgtggcaagggctatcacctgatgtctttcccacagagcgcccctcacggcgtggtgtttctgcacgtgacctacgtgccagcccaggagaagaacttcaccacagcaccagccatctgccacgatggaaaggcacactttcctagggagggcgtgttcgtgtctaacggcacccactggtttgtgacacagcgcaatttctacgagccacagatcatcaccacagacaatacattcgtgagcggcaactgtgatgtggtgatcggcatcgtgaacaataccgtgtatgatccactgcagcccgagctggactcctttaaggaggagctggataagtacttcaagaatcacacctctcccgacgtggatctgggcgacatctccggcatcaatgcctctgtggtgaacatccagaaggagatcgaccggctgaacgaggtggccaagaatctgaacgagagcctgatcgatctgcaggagctgggcaagtatgagcagtacatcaagggctctggcagagagaacctgtatttccagggaggaggaggcagcggatacatccctgaggcaccaagggacggacaggcctacgtgcgcaaggatggcgagtgggtgctgctgtccacctttctgggccatcatcaccaccaccaccaccactga

SEQ ID NO: 1373 - DNA, 3846 bp, Artificial Sequence
  Description of Artificial Sequence: Synthetic polynucleotide
atgggcatcctgccaagcccaggaatgcccgccctgctgtctctggtgagcctgctgtccgtgctgctgatgggatgcgtggcagagacaggcacacagtgcgtgaacctgaccacaaggacccagctgccccctgcctataccaattctttcacacggggcgtgtactatcccgacaaggtgtttagaagctccgtgctgcactccacacaggatctgtttctgcctttcttttctaacgtgacctggttccacgccatccacgtgtccggcaccaatggcacaaagcggttcgacaatcccgtgctgccttttaacgatggcgtgtacttcgccagcaccgagaagtccaacatcatcagaggctggatctttggcaccacactggactctaagacacagagcctgctgatcgtgaacaatgccaccaacgtggtgatcaaggtgtgcgagttccagttttgtaatgatccattcctgggcgtgtactatcacaagaacaataagtcctggatggagtctgagtttcgcgtgtattctagcgccaacaattgcacatttgagtacgtgagccagcccttcctgatggacctggagggcaagcagggcaatttcaagaacctgagggagttcgtgtttaagaatatcgatggctacttcaagatctacagcaagcacaccccaatcaacctggtgcgcgacctgccacagggattctccgccctggagccactggtggatctgcccatcggcatcaacatcacccggtttcagacactgctggccctgcacagatcctacctgacaccaggcgactcctctagcggatggaccgcaggagctgccgcctactatgtgggctatctgcagccccggaccttcctgctgaagtacaacgagaatggcaccatcacagacgcagtggattgcgccctggaccccctgtctgagacaaagtgtacactgaagagctttaccgtggagaagggcatctatcagacaagcaatttcagggtgcagcctaccgagtccatcgtgcgctttcccaatatcacaaacctgtgcccttttggcgaggtgttcaacgccaccagattcgccagcgtgtacgcctggaatcggaagagaatctccaactgcgtggccgactattctgtgctgtacaactccgcctctttcagcacctttaagtgctatggcgtgtctcccacaaagctgaatgatctgtgctttaccaacgtgtacgccgatagcttcgtgatcaggggagacgaagtgagacagatcgcaccaggacagacaggaaagatcgcagactacaattataagctgcctgacgatttcaccggctgcgtgatcgcctggaactccaacaatctggattctaaagtgggcggcaactacaattatctgtacaggctgtttcgcaagtccaatctgaagccattcgagcgggacatctccacagagatctaccaggccggctctaccccctgcaatggcgtggagggctttaactgttatttccctctgcagtcttacggcttccagccaacaaacggcgtgggctatcagccctacagagtggtggtgctgtcctttgagctgctgcacgcaccagcaacagtgtgcggcccaaagaagtctaccaatctggtgaagaacaagtgcgtgaacttcaacttcaacggactgaccggcacaggcgtgctgaccgagagcaataagaagttcctgccttttcagcagttcggcagggacatcgcagataccacagacgccgtgcgcgaccctcagaccctggagatcctggacatcacaccatgcagcttcggcggcgtgtccgtgatcacaccaggcaccaatacatccaaccaggtggccgtgctgtatcaggacgtgaattgtaccgaggtgcccgtggcaatccacgcagatcagctgacccctacatggcgggtgtactctaccggcagcaacgtgttccagacaagagccggatgcctgatcggagcagagcacgtgaacaatagctatgagtgcgacatccctatcggcgccggcatctgtgccagctaccagacccagacaaactccccatctggagcaggctccgtggccagccagtccatcatcgcctataccatgagcctgggcgccgagaacagcgtggcctactccaacaattctatcgccatccctaccaacttcacaatcagcgtgaccacagagatcctgccagtgtctatgaccaagacaagcgtggactgcacaatgtatatctgtggcgatagcaccgagtgctccaacctgctgctgcagtacggctccttttgtacccagctgaatagagccctgacaggcatcgccgtggagcaggataagaacacacaggaggtgttcgcccaggtgaagcagatctacaagaccccacccatcaaggactttggcggcttcaacttcagccagatcctgcctgatccaagcaagccctccaagaggtcttttatcgaggacctgctgttcaacaaggtgaccctggccgatgccggcttcatcaagcagtatggagattgcctgggagacatcgcagcccgcgacctgatctgtgcccagaagtttaatggcctgaccgtgctgcctccactgctgacagatgagatgatcgcccagtacacagcggccctgctggccggcaccatcacaagcggatggaccttcggcgcaggagccgccctgcagatcccttttgccatgcagatggcctataggttcaacggcatcggcgtgacccagaatgtgctgtacgagaaccagaagctgatcgccaatcagtttaacagcgccatcggcaagatccaggactctctgtcctctacagccagcgccctgggcaagctgcaggatgtggtgaatcagaacgcccaggccctgaataccctggtgaagcagctgagctccaacttcggcgccatctctagcgtgctgaatgacatcctgagccggctggacccccctgaggcagaggtgcagatcgacaggctgatcacaggccgcctgcagagcctgcagacctacgtgacacagcagctgatcagggcagcagagatcagagcctccgccaatctggccgccaccaagatgagcgagtgcgtgctgggacagtccaagagggtggacttttgtggcaagggctatcacctgatgtctttcccacagagcgcccctcacggcgtggtgtttctgcacgtgacctacgtgccagcccaggagaagaacttcaccacagcaccagccatctgccacgatggaaaggcacactttcctagggagggcgtgttcgtgtctaacggcacccactggtttgtgacacagcgcaatttctacgagccacagatcatcaccacagacaatacattcgtgagcggcaactgtgatgtggtgatcggcatcgtgaacaataccgtgtatgatccactgcagcccgagctggactcctttaaggaggagctggataagtacttcaagaatcacacctctcccgacgtggatctgggcgacatctccggcatcaatgcctctgtggtgaacatccagaaggagatcgaccggctgaacgaggtggccaagaatctgaacgagagcctgatcgatctgcaggagctgggcaagtatgagcagtacatcaagggctctggcagagagaacctgtatttccagggaggaggaggcagcggatacatccctgaggcaccaagggacggacaggcctacgtgcgcaaggatggcgagtgggtgctgctgtccacctttctgggccatcatcaccaccaccaccaccactga

SEQ ID NO: 1374 - DNA, 3846 bp, Artificial Sequence
  Description of Artificial Sequence: Synthetic polynucleotide
atgggcatcctgccaagcccaggaatgcccgccctgctgtctctggtgagcctgctgtccgtgctgctgatgggatgcgtggcagagacaggcacacagtgcgtgaacctgaccacaaggacccagctgccccctgcctataccaattctttcacacggggcgtgtactatcccgacaaggtgtttagaagctccgtgctgcactccacacaggatctgtttctgcctttcttttctaacgtgacctggttccacgccatccacgtgtccggcaccaatggcacaaagcggttcgacaatcccgtgctgccttttaacgatggcgtgtacttcgccgcgaccgagaagtccaacatcatcagaggctggatctttggcaccacactggactctaagacacagagcctgctgatcgtgaacaatgccaccaacgtggtgatcaaggtgtgcgagttccagttttgtaatgatccattcctgggcgtgtactatcacaagaacaataagtcctggatggagtctgagtttcgcgtgtattctagcgccaacaattgcacatttgagtacgtgagccagcccttcctgatggacctggagggcaagcagggcaatttcaagaacctgagggagttcgtgtttaagaatatcgatggctacttcaagatctacagcaagcacaccccaatcaacctggtgcgcgacctgccacagggattctccgccctggagccactggtggatctgcccatcggcatcaacatcacccggtttcagacactgctggccctgcacagatcctacctgacaccaggcgactcctctagcggatggaccgcaggagctgccgcctacttcgtgggctatctgcagccccggaccttcctgctgaagtacaacgagaatggcaccatcacagacgcagtggattgcgccctggaccccctgtctgagacaaagtgtacactgaagagctttaccgtggagaagggcatctatcagacaagcaatttcagggtgcagcctaccgagtccatcgtgcgctttcccaatatcacaaacctgtgcccttttggcgaggtgttcaacgccaccagattcgccagcgtgtacgcctggaatcggaagagaatctccaactgcgtggccgactattctgtgctgtacaactccgcctctttcagcacctttaagtgctatggcgtgtctcccacaaagctgaatgatctgtgctttaccaacgtgtacgccgatagcttcgtgatcaggggagacgaagtgagacagatcgcaccaggacagacaggaaagatcgcagactacaattataagctgcctgacgatttcaccggctgcgtgatcgcctggaactccaacaatctggattctaaagtgggcggcaactacaattatctgtacaggctgtttcgcaagtccaatctgaagccattcgagcgggacatctccacagagatctaccaggccggctctaccccctgcaatggcgtggagggctttaactgttatttccctctgcagtcttacggcttccagccaacaaacggcgtgggctatcagccctacagagtggtggtgctgtcctttgagctgctgcacgcaccagcaacagtgtgcggcccaaagaagtctaccaatctggtgaagaacaagtgcgtgaacttcaacttcaacggactgaccggcacaggcgtgctgaccgagagcaataagaagttcctgccttttcagcagttcggcagggacatctcggataccacagacgccgtgcgcgaccctcagaccctggagatcctggacatcacaccatgcagcttcggcggcgtgtccgtgatcacaccaggcaccaatacatccaaccaggtggccgtgctgtatcaggacgtgaattgtaccgaggtgcccgtggcaatccacgcagatcagctgacccctacatggcgggtgtactctaccggcagcaacgtgttccagacaagagccggatgcctgatcggagcagagcacgtgaacaatagctatgagtgcgacatccctatcggcgccggcatctgtgccagctaccagacccagacaaactccccatctggagcaggctccgtggccagccagtccatcatcgcctataccatgagcctgggcgccgagaacagcgtggcctactccaacaattctatcgccatccctaccaacttcacaatcagcgtgaccacagagatcctgccagtgtctatgaccaagacaagcgtggactgcacaatgtatatctgtggcgatagcaccgagtgctccaacctgctgctgcagtacggctccttttgtacccagctgaatagagccctgacaggcatcgccgtggagcaggataagaacacacaggaggtgttcgcccaggtgaagcagatctacaagaccccacccatcaaggactttggcggcttcaacttcagccagatcctgcctgatccaagcaagccctccaagaggtcttttatcgaggacctgctgttcaacaaggtgaccctggccgatgccggcttcatcaagcagtatggagattgcctgggagacatcgcagcccgcgacctgatctgtgcccagaagtttaatggcctgaccgtgctgcctccactgctgacagatgagatgatcgcccagtacacatctgccctggttgccggcaccgctacagctggatggaccttcggcgcaggagccgccctgcagatcccttttgccatgcagatggcctataggttcaacggcatcggcgtgacccagaatgtgctgtacgagaaccagaagctgatcgccaatcagtttaacagcgccatcggcaagatccaggactctctgtcctctacagccagcgccctgggcaagctgcaggatgtggtgaatcagaacgcccaggccctgaataccctggtgaagcagctgagctccaacttcggcgccatctctagcgtgctgaatgacatcctgagccggctggacccccctgaggcagaggtgcagatcgacaggctgatcacaggccgcctgcagagcctgcagacctacgtgacacagcagctgatcagggcagcagagatcagagcctccgccaatctggccgccaccaagatgagcgagtgcgtgctgggacagtccaagagggtggacttttgtggcaagggctatcacctgatgtctttcccacaggcggcccctcacggcgtggtgtttctgcacgtgacctacgtgccagcccaggagaagaacttcaccacagcaccagccatctgccacgatggaaaggcacactttcctagggagggcgtgttcgtgtctaacggcacccactggtttgtgacacagcgcaatttctacgagccacagatcatcaccacagacaatacattcgtgagcggcaactgtgatgtggtgatcggcatcgtgaacaataccgtgtatgatccactgcagcccgagctggactcctttaaggaggagctggataagtacttcaagaatcacacctctcccgacgtggatctgggcgacatctccggcatcaatgcctctgtggtgaacatccagaaggagatcgaccggctgaacgaggtggccaagaatctgaacgagagcctgatcgatctgcaggagctgggcaagtatgagcagtacatcaagggctctggcagagagaacctgtatttccagggaggaggaggcagcggatacatccctgaggcaccaagggacggacaggcctacgtgcgcaaggatggcgagtgggtgctgctgtccacctttctgggccatcatcaccaccaccaccaccactga

SEQ ID NO: 1375 - DNA, 3846 bp, Artificial Sequence
  Description of Artificial Sequence: Synthetic polynucleotide
atgggcatcctgccaagcccaggaatgcccgccctgctgtctctggtgagcctgctgtccgtgctgctgatgggatgcgtggcagagacaggcacacagtgcgtgaacctgaccacaaggacccagctgccccctgcctataccaattctttcacacggggcgtgtactatcccgacaaggtgtttagaagctccgtgctgcactccacacaggatctgtttctgcctttcttttctaacgtgacctggttccacgccatccacgtgtccggcaccaatggcacaaagcggttcgacaatcccgtgctgccttttaacgatggcgtgtacttcgccagcaccgagaagtccaacatcatcagaggctggatctttggcaccacactggactctaagacacagagcctgctgatcgtgaacaatgccaccaacgtggtgatcaaggtgtgcgagttccagttttgtaatgatccattcctgggcgtgtactatcacaagaacaataagtcctggatggagtctgagtttcgcgtgtattctagcgccaacaattgcacatttgagtacgtgagccagcccttcctgatggacctggagggcaagcagggcaatttcaagaacctgagggagttcgtgtttaagaatatcgatggctacttcaagatctacagcaagcacaccccaatcaacctggtgcgcgacctgccacagggattctccgccctggagccactggtggatctgcccatcggcatcaacatcacccggtttcagacactgctggccctgcacagatcctacctgacaccaggcgactcctctagcggatggaccgcaggagctgccgcctactatgtgggctatctgcagccccggaccttcctgctgaagtacaacgagaatggcaccatcacagacgcagtggattgcgccctggaccccctgtctgagacaaagtgtacactgaagagctttaccgtggagaagggcatctatcagacaagcaatttcagggtgcagcctaccgagtccatcgtgcgctttcccaatatcacaaacctgtgcccttttggcgaggtgttcaacgccaccagattcgccagcgtgtacgcctggaatcggaagagaatctccaactgcgtggccgactattctgtgctgtacaactccgcctctttcagcacctttaagtgctatggcgtgtctcccacaaagctgaatgatctgtgctttaccaacgtgtacgccgatagcttcgtgatcaggggagacgaagtgagacagatcgcaccaggacagacaggaaagatcgcagactacaattataagctgcctgacgatttcaccggctgcgtgatcgcctggaactccaacaatctggattctaaagtgggcggcaactacaattatctgtacaggctgtttcgcaagtccaatctgaagccattcgagcgggacatctccacagagatctaccaggccggctctaccccctgcaatggcgtggagggctttaactgttatttccctctgcagtcttacggcttccagccaacaaacggcgtgggctatcagccctacagagtggtggtgctgtcctttgagctgctgcacgcaccagcaacagtgtgcggcccaaagaagtctaccaatctggtgaagaacaagtgcgtgaacttcaacttcaacggactgaccggcacaggcgtgctgaccgagagcaataagaagttcctgccttttcagcagttcggcagggacatcgcagatcgaacagacgccgtgcgcgaccctcagaccctggagatcctggacatcacaccatgcagcttcggcggcgtgtccgtgatcacaccaggcaccaatacatccaaccaggtggccgtgctgtatcaggacgtgaattgtaccgaggtgcccgtggcaatccacgcagatcagctgacccctacatggcgggtgtactctaccggcagcaacgtgttccagacaagagccggatgcctgatcggagcagagcacgtgaacaatagctatgagtgcgacatccctatcggcgccggcatctgtgccagctaccagacccagacaaactccccatctggagcaggctccgtggccagccagtccatcatcgcctataccatgagcctgggcgccgagaacagcgtggcctactccaacaattctatcgccatccctaccaacttcacaatcagcgtgaccacagagatcctgccagtgtctatgaccaagacaagcgtggactgcacaatgtatatctgtggcgatagcaccgagtgctccaacctgctgctgcagtacggctccttttgtacccagctgaatagagccctgacaggcatcgccgtggagcaggataagaacacacaggaggtgttcgcccaggtgaagcagatctacaagaccccacccatcaaggactttggcggcttcaacttcagccagatcctgcctgatccaagcaagccctccaagaggtcttttatcgaggacctgctgttcaacaaggtgaccctggccgatgccggcttcatcaagcagtatggagattgcctgggagacatcgcagcccgcgacctgatctgtgcccagaagtttaatggcctgaccgtgctgcctccactgctgacagatgagatgatcgcccagtacacatctgccctgctggccggcaccatcacaagcggatggaccttcggcgcaggagccgccctgcagatcccttttgccatgcagatggcctataggttcaacggcatcggcgtgacccagaatgtgctgtacgagaaccagaagctgatcgccaatcagtttaacagcgccatcggcaagatccaggactctctgtcctctacagccagcgccctgggcaagctgcaggatgtggtgaatcagaacgcccaggccctgaataccctggtgaagcagctgagctccaacttcggcgccatctctagcgtgctgaatgacatcctgagccggctggacccccctgaggcagaggtgcagatcgacaggctgatcacaggccgcctgcagagcctgcagacctacgtgacacagcagctgatcagggcagcagagatcagagcctccgccaatctggccgccaccaagatgagcgagtgcgtgctgggacagtccaagagggtggacttttgtggcaagggctatcacctgatgtctttcccacagagcgcccctcacggcgtggtgtttctgcacgtgacctacgtgccagcccaggagaagaacttcaccacagcaccagccatctgccacgatggaaaggcacactttcctagggagggcgtgttcgtgtctaacggcacccactggtttgtgacacagcgcaatttctacgagccacagatcatcaccacagacaatacattcgtgagcggcaactgtgatgtggtgatcggcatcgtgaacaataccgtgtatgatccactgcagcccgagctggactcctttaaggaggagctggataagtacttcaagaatcacacctctcccgacgtggatctgggcgacatctccggcatcaatgcctctgtggtgaacatccagaaggagatcgaccggctgaacgaggtggccaagaatctgaacgagagcctgatcgatctgcaggagctgggcaagtatgagcagtacatcaagggctctggcagagagaacctgtatttccagggaggaggaggcagcggatacatccctgaggcaccaagggacggacaggcctacgtgcgcaaggatggcgagtgggtgctgctgtccacctttctgggccatcatcaccaccaccaccaccactga

SEQ ID NO: 1376 - DNA, 3846 bp, Artificial Sequence
  Description of Artificial Sequence: Synthetic polynucleotide
atgggcatcctgccaagcccaggaatgcccgccctgctgtctctggtgagcctgctgtccgtgctgctgatgggatgcgtggcagagacaggcacacagtgcgtgaacctgaccacaaggacccagctgccccctgcctataccaattctttcacacggggcgtgtactatcccgacaaggtgtttagaagctccgtgctgcactccacacaggatctgtttctgcctttcttttctaacgtgacctggttccacgccatccacgtgtccggcaccaatggcacaaagcggttcgacaatcccgtgctgccttttaacgatggcgtgtacttcgccgcgaccgagaagtccaacatcatcagaggctggatctttggcaccacactggactctaagacacagagcctgctgatcgtgaacaatgccaccaacgtggtgatcaaggtgtgcgagttccagttttgtaatgatccattcctgggcgtgtactatcacaagaacaataagtcctggatggagtctgagtttcgcgtgtattctagcgccaacaattgcacatttgagtacgtgagccagcccttcctgatggacctggagggcaagcagggcaatttcaagaacctgagggagttcgtgtttaagaatatcgatggctacttcaagatctacagcaagcacaccccaatcaacctggtgcgcgacctgccacagggattctccgccctggagccactggtggatctgcccatcggcatcaacatcacccggtttcagacactgctggccctgcacagatcctacctgacaccaggcgactcctctagcggatggaccgcaggagctgccgcctactttgtgggctatctgcagccccggaccttcctgctgaagtacaacgagaatggcaccatcacagacgcagtggattgcgccctggaccccctgtctgagacaaagtgtacactgaagagctttaccgtggagaagggcatctatcagacaagcaatttcagggtgcagcctaccgagtccatcgtgcgctttcccaatatcacaaacctgtgcccttttggcgaggtgttcaacgccaccagattcgccagcgtgtacgcctggaatcggaagagaatctccaactgcgtggccgactattctgtgctgtacaactccgcctctttcagcacctttaagtgctatggcgtgtctcccacaaagctgaatgatctgtgctttaccaacgtgtacgccgatagcttcgtgatcaggggagacgaagtgagacagatcgcaccaggacagacaggaaagatcgcagactacaattataagctgcctgacgatttcaccggctgcgtgatcgcctggaactccaacaatctggattctaaagtgggcggcaactacaattatctgtacaggctgtttcgcaagtccaatctgaagccattcgagcgggacatctccacagagatctaccaggccggctctaccccctgcaatggcgtggagggctttaactgttatttccctctgcagtcttacggcttccagccaacaaacggcgtgggctatcagccctacagagtggtggtgctgtcctttgagctgctgcacgcaccagcaacagtgtgcggcccaaagaagtctaccaatctggtgaagaacaagtgcgtgaacttcaacttcaacggactgaccggcacaggcgtgctgaccgagagcaataagaagttcctgccttttcagcagttcggcagggacatctcggataccacagacagcgtgcgcgaccctcagaccctggagatcctggacatcacaccatgcagcttcggcggcgtgtccgtgatcacaccaggcaccaatacatccaaccaggtggccgtgctgtatcaggacgtgaattgtaccgaggtgcccgtggcaatccacgcagatcagctgacccctacatggcgggtgtactctaccggcagcaacgtgttccagacaagagccggatgcctgatcggagcagagcacgtgaacaatagctatgagtgcgacatccctatcggcgccggcatctgtgccagctaccagacccagacaaactccccatctggagcaggctccgtggccagccagtccatcatcgcctataccatgagcctgggcgccgagaacagcgtggcctactccaacaattctatcgccatccctaccaacttcacaatcagcgtgaccacagagatcctgccagtgtctatgaccaagacaagcgtggactgcacaatgtatatctgtggcgatagcaccgagtgctccaacctgctgctgcagtacggctccttttgtacccagctgaatagagccctgacaggcatcgccgtggagcaggataagaacacacaggaggtgttcgcccaggtgaagcagatctacaagaccccacccatcaaggactttggcggcttcaacttcagccagatcctgcctgatccaagcaagccctccaagaggtcttttatcgaggacctgctgttcaacaaggtgaccctggccgatgccggcttcatcaagcagtatggagattgcctgggagacatcgcagcccgcgacctgatctgtgcccagaagtttaatggcctgaccgtgctgcctccactgctgacagatgagatgatcgcccagtacacatctgccctgctggccggcaccatcacagcgggatggaccttcggcgcaggagccgccctgcagatcccttttgccatgcagatggcctataggttcaacggcatcggcgtgacccagaatgtgctgtacgagaaccagaagctgatcgccaatcagtttaacagcgccatcggcaagatccaggactctctgtcctctacagccagcgccctgggcaagctgcaggatgtggtgaatcagaacgcccaggccctgaataccctggtgaagcagctgagctccaacttcggcgccatctctagcgtgctgaatgacatcctgagccggctggacccccctgaggcagaggtgcagatcgacaggctgatcacaggccgcctgcagagcctgcagacctacgtgacacagcagctgatcagggcagcagagatcagagcctccgccaatctggccgccaccaagatgagcgagtgcgtgctgggacagtccaagagggtggacttttgtggcaagggctatcacctgatgtctttcccacaggctgcccctcacggcgtggtgtttctgcacgtgacctacgtgccagcccaggagaagaacttcaccacagcaccagccatctgccacgatggaaaggcacactttcctagggagggcgtgttcgtgtctaacggcacccactggtttgtgacacagcgcaatttctacgagccacagatcatcaccacagacaatacattcgtgagcggcaactgtgatgtggtgatcggcatcgtgaacaataccgtgtatgatccactgcagcccgagctggactcctttaaggaggagctggataagtacttcaagaatcacacctctcccgacgtggatctgggcgacatctccggcatcaatgcctctgtggtgaacatccagaaggagatcgaccggctgaacgaggtggccaagaatctgaacgagagcctgatcgatctgcaggagctgggcaagtatgagcagtacatcaagggctctggcagagagaacctgtatttccagggaggaggaggcagcggatacatccctgaggcaccaagggacggacaggcctacgtgcgcaaggatggcgagtgggtgctgctgtccacctttctgggccatcatcaccaccaccaccaccactga

SEQ ID NO: 1377 - DNA, 3846 bp, Artificial Sequence
  Description of Artificial Sequence: Synthetic polynucleotide
atgggcatcctgccaagcccaggaatgcccgccctgctgtctctggtgagcctgctgtccgtgctgctgatgggatgcgtggcagagacaggcacacagtgcgtgaacctgaccacaaggacccagctgccccctgcctataccaattctttcacacggggcgtgtactatcccgacaaggtgtttagaagctccgtgctgcactccacacaggatctgtttctgcctttcttttctaacgtgacctggttccacgccatccacgtgtccggcaccaatggcacaaagcggttcgacaatcccgtgctgccttttaacgatggcgtgtacttcgccagcaccgagaagtccaacatcatcagaggctggatctttggcaccacactggactctaagacacagagcctgctgatcgtgaacaatgccaccaacgtggtgatcaaggtgtgcgagttccagttttgtaatgatccattcctgggcgtgtactatcacaagaacaataagtcctggatggagtctgagtttcgcgtgtattctagcgccaacaattgcacatttgagtacgtgagccagcccttcctgatggacctggagggcaagcagggcaatttcaagaacctgagggagttcgtgtttaagaatatcgatggctacttcaagatctacagcaagcacaccccaatcaacctggtgcgcgacctgccacagggattctccgccctggagccactggtggatctgcccatcggcatcaacatcacccggtttcagacactgctggccctgcacagatcctacctgacaccaggcgactcctctagcggatggaccgcaggagctgccgcctactatgtgggctatctgcagccccggaccttcctgctgaagtacaacgagaatggcaccatcacagacgcagtggattgcgccctggaccccctgtctgagacaaagtgtacactgaagagctttaccgtggagaagggcatctatcagacaagcaatttcagggtgcagcctaccgagtccatcgtgcgctttcccaatatcacaaacctgtgcccttttggcgaggtgttcaacgccaccagattcgccagcgtgtacgcctggaatcggaagagaatctccaactgcgtggccgactattctgtgctgtacaactccgcctctttcagcacctttaagtgctatggcgtgtctcccacaaagctgaatgatctgtgctttaccaacgtgtacgccgatagcttcgtgatcaggggagacgaagtgagacagatcgcaccaggacagacaggaaagatcgcagactacaattataagctgcctgacgatttcaccggctgcgtgatcgcctggaactccaacaatctggattctaaagtgggcggcaactacaattatctgtacaggctgtttcgcaagtccaatctgaagccattcgagcgggacatctccacagagatctaccaggccggctctaccccctgcaatggcgtggagggctttaactgttatttccctctgcagtcttacggcttccagccaacaaacggcgtgggctatcagccctacagagtggtggtgctgtcctttgagctgctgcacgcaccagcaacagtgtgcggcccaaagaagtctaccaatctggtgaagaacaagtgcgtgaacttcaacttcaacggactgaccggcacaggcgtgctgaccgagagcaataagaagttcctgccttttcagcagttcggcagggacatcgcagataccacagacgccgtgcgcgaccctcagaccctggagatcctggacatcacaccatgcagcttcggcggcgtgtccgtgatcacaccaggcaccaatacatccaaccaggtggccgtgctgtatcaggacgtgaattgtaccgaggtgcccgtggcaatccacgcagatcagctgacccctacatggcgggtgtactctaccggcagcaacgtgttccagacaagagccggatgcctgatcggagcagagcacgtgaacaatagctatgagtgcgacatccctatcggcgccggcatctgtgccagctaccagacccagacaaactccccatctggagcaggctccgtggccagccagtccatcatcgcctataccatgagcctgggcgccgagaacagcgtggcctactccaacaattctatcgccatccctaccaacttcacaatcagcgtgaccacagagatcctgccagtgtctatgaccaagacaagcgtggactgcacaatgtatatctgtggcgatagcaccgagtgctccaacctgctgctgcagtacggctccttttgtacccagctgaatagagccctgcaaggcatcgccgtggagcaggataagaacacacaggaggtgttcgcccaggtgaagcagatctacaagaccccacccatcaaggactttggcggcttcaacttcagccagatcctgcctgatccaagcaagccctccaagaggtcttttatcgaggacctgctgttcaacaaggtgaccctggccgatgccggcttcatcaagcagtatggagattgcctgggagacatcgcagcccgcgacctgatctgtgcccagaagtttaatggcctgaccgtgctgcctccactgctgacagatgagatgatcgcccagtacacatctgccctgctggccggcaccatcacaagcggatggaccttcggcgcaggagccgccctgcagatcccttttgccatgcagatggcctataggttcaacggcatcggcgtgacccagaatgtgctgtacgagaaccagaagctgatcgccaatcagtttaacagcgccatcggcaagatccaggactctctgtcctctacagccagcgccctgggcaagctgcaggatgtggtgaatcagaacgcccaggccctgaataccctggtgaagcagctgagctccaacttcggcgccatctctagcgtgctgaatgacatcctgagccggctggacccccctgaggcagaggtgcagatcgacaggctgatcacaggccgcctgcagagcctgcagacctacgtgacacagcagctgatcagggcagcagagatcagagcctccgccaatctggccgccaccaagatgagcgagtgcgtgctgggacagtccaagagggtggacttttgtggcaagggctatcacctgatgtctttcccacagagcgcccctcacggcgtggtgtttctgcacgtgacctacgtgccagcccaggagaagaacttcaccacagcaccagccatctgccacgatggaaaggcacactttcctagggagggcgtgttcgtgtctaacggcacccactggtttgtgacacagcgcaatttctacgagccacagatcatcaccacagacaatacattcgtgagcggcaactgtgatgtggtgatcggcatcgtgaacaataccgtgtatgatccactgcagcccgagctggactcctttaaggaggagctggataagtacttcaagaatcacacctctcccgacgtggatctgggcgacatctccggcatcaatgcctctgtggtgaacatccagaaggagatcgaccggctgaacgaggtggccaagaatctgaacgagagcctgatcgatctgcaggagctgggcaagtatgagcagtacatcaagggctctggcagagagaacctgtatttccagggaggaggaggcagcggatacatccctgaggcaccaagggacggacaggcctacgtgcgcaaggatggcgagtgggtgctgctgtccacctttctgggccatcatcaccaccaccaccaccactga

SEQ ID NO: 1378 - DNA, 3846 bp, Artificial Sequence
  Description of Artificial Sequence: Synthetic polynucleotide
atgggcatcctgccaagcccaggaatgcccgccctgctgtctctggtgagcctgctgtccgtgctgctgatgggatgcgtggcagagacaggcacacagtgcgtgaacctgaccacaaggacccagctgccccctgcctataccaattctttccggcggggcgtgtactatcccgacaaggtgtttagaagctccgtgctgcactccacacaggatctgtttctgcctttcttttctaacgtgacctggttccacgccatccacgtgtccggcaccaatggcacaaagcggttcgacaatcccgtgctgccttttaacgatggcgtgtacttcgccagcaccgagaagtccaacatcatcagaggctggatctttggcaccacactggactctaagacacagagcctgctgatcgtgaacaatgccaccaacgtggtgatcaaggtgtgcgagttccagttttgtaatgatccattcctgggcgtgtactatcacaagaacaataagtcctggatggagtctgagtttcgcgtgtattctagcgccaacaattgcacatttgagtacgtgagccagcccttcctgatggacctggagggcaagcagggcaatttcaagaacctgagggagttcgtgtttaagaatatcgatggctacttcaagatctacagcaagcacaccccaatcaacctggtgcgcgacctgccacagggattctccgccctggagccactggtggatctgcccatcggcatcaacatcacccggtttcagacactgctggccctgcacagatcctacctgacaccaggcgactcctctagcggatggaccgcaggagctgccgcctactatgtgggctatctgcagccccggaccttcctgctgaagtacaacgagaatggcaccatcacagacgcagtggattgctcgtatgaccccctgtctgagacaaagtgtacactgaagagctttaccgtggagaagggcatctatcagacaagcaatttcagggtgcagcctaccgagtccatcgtgcgctttcccaatatcacaaacctgtgcccttttggcgaggtgttcaacgccaccagattcgccagcgtgtacgcctggaatcggaagagaatctccaactgcgtggccgactattctgtgctgtacaactccgcctctttcagcacctttaagtgctatggcgtgtctcccacaaagctgaatgatctgtgctttaccaacgtgtacgccgatagcttcgtgatcaggggagacgaagtgagacagatcgcaccaggacagacaggaaagatcgcagactacaattataagctgcctgacgatttcaccggctgcgtgatcgcctggaactccaacaatctggattctaaagtgggcggcaactacaattatctgtacaggctgtttcgcaagtccaatctgaagccattcgagcgggacatctccacagagatctaccaggccggctctaccccctgcaatggcgtggagggctttaactgttatttccctctgcagtcttacggcttccagccaacaaacggcgtgggctatcagccctacagagtggtggtgctgtcctttgagctgctgcacgcaccagcaacagtgtgcggcccaaagaagtctaccaatctggtgaagaacaagtgcgtgaacttcaacttcaacggactgaccggcacaggcgtgctgaccgagagcaataagaagttcctgccttttcagcagttcggcagggacatcgcagataccacagacgccgtgcgcgaccctcagaccctggagatcctggacatcacaccatgcagcttcggcggcgtgtccgtgatcacaccaggcaccaatacatccaaccaggtggccgtgctgtatcaggacgtgaattgtaccgaggtgcccgaagcaatccacgcagatcagctgacccctacatggcgggtgtactctaccggcagcaacgtgttccagacaagagccggatgcctgatcggagcagagcacgtgaacaatagctatgagtgcgacatccctatcggcgccggcatctgtgccagctaccagacccagacaaactccccatctggagcaggctccgtggccagccagtccatcatcgcctataccatgagcctgggcgccgagaacagcgtggcctactccaacaattctatcgccatccctaccaacttcacaatcagcgtgaccacagagatcctgccagtgtctatgaccaagacaagcgtggactgcacaatgtatatctgtggcgatagcaccgagtgctccaacctgctgctgcagtacggctccttttgtacccagctgaatagagccctgacaggcatcgccgtggagcaggataagaacacacaggaggtgttcgcccaggtgaagcagatctacaagaccccacccatcaaggactttggcggcttcaacttcagccagatcctgcctgatccaagcaagccctccaagaggtcttttatcgaggacctgctgttcaacaaggtgaccctggccgatgccggcttcatcaagcagtatggagattgcctgggagacatcgcagcccgcgacctgatctgtgcccagaagtttaatggcctgaccgtgctgcctccactgctgacagatgagatgatcgcccagtacacatctgccctgctggccggcaccatcacaagcggatggaccttcggcgcaggagccgccctgcagatcccttttgccatgcagatggcctataggttcaacggcatcggcgtgacccagaatgtgctgtacgagaaccagaagctgatcgccaatcagtttaacagcgccatcggcaagatccaggactctctgtcctctacagccagcgccctgggcaagctgcaggatgtggtgaatcagaacgcccaggccctgaataccctggtgaagcagctgagctccaacttcggcgccatctctagcgtgctgaatgacatcctgagccggctggacccccctgaggcagaggtgcagatcgacaggctgatcacaggccgcctgcagagcctgcagacctacgtgacacagcagctgatcagggcagcagagatcagagcctccgccaatctggccgccaccaagatgagcgagtgcgtgctgggacagtccaagagggtggacttttgtggcaagggctatcacctgatgtctttcccacagagcgcccctcacggcgtggtgtttctgcacgtgacctacgtgccagcccaggagaagaacttcaccacagcaccagccatctgccacgatggaaaggcacactttcctagggagggcgtgttcgtgtctaacggcacccactggtttgtgacacagcgcaatttctacgagccacagatcatcaccacagacaatacattcgtgagcggcaactgtgatgtggtgatcggcatcgtgaacaataccgtgtatgatccactgcagcccgagctggactcctttaaggaggagctggataagtacttcaagaatcacacctctcccgacgtggatctgggcgacatctccggcatcaatgcctctgtggtgaacatccagaaggagatcgaccggctgaacgaggtggccaagaatctgaacgagagcctgatcgatctgcaggagctgggcaagtatgagcagtacatcaagggctctggcagagagaacctgtatttccagggaggaggaggcagcggatacatccctgaggcaccaagggacggacaggcctacgtgcgcaaggatggcgagtgggtgctgctgtccacctttctgggccatcatcaccaccaccaccaccactga

SEQ ID NO: 1379 - DNA, 3846 bp, Artificial Sequence
  Description of Artificial Sequence: Synthetic polynucleotide
atgggcatcctgccaagcccaggaatgcccgccctgctgtctctggtgagcctgctgtccgtgctgctgatgggatgcgtggcagagacaggcacacagtgcgtgaacctgaccacaaggacccagctgccccctgcctataccaattctttcacacggggcgtgtactatcccgacaaggtgtttagaagctccgtgctgcactccacacaggatctgtttctgcctttcttttctaacgtgacctggttccacgccatccacgtgtccggcaccaatggcacaaagcggttcgacaatcccgtgctgccttttaacgatggcgtgtacttcgccagcaccgagaagtccaacatcatcagaggctggatctttggcaccacactggactctaagacacagagcctgctgatcgtgaacaatgccaccaacgtggtgatcaaggtgtgcgagttccagttttgtaatgatccattcctgggcgtgtactatcacaagaacaataagtcctggatggagtctgagtttcgcgtgtattctagcgccaacaattgcacatttgagtacgtgagccagcccttcctgatggacctgtcgggcaagcagggcaatttcaagaacctgagggagttcgtgtttaagaatatcgatggctacttcaagatctacagcaagcacaccccaatcaacctggtgcgcgacctgccacagggattctccgccctggagccactggtggatctgcccatcggcatcaacatcacccggtttcagacactgctggccctgcacagatcctacctgacaccaggcgactcctctagcggatggaccgcaggagctgccgcctactatgtgggctatctgcagccccggaccttcctgctgaagtacaacgagaatggcaccatcacagacgcagtggattgcgccctggaccccctgtctgagacaaagtgtacactgaagagctttaccgtggagaagggcatctatcagacaagcaatttcagggtgcagcctaccgagtccatcgtgcgctttcccaatatcacaaacctgtgcccttttggcgaggtgttcaacgccaccagattcgccagcgtgtacgcctggaatcggaagagaatctccaactgcgtggccgactattctgtgctgtacaactccgcctctttcagcacctttaagtgctatggcgtgtctcccacaaagctgaatgatctgtgctttaccaacgtgtacgccgatagcttcgtgatcaggggagacgaagtgagacagatcgcaccaggacagacaggaaagatcgcagactacaattataagctgcctgacgatttcaccggctgcgtgatcgcctggaactccaacaatctggattctaaagtgggcggcaactacaattatctgtacaggctgtttcgcaagtccaatctgaagccattcgagcgggacatctccacagagatctaccaggccggctctaccccctgcaatggcgtggagggctttaactgttatttccctctgcagtcttacggcttccagccaacaaacggcgtgggctatcagccctacagagtggtggtgctgtcctttgagctgctgcacgcaccagcaacagtgtgcggcccaaagaagtctaccaatctggtgaagaacaagtgcgtgaacttcaacttcaacggactgaccggcacaggcgtgctgaccgagagcaataagaagttcctgccttttcagcagttcggcagggacatcgcagataccacagacgccgtgcgcgaccctcagaccctggagatcctggacatcacaccatgcagcttcggcggcgtgtccgtgatcacaccaggcaccaatacatccaaccaggtggccgtgctgtatcaggacgtgaattgtaccgaggtgcccgtggcaatccacgcagatcagctgacccctacatggcgggtgtactctaccggcagcaacgtgttccagacaagagccggatgcctgatcggagcagagcacgtgaacaatagctatgagtgcgacatccctatcggcgccggcatctgtgccagctaccagacccagacaaactccccatctggagcaggctccgtggccagccagtccatcatcgcctataccatgagcctgggcgccgagaacagcgtggcctactccaacaattctatcgccatccctaccaacttcacaatcagcgtgaccacagagatcctgccagtgtctatgaccaagacaagcgtggactgcacaatgtatatctgtggcgatagcaccgagtgctccaacctgctgctgcagtacggctccttttgtacccagctgaatagagccctgacaggcatcgccgtggagcaggataagaacacacaggaggtgttcgcccaggtgaagcagatctacaagaccccacccatcaaggactttggcggcttcaacttcagccagatcctgcctgatccaagcaagccctccaagaggtcttttatcgaggacctgctgttcaacaaggtgaccctggccgatgccggcttcatcaagcagtatggagattgcctgggagacatcgcagcccgcgacctgatctgtgcccagaagtttaatggcctgaccgtgctgcctccactgctgacagatgagatgatcgcccagtacacatctgccctgctggccggcaccatcacaagcggatggaccttcggcgcaggagccgccctgcagatcccttttgccatgcagatggcctataggttcaacggcatcggcgtgacccagaatgtgctgtacgagaaccagaagctgatcgccaatcagtttaacagcgccatcggcaagatccaggactctctgtcctctacagccagcgccctgggcaagctgcaggatgtggtgaatcagaacgcccaggccctgaataccctggtgaagcagctgagctccaacttcggcgccatctctagcgtgctgaatgacatcctgagccggctggacccccctgaggcagaggtgcagatcgacaggctgatcacaggccgcctgcagagcctgcagacctacgtgacacagcagctgatcagggcagcagagatcagagcctccgccaatctggccgccaccaagatgagcgagtgcgtgctgggacagtccaagagggtggacttttgtggcaagggctatcacctgatgtctttcccacagagcgcccctcacggcgtggtgtttctgcacgtgacctacgtgccagcccaggagaagaacttcaccacagcaccagccatctgccacgatggaaaggcacactttcctagggagggcgtgttcgtgtctaacggcacccactggtttgtgacacagcgcaatttctacgagccacagatcatcaccacagacaatacattcgtgagcggcaactgtgatgtggtgatcggcatcgtgaacaataccgtgtatgatccactgcagcccgagctggactcctttaaggaggagctggataagtacttcaagaatcacacctctcccgacgtggatctgggcgacatctccggcatcaatgcctctgtggtgaacatccagaaggagatcgaccggctgaacgaggtggccaagaatctgaacgagagcctgatcgatctgcaggagctgggcaagtatgagcagtacatcaagggctctggcagagagaacctgtatttccagggaggaggaggcagcggatacatccctgaggcaccaagggacggacaggcctacgtgcgcaaggatggcgagtgggtgctgctgtccacctttctgggccatcatcaccaccaccaccaccactga

SEQ ID NO: 1380 - DNA, 3846 bp, Artificial Sequence
  Description of Artificial Sequence: Synthetic polynucleotide
atgggcatcctgccaagcccaggaatgcccgccctgctgtctctggtgagcctgctgtccgtgctgctgatgggatgcgtggcagagacaggcacacagtgcgtgaacctgaccacaaggacccagctgccccctgcctataccaattctttcacacggggcgtgtactatcccgacaaggtgtttagaagctccgtgctgcactccacacaggatctgtttctgcctttcttttctaacgtgacctggttccacgccatccacgtgtccggcaccaatggcacaaagcggttcgacaatcccgtgctgccttttaacgatggcgtgtacttcgccagcaccgagaagtccaacatcatcagaggctggatctttggcaccacactggactctaagacacagagcctgctgatcgtgaacaatgccaccaacgtggtgatcaaggtgtgcgagttccagttttgtaatgatccattcctgggcgtgtactatcacaagaacaataagtcctggatggagtctgagtttcgcgtgtattctagcgccaacaattgcacatttgagtacgtgagccagcccttcctgatggacctggagggcaagcagggcaatttcaagaacctgagggagttcgtgtttaagaatatcgatggctacttcaagatctacagcaagcacaccccaatcaacctggtgcgcgacctgccacagggattctccgccctggagccactggtggatctgcccatcggcatcaacatcacccggtttcagacactgctggccctgcacagatcctacctgacaccaggcgactcctctagcggatggaccgcaggagctgccgcctactatgtgggctatctgcagccccggaccttcctgctgaagtacaacgagaatggcaccatcacagacgcagtggattgcgccctggaccccctgtctgagacaaagtgtacactgaagagctttaccgtggagaagggcatctatcagacaagcaatttcagggtgcagcctaccgagtccatcgtgcgctttcccaatatcacaaacctgtgcccttttggcgaggtgttcaacgccaccagattcgccagcgtgtacgcctggaatcggaagagaatctccaactgcgtggccgactattctgtgctgtacaactccgcctctttcagcacctttaagtgctatggcgtgtctcccacaaagctgaatgatctgtgctttaccaacgtgtacgccgatagcttcgtgatcaggggagacgaagtgagacagatcgcaccaggacagacaggaaagatcgcagactacaattataagctgcctgacgatttcaccggctgcgtgatcgcctggaactccaacaatctggattctaaagtgggcggcaactacaattatctgtacaggctgtttcgcaagtccaatctgaagccattcgagcgggacatctccacagagatctaccaggccggctctaccccctgcaatggcgtggagggctttaactgttatttccctctgcagtcttacggcttccagccaacaaacggcgtgggctatcagccctacagagtggtggtgctgtcctttgagctgctgcacgcaccagcaacagtgtgcggcccaaagaagtctaccaatctggtgaagaacaagtgcgtgaacttcaacttcaacggactgaccggcacaggcgtgctgaccgagagcaataagaagttcctgccttttcagcagttcggcagggacatcgcagataccacagacgccgtgcgcgaccctcagaccctggagatcctggacatcacaccatgcagcttcggcggcgtgtccgtgatcacaccaggcaccaatacatccaaccaggtggccgtgctgtatcaggacgtgaattgtaccgaggtgcccgtggcaatccacgcagatcagctgacccctacatggcgggtgtactctaccggcagcaacgtgttccagacaagagccggatgcctgatcggagcagagcacgtgaacaatagctatgagtgcgacatccctatcggcgccggcatctgtgccagctaccagacccagacaaactccccatctggagcaggctccgtggccagccagtccatcatcgcctataccatgagcctgggcgccgagaacagcgtggcctactccaacaattctatcgccatccctaccaacttcacaatcagcgtgaccacagagatcctgccagtgtctatgaccaaggtcagcgtggactgcacaatgtatatctgtggcgatagcaccgagtgctccaacctgctgctgcagtacggctccttttgtacccagctgaatagagccctgacaggcatcgccgtggagcaggataagaacacacaggaggtgttcgcccaggtgaagcagatctacaagaccccacccatcaaggactttggcggcttcaacttcagccagatcctgcctgatccaagcaagccctccaagaggtcttttatcgaggacctgctgttcaacaaggtgaccctggccgatgccggcttcatcaagcagtatggagattgcctgggagacatcgcagcccgcgacctgatctgtgcccagaagtttaatggcctgaccgtgctgcctccactgctgacagatgagatgatcgcccagtacacatctgccctgctggccggcaccatcacaagcggatggaccttcggcgcaggagccgccctgcagatcccttttgccatgcagatggcctataggttcaacggcatcggcgtgacccagaatgtgctgtacgagaaccagaagctgatcgccaatcagtttaacagcgccatcggcaagatccaggactctctgtcctctacagccagcgccctgggcaagctgcaggatgtggtgaatcagaacgcccaggccctgaataccctggtgaagcagctgagctccaacttcggcgccatctctagcgtgctgaatgacatcctgagccggctggacccccctgaggcagaggtgcagatcgacaggctgatcacaggccgcctgcagagcctgcagacctacgtgacacagcagctgatcagggcagcagagatcagagcctccgccaatctggccgccaccaagatgagcgagtgcgtgctgggacagtccaagagggtggacttttgtggcaagggctatcacctgatgtctttcccacagagcgcccctcacggcgtggtgtttctgcacgtgacctacgtgccagcccaggagaagaacttcaccacagcaccagccatctgccacgatggaaaggcacactttcctagggagggcgtgttcgtgtctaacggcacccactggtttgtgacacagcgcaatttctacgagccacagatcatcaccacagacaatacattcgtgagcggcaactgtgatgtggtgatcggcatcgtgaacaataccgtgtatgatccactgcagcccgagctggactcctttaaggaggagctggataagtacttcaagaatcacacctctcccgacgtggatctgggcgacatctccggcatcaatgcctctgtggtgaacatccagaaggagatcgaccggctgaacgaggtggccaagaatctgaacgagagcctgatcgatctgcaggagctgggcaagtatgagcagtacatcaagggctctggcagagagaacctgtatttccagggaggaggaggcagcggatacatccctgaggcaccaagggacggacaggcctacgtgcgcaaggatggcgagtgggtgctgctgtccacctttctgggccatcatcaccaccaccaccaccactga

SEQ ID NO: 1381 - DNA, 3846 bp, Artificial Sequence
  Description of Artificial Sequence: Synthetic polynucleotide
atgggcatcctgccaagcccaggaatgcccgccctgctgtctctggtgagcctgctgtccgtgctgctgatgggatgcgtggcagagacaggcacacagtgcgtgaacctgaccacaaggacccagctgccccctgcctataccaattctttcacacggggcgtgtactatcccgacaaggtgtttagaagctccgtgctgcactccacacaggatctgtttctgcctttcttttctaacgtgacctggttccacgccatccacgtgtccggcaccaatggcacaaagcggttcgacaatcccgtgctgccttttaacgatggcgtgtacttcgccagcaccgagaagtccaacatcatcagaggctggatctttggcaccacactggactctaagacacagagcctgctgatcgtgaacaatgccaccaacgtggtgatcaaggtgtgcgagttccagttttgtaatgatccattcctgggcgtgtactatcacaagaacaataagtcctggatggagtctgagtttcgcgtgtattctagcgccaacaattgcacatttgagtacgtgagccagcccttcctgatggacctggagggcaagcagggcaatttcaagaacctgagggagttcgtgtttaagaatatcgatggctacttcaagatctacagcaagcacaccccaatcaacctggtgcgcgacctgccacagggattctccgccctggagccactggtggatctgcccatcggcatcaacatcacccggtttcagacactgctggccctgcacagatcctacctgacaccaggcgactcctctagcggatggaccgcaggagctgccgcctactatgtgggctatctgcagccccggaccttcctgctgaagtacaacgagaatggcaccatcacagacgcagtggattgcgccctggaccccctgtctgagacaaagtgtacactgaagagctttaccgtggagaagggcatctatcagacaagcaatttcagggtgcagcctaccgagtccatcgtgcgctttcccaatatcacaaacctgtgcccttttggcgaggtgttcaacgccaccagattcgccagcgtgtacgcctggaatcggaagagaatctccaactgcgtggccgactattctgtgctgtacaactccgcctctttcagcacctttaagtgctatggcgtgtctcccacaaagctgaatgatctgtgctttaccaacgtgtacgccgatagcttcgtgatcaggggagacgaagtgagacagatcgcaccaggacagacaggaaagatcgcagactacaattataagctgcctgacgatttcaccggctgcgtgatcgcctggaactccaacaatctggattctaaagtgggcggcaactacaattatctgtacaggctgtttcgcaagtccaatctgaagccattcgagcgggacatctccacagagatctaccaggccggctctaccccctgcaatggcgtggagggctttaactgttatttccctctgcagtcttacggcttccagccaacaaacggcgtgggctatcagccctacagagtggtggtgctgtcctttgagctgctgcacgcaccagcaacagtgtgcggcccaaagaagtctaccaatctggtgaagaacaagtgcgtgaacttcaacttcaacggactgaccggcacaggcgtgctgaccgagagcaataagaagttcctgccttttcagcagttcggcagggacatcgcagataccacagacgccgtgcgcgaccctcagaccctggagatcctggacatcacaccatgcagcttcggcggcgtgtccgtgatcacaccaggcaccaatacatccaaccaggtggccgtgctgtatcaggacgtgaattgtaccgaggtgcccgaagcaatccacgcagatcagctgacccctacatggcgggtgtactctaccggcagcaacgtgttccagacaagagccggatgcctgatcggagcagagcacgtgaacaatagctatgagtgcgacatccctatcggcgccggcatctgtgccagctaccagacccagacaaactccccatctggagcaggctccgtggccagccagtccatcatcgcctataccatgagcctgggcgccgagaacagcgtggcctactccaacaattctatcgccatccctaccaacttcacaatcagcgtgaccacagagatcctgccagtgtctatgaccaagacaagcgtggactgcacaatgtatatctgtggcgatagcaccgagtgctccaacctgctgctgcagtacggctccttttgtacccagctgaatagagccctgacaggcatcgccgtggagcaggataagaacacacaggaggtgttcgcccaggtgaagcagatctacaagaccccacccatcaaggactttggcggcttcaacttcagccagatcctgcctgatccaagcaagccctccaagaggtcttttatcgaggacctgctgttcaacaaggtgaccctggccgatgccggcttcatcaagcagtatggagattgcctgggagacatcgcagcccgcgacctgatctgtgcccagaagtttaatggcctgaccgtgctgcctccactgctgacagatgagatgatcgcccagtacacatctgccctgctggccggcaccatcacaagcggatggaccttcggcgcaggagccgccctgcagatcccttttgccatgcagatggcctataggttcaacggcatcggcgtgacccagaatgtgctgtacgagaaccagaagctgatcgccaatcagtttaacagcgccatcggcaagatccaggactctctgtcctctacagccagcgccctgggcaagctgcaggatgtggtgaatcagaacgcccaggccctgaataccctggtgaagcagctgagctccaacttcggcgccatctctagcgtgctgaatgacatcctgagccggctggacccccctgaggcagaggtgcagatcgacaggctgatcacaggccgcctgcagagcctgcagacctacgtgacacagcagctgatcagggcagcagagatcagagcctccgccaatctggccgccaccaagatgagcgagtgcgtgctgggacagtccaagagggtggacttttgtggcaagggctatcacctgatgtctttcccacagagcgcccctcacggcgtggtgtttctgcacgtgacctacgtgccagcccaggagaagaacttcaccacagcaccagccatctgccacgatggaaaggcacactttcctagggagggcgtgttcgtgtctaacggcacccactggtttgtgacacagcgcaatttctacgagccacagatcatcaccacagacaatacattcgtgagcggcaactgtgatgtggtgatcggcatcgtgaacaataccgtgtatgatccactgcagcccgagctggactcctttaaggaggagctggataagtacttcaagaatcacacctctcccgacgtggatctgggcgacatctccggcatcaatgcctctgtggtgaacatccagaaggagatcgaccggctgaacgaggtggccaagaatctgaacgagagcctgatcgatctgcaggagctgggcaagtatgagcagtacatcaagggctctggcagagagaacctgtatttccagggaggaggaggcagcggatacatccctgaggcaccaagggacggacaggcctacgtgcgcaaggatggcgagtgggtgctgctgtccacctttctgggccatcatcaccaccaccaccaccactga

SEQ ID NO: 1382 - DNA, 3846 bp, Artificial Sequence
  Description of Artificial Sequence: Synthetic polynucleotide
atgggcatcctgccaagcccaggaatgcccgccctgctgtctctggtgagcctgctgtccgtgctgctgatgggatgcgtggcagagacaggcacacagtgcgtgaacctgaccacaaggacccagctgccccctgcctataccaattctttcacacggggcgtgtactatcccgacaaggtgtttagaagctccgtgctgcactccacacaggatctgtttctgcctttcttttctaacgtgacctggttccacgccatccacgtgtccggcaccaatggcacaaagcggttcgacaatcccgtgctgccttttaacgatggcgtgtacttcgccagcaccgagaagtccaacatcatcagaggctggatctttggcaccacactggactctaagacacagagcctgctgatcgtgaacaatgccaccaacgtggtgatcaaggtgtgcgagttccagttttgtaatgatccattcctgggcgtgtactatcacaagaacaataagtcctggatggagtctgagtttcgcgtgtattctagcgccaacaattgcacatttgagtacgtgagccagcccttcctgatggacctggagggcaagcagggcaatttcaagaacctgagggagttcgtgtttaagaatatcgatggctacttcaagatctacagcaagcacaccccaatcaacctggtgcgcgacctgccacagggattctccgccctggagccactggtggatctgcccatcggcatcaacatcacccggtttcagacactgctggccctgcacagatcctacctgacaccaggcgactcctctagcggatggaccgcaggagctgccgcctactatgtgggctatctgcagccccggaccttcctgctgaagtacaacgagaatggcaccatcacagacgcagtggattgcgccctggaccccctgtctgagacaaagtgtacactgaagagctttaccgtggagaagggcatctatcagacaagcaatttcagggtgcagcctaccgagtccatcgtgcgctttcccaatatcacaaacctgtgcccttttggcgaggtgttcaacgccaccagattcgccagcgtgtacgcctggaatcggaagagaatctccaactgcgtggccgactattctgtgctgtacaactccgcctctttcagcacctttaagtgctatggcgtgtctcccacaaagctgaatgatctgtgctttaccaacgtgtacgccgatagcttcgtgatcaggggagacgaagtgagacagatcgcaccaggacagacaggaaagatcgcagactacaattataagctgcctgacgatttcaccggctgcgtgatcgcctggaactccaacaatctggattctaaagtgggcggcaactacaattatctgtacaggctgtttcgcaagtccaatctgaagccattcgagcgggacatctccacagagatctaccaggccggctctaccccctgcaatggcgtggagggctttaactgttatttccctctgcagtcttacggcttccagccaacaaacggcgtgggctatcagccctacagagtggtggtgctgtcctttgagctgctgcacgcaccagcaacagtgtgcggcccaaagaagtctaccaatctggtgaagaacaagtgcgtgaacttcaacttcaacggactgaccggcacaggcgtgctgaccgagagcaataagaagttcctgccttttcagcagttcggcagggacatcgcagataccacagacgccgtgcgcgaccctcagaccctggagatcctggacatcacaccatgcagcttcggcggcgtgtccgtgatcacaccaggcaccaatacatccaaccaggtggccgtgctgtatcaggacgtgaattgtaccgaggtgcccgtggcaatccacgcagatcagctgacccctacatggcgggtgtactctaccggcagcaacgtgttccagacaagagccggatgcctgatcggagcagagcacgtgaacaatagctatgagtgcgacatccctatcggcgccggcatctgtgccagctaccagacccagacaaactccccatctggagcaggctccgtggccagccagtccatcatcgcctataccatgagcctgggcgccgagaacagcgtggcctactccaacaattctatcgccatccctaccaacttcacaatcagcgtgaccacagagatcctgccagtgtctatgaccaagacaagcgtggactgcacaatgtatatctgtggcgatagcccggagtgctccaacctgctgctgcagtacggctccttttgtacccagctgaatagagccctgacaggcatcgccgtggagcaggataagaacacacaggaggtgttcgcccaggtgaagcagatctacaagaccccacccatcaaggactttggcggcttcaacttcagccagatcctgcctgatccaagcaagccctccaagaggtcttttatcgaggacctgctgttcaacaaggtgaccctggccgatgccggcttcatcaagcagtatggagattgcctgggagacatcgcagcccgcgacctgatctgtgcccagaagtttaatggcctgaccgtgctgcctccactgctgacagatgagatgatcgcccagtacacatctgccctgctggccggcaccatcacaagcggatggaccttcggcgcaggagccgccctgcagatcccttttgccatgcagatggcctataggttcaacggcatcggcgtgacccagaatgtgctgtacgagaaccagaagctgatcgccaatcagtttaacagcgccatcggcaagatccaggactctctgtcctctacagccagcgccctgggcaagctgcaggatgtggtgaatcagaacgcccaggccctgaataccctggtgaagcagctgagctccaacttcggcgccatctctagcgtgctgaatgacatcctgagccggctggacccccctgaggcagaggtgcagatcgacaggctgatcacaggccgcctgcagagcctgcagacctacgtgacacagcagctgatcagggcagcagagatcagagcctccgccaatctggccgccaccaagatgagcgagtgcgtgctgggacagtccaagagggtggacttttgtggcaagggctatcacctgatgtctttcccacagagcgcccctcacggcgtggtgtttctgcacgtgacctacgtgccagcccaggagaagaacttcaccacagcaccagccatctgccacgatggaaaggcacactttcctagggagggcgtgttcgtgtctaacggcacccactggtttgtgacacagcgcaatttctacgagccacagatcatcaccacagacaatacattcgtgagcggcaactgtgatgtggtgatcggcatcgtgaacaataccgtgtatgatccactgcagcccgagctggactcctttaaggaggagctggataagtacttcaagaatcacacctctcccgacgtggatctgggcgacatctccggcatcaatgcctctgtggtgaacatccagaaggagatcgaccggctgaacgaggtggccaagaatctgaacgagagcctgatcgatctgcaggagctgggcaagtatgagcagtacatcaagggctctggcagagagaacctgtatttccagggaggaggaggcagcggatacatccctgaggcaccaagggacggacaggcctacgtgcgcaaggatggcgagtgggtgctgctgtccacctttctgggccatcatcaccaccaccaccaccactga

SEQ ID NO: 1383 - DNA, 3846 bp, Artificial Sequence
  Description of Artificial Sequence: Synthetic polynucleotide
atgggcatcctgccaagcccaggaatgcccgccctgctgtctctggtgagcctgctgtccgtgctgctgatgggatgcgtggcagagacaggcacacagtgcgtgaacctgaccacaaggacccagctgccccctgcctataccaattctttcacacggggcgtgtactatcccgacaaggtgtttagaagcgatgtgctgcactccacacaggatctgtttctgcctttcttttctaacgtgacctggttccacgccatccacgtgtccggcaccaatggcacaaaggacttcgacaatcccgtgctgccttttaacgatggcgtgtacttcgccagcaccgagaagtccaacatcatcagaggctggatctttggcaccacactggactctaagacacagagcctgctgatcgtgaacaatgccaccaacgtggtgatcaaggtgtgcgagttccagttttgtgaaaatccattcctgggcgtgtactatcacaagaacaataagtcctggatggagaaagagtttcgcgtgtattctagcgccaacaattgcacatttgagtacgtgagccagcccttcctgatggacctgggtggcaagcagggcaatttcaagtggctgagggagttcgtgtttaagaatatcgatggctacttcaagatctacagcaagcacaccccaatcaacctggtgcgcgacctgccacagggattctccgccctggagccactgatggatctgcccatcggcatcaacatcacccggtttcagacactgctggccctgcacagatcctacctgacaccaggcgactcctctagcggatggaccgcaggagctgccgcctactatgtgggctatctgcagccccggaccttcctgctgaagtacaacgagaatggcaccatcacagacgcagtggattgcgcctatgaccccctgtctgagacaaagtgtacactgaagagctttaccgtggagaagggcatctatcagacaagcaatttcagggtgcagcctaccgagtccatcgtgcgctttcccaatatcacaaacctgtgcccttttggcgaggtgttcaacgccaccagattcgccagcgtgtacgcctggaatcggaagagaatctccaactgcgtggccgactattctgtgctgtacaactccgcctctttcagcacctttaagtgctatggcgtgtctcccacaaagctgaatgatctgtgctttaccaacgtgtacgccgatagcttcgtgatcaggggagacgaagtgagacagatcgcaccaggacagacaggaaagatcgcagactacaattataagctgcctgacgatttcaccggctgcgtgatcgcctggaactccaacaatctggattctaaagtgggcggcaactacaattatctgtacaggctgtttcgcaagtccaatctgaagccattcgagcgggacatctccacagagatctaccaggccggctctaccccctgcaatggcgtggagggctttaactgttatttccctctgcagtcttacggcttccagccaacaaacggcgtgggctatcagccctacagagtggtggtgctgtcctttgagctgctgcacgcaccagcaacagtgtgcggcccaaagaagtctaccaatctggtgaagaacaagtgcgtgaacttcaacttcaacggactgaccggcacaggcgtgctgaccgagagcaataagaagttcctgccttttcagcagttcggcagggacatcgcagataatacagacgccgtgcgcgaccctcagaccctggagatcctggacatcacaccatgcagcttcggcggcgtgtccgtgatcacaccaggcaccaatacatccaaccaggtggccgtgctgtatcaggacgtgaattgtaccgaggtgcccaatgcaatccacgcagatcagctgacccctacatggcgggtgtactctaccggcagcaacgtgttccagacaagagccggatgcctgatcggagcagagcacgtgaacaatagctatgagtgcgacatccctatcggcgccggcatctgtgccagctaccagacccagacaaactccccatctggagcaggctccgtggccagccagtccatcatcgcctataccatgagcctgggcgccgagaacagcgtggcctactccaacaattctatcgccatccctaccaacttcacaatcagcgtgaccacagagatcctgccagtgtctatgaccaagacaagcgtggactgcacaatgtatatctgtggcgatagcaccgagtgctccaacctgctgctgcagtacggctccttttgtacccagctgaatagagccctgcaaggcatcgcccaagagcaggataagaacacacaggaggtgttcgcccaggtgaagcagatctacaagaccccacccatcaaggactttggcggcttcaacttcagccagatcctgcctgatccaagcaagccctccaagaggtcttttatcgaggacctgctgttcaacaaggtgaccctggccgatgccggcttcatcaagcagtatggagattgcctgggagacatcgcagcccgcgacctgatctgtgcccagaagtttaatggcctgaccgtgctgcctccactgctgacagatgagatgatcgcccagtacacatctgccctgctggccggcaccatcacaagcggatggaccttcggcgcaggagccgccctgcagatcccttttgccatgcagatggcctataggttcaacggcatcggcgtgacccagaatgtgctgtacgagaaccagaagctgatcgccaatcagtttaacaaagccatcggcaagatccaggactctctgtcctctacagccagcgccctgggcaagctgcaggatgtggtgaatcagaacgcccaggccctgaataccctggtgaagcagctgagctccaacttcggcgccatctctagcgtgctgaatgacatcctgagccggctggacccccctgaggcagaggtgcagatcgacaggctgatcacaggccgcctgcagagcctgcagacctacgtgacacagcagctgatcagggcagcagagatcagagcctccgccaatctggccgccaccaagatgagcgagtgcgtgctgggacagtccaagagggtggacttttgtggcaagggctatcacctgatgtctttcccacagagcgcccctcacggcgtggtgtttctgcacgtgacctacgtgccagcccaggagaagaacttcaccacagcaccagccatctgccacgatggaaaggcattttttcctagggagggcgtgttcgtgtctaacggcacccaatggtttgtgacacagcgcaatttctacgagccacagatcatcaccacagacaatacattcgtgagcggcaactgtgatgtggtgatcggcatcgtgaacaataccgtgtatgatccactgcagcccgagctggactcctttaaggaggagctggataagtacttcaagaatcacacctctcccgacgtggatctgggcgacatctccggcatcaatgcctctgtggtgaacatccagaaggagatcgaccggctgaacgaggtggccaagaatctgaacgagagcctgatcgatctgcaggagctgggcaagtatgagcagtacatcaagggctctggcagagagaacctgtatttccagggaggaggaggcagcggatacatccctgaggcaccaagggacggacaggcctacgtgcgcaaggatggcgagtgggtgctgctgtccacctttctgggccatcatcaccaccaccaccaccactga

SEQ ID NO: 1384 - DNA, 3846 bp, Artificial Sequence
  Description of Artificial Sequence: Synthetic polynucleotide
atgggcatcctgccaagcccaggaatgcccgccctgctgtctctggtgagcctgctgtccgtgctgctgatgggatgcgtggcagagacaggcacacagtgcgtgaacctgaccacaaggacccagctgccccctgcctataccaattctttcacacggggcgtgtactatcccgacaagatatttagaagcaatgtgctgcactccacacaggatctgtttctgcctttcttttctaacgtgacctggttccacgcccttcacgtgaaaggcaccaatggcacaaagcggttcgacaatcccgtgctgccttttaacgatggcgtgtacttcgccgcgattgagaagtccaacatcatcagaggctggatctttggcaccacactggactctaagacacagagcctgctgatcgtgaacaatgccaccaacgtggtgatccgcgtgtgcgagttccagttttgtgaaaacccattcctgggcgtgtactatcacaagaacaataagtcctggcgagaggaagagtttcgctggtattctagcgccaacaattgcacatttgagtacgtgagccagcccttcctgtacgacctgaatggcaagcagggcaatttccatcatctgagggagttcgtgtttaagaatatcgatggctacttcaagatctacagcaagtgggaaccaatcaacctggtgcgcgacctgccacagggattctccccgctggagccactgatggatctgcccatcggcatcaacatcacccattttcagacatttctgtcactgtcaagatcctaccgtacaccaggcgactcctctagcggatggaccgcaggagctgccgcctactatgtgggctatctgcagccccggaccttcctgctgaagtacgatgagaatggctatatcacagacgcagtggattgctcgctggaccccctgtctgagacaaagtgtaaactgaagagctttaccgtggagaagggcatctatcagacaagcaatttcagggtgcagcctacctatgaaatcgtgcgctttcccaatatcacaaactgttgcccttttgatgaggtgttcaacgccccaagattcgccagcgtgtacaattgggaacggtatagaatctccaactgcgtggccgactattctgtgctgtacaactccgcctctttcagcacctttcaatgctatggcgtgtctcccacaaagctgaatgatctgtgctttaccaacgtgtacgccgatgtcttcgtgatcaggggaagtgaagtgagacagatcgcaccaggacagacaggaccgatcgcagactacaattataagctgcctgacgatttcaccggctgcgtgatcgcctggaactccaacaatctggattctactgtgggcggcaactacaattatctgtacaggctgtttcgcaagtccaatatgaagccattcgagcgggacatctccacagaggcttaccaggccggctgtaccccctgcaatggcgtggagggctttaactgttatttccctctgcagtcttacggcttccagccaacaaacggcgtgggctatcagccctacagagtggtggtgctgaaatttgagctgctgcacgcaccagcaacagtgtgcggcccaaaggacccgaccaatctggtgaagaacaagtgcgtggattacaacttcaacggacgaaccggcacaggcgtgctgaccgagagcaataagaagttcctgccttttcagcagttcggcagggacatcagtgataccacagacgccgtgcgcgaccctactaccggagagatcctgtgtatcacaccatgcagcttcggcggcgtgtccgtgatcacaccaggcaccaatacatccaaccaggtggccgtgctgtatcaggacgtgaattgtaccgaggtgcccgaagcaatccactcaaaccagctgcggcctacatggcgggtgtactctaccggcagcaacgtgttccagacaagagccggatgcctgatcggagcagagcacgtgaacaatagctatgagtgcgacatccctatcggcaacggcatctgtgccagctaccagacccagacaaactccccatctggatccggctccgtgtcaagccagtccatcatcgcctataccatgagcctgggcgccgagaaccccgtgccttactccaacaataatatcgccatccctaccaacttcacaatcagcgtgcaaacagagatcctgccagtgtctatgccgaaggttagcgtggactgcacaatgtatatctgtggcgatagcaccgagtgccttaacctgctgagtcagtacggctccttttgtgatcagctggaaagagccctgaatggcatcgcccgcgagcaggataagaacctcttgaacgtgttcgcccaggtgaagcagatctacaagaccccacccatcaaggactttggcggcttcaacttcagccagatcctgcctgatccaagcaagccctccaagaggtcttttatcgaggacctgctgttcaacaaggtgaccctggccgatttgggcttcgtaaagcagtataaagattgcctgggagatcaagcagcccgcgacctgatctgtgcccagaagtttaatggcataatggtgctgcctccactgctgacagatgagatgatcgcccagtacacagcgagtctgctggccggcaccatcacagcaggatggaccttcggcgcaggagccgccctggtaatcccttttgccatgcagatggcctataggttcaacggcatcggcgtgcaacagaatgtgctgtacgagaaccagaagattatcgccaatcagtttaacaatgccatcggcaatatccaggacggtctgtccactacagccagcgccctgtcgaagctgcaggatgtggtgaatcagcaagcccaggccctgaatgaactggtgaagcagctgagctccaacttcggcgccatctctagcgtgataaatgacatctataatcggctggacaaacctgaggcacaagctcagatcgacaggctgatcacaggccgcctgcagagcctgcagacctacgtgacacagcagctgatcagggcaacggagatcagagcctccgcccaactggccgccgaaaagatgagcgagtgcgtgaaaggacagtccaacaggtatggtttttgtggcaatggctatcacctgatgtctttcccacagagcgcccctcacggcgtggtgtttctgcacgtgacctacgtgccaactcagtttaagaacttcaccacagcaccagggatctgccacgatggaaaggcatactttcctagggagggcgtgttcgtgtctaacggcaccgaatggtatattacacagcgcaatttctacgagccacgacccatcaccacagacaatacattcgtgagcggcaactgtgatgtggtgatcggcatcgtgaacaataccgtgtatgatccactgcagcccgagctggactcctttaaggaggagctggataagtacttcaagaatcacacctctcccgacgtggatctgggcgacatctccggcatcaatgcctctgtggtgaacatccagaaggagatcgaccggctgaacgaggtggccaagaatctgaacgagagcctgatcgatctgcaggagctgggcaagtatgagcagtacatcaagggctctggcagagagaacctgtatttccagggaggaggaggcagcggatacatccctgaggcaccaagggacggacaggcctacgtgcgcaaggatggcgagtgggtgctgctgtccacctttctgggccatcatcaccaccaccaccaccactga

SEQ ID NO: 1385 - DNA, 3846 bp, Artificial Sequence
  Description of Artificial Sequence: Synthetic polynucleotide
atgggcatcctgccaagcccaggaatgcccgccctgctgtctctggtgagcctgctgtccgtgctgctgatgggatgcgtggcagagacaggcacacagtgcgtgaacctgaccacaaggacccagctgccccctgcctataccaattctttcacacggggcgtgtactatcccgacaaggtgtttagaagctccgtgctgcactccacacaggatctgtttctgcctttcttttctaacgtgacctggttccacgccatccacgtgtccggcaccaatggcacaaagcggttcgacaatcccgtgctgccttttaacgatggcgtgtacttcgccgcgaccgagaagtccaacatcatcagaggctggatctttggcaccacactggactctaagacacagagcctgctgatcgtgaacaatgccaccaacgtggtgatcaaggtgtgcgagttccagttttgtaatgatccattcctgggcgtgtactatcacaagaacaataagtcctggatggagtctgagtttcgcgtgtattctagcgccaacaattgcacatttgagtacgtgagccagcccttcctgatggacctggagggcaagcagggcaatttcaagaacctgagggagttcgtgtttaagaatatcgatggctacttcaagatctacagcaagcacaccccaatcaacctggtgcgcgacctgccacagggattctccgccctggagccactggtggatctgcccatcggcatcaacatcacccggtttcagacactgctggccctgcacagatcctacctgacaccaggcgactcctctagcggatggaccgcaggagctgccgcctactttgtgggctatctgcagccccggaccttcctgctgaagtacaacgagaatggcaccatcacagacgcagtggattgcgccctggaccccctgtctgagacaaagtgtacactgaagagctttaccgtggagaagggcatctatcagacaagcaatttcagggtgcagcctaccgagtccatcgtgcgctttcccaatatcacaaacctgtgcccttttggcgaggtgttcaacgccaccagattcgccagcgtgtacgcctggaatcggaagagaatctccaactgcgtggccgactattctgtgctgtacaactccgcctctttcagcacctttaagtgctatggcgtgtctcccacaaagctgaatgatctgtgctttaccaacgtgtacgccgatagcttcgtgatcaggggagacgaagtgagacagatcgcaccaggacagacaggaaagatcgcagactacaattataagctgcctgacgatttcaccggctgcgtgatcgcctggaactccaacaatctggattctaaagtgggcggcaactacaattatctgtacaggctgtttcgcaagtccaatctgaagccattcgagcgggacatctccacagagatctaccaggccggctctaccccctgcaatggcgtggagggctttaactgttatttccctctgcagtcttacggcttccagccaacaaacggcgtgggctatcagccctacagagtggtggtgctgtcctttgagctgctgcacgcaccagcaacagtgtgcggcccaaagaagtctaccaatctggtgaagaacaagtgcgtgaacttcaacttcaacggactgaccggcacaggcgtgctgaccgagagcaataagaagttcctgccttttcagcagttcggcagggacatctcagataccacagacgccgtgcgcgaccctcagaccctggagatcctggacatcacaccatgcagcttcggcggcgtgtccgtgatcacaccaggcaccaatacatccaaccaggtggccgtgctgtatcaggacgtgaattgtaccgaggtgcccgtggcaatccacgcagatcagctgacccctacatggcgggtgtactctaccggcagcaacgtgttccagacaagagccggatgcctgatcggagcagagcacgtgaacaatagctatgagtgcgacatccctatcggcgccggcatctgtgccagctaccagacccagacaaactccccatctggagcaggctccgtggccagccagtccatcatcgcctataccatgagcctgggcgccgagaacagcgtggcctactccaacaattctatcgccatccctaccaacttcacaatcagcgtgaccacagagatcctgccagtgtctatgaccaagacaagcgtggactgcacaatgtatatctgtggcgatagcaccgagtgctccaacctgctgctgcagtacggctccttttgtacccagctgaatagagccctgacaggcatcgccgtggagcaggataagaacacacaggaggtgttcgcccaggtgaagcagatctacaagaccccacccatcaaggactttggcggcttcaacttcagccagatcctgcctgatccaagcaagccctccaagaggtcttttatcgaggacctgctgttcaacaaggtgaccctggccgatgccggcttcatcaagcagtatggagattgcctgggagacatcgcagcccgcgacctgatctgtgcccagaagtttaatggcctgaccgtgctgcctccactgctgacagatgagatgatcgcccagtacacatctgccctggtagccggcaccatcacagctggatggaccttcggcgcaggagccgccctgcagatcccttttgccatgcagatggcctataggttcaacggcatcggcgtgacccagaatgtgctgtacgagaaccagaagctgatcgccaatcagtttaacagcgccatcggcaagatccaggactctctgtcctctacagccagcgccctgggcaagctgcaggatgtggtgaatcagaacgcccaggccctgaataccctggtgaagcagctgagctccaacttcggcgccatctctagcgtgctgaatgacatcctgagccggctggacccccctgaggcagaggtgcagatcgacaggctgatcacaggccgcctgcagagcctgcagacctacgtgacacagcagctgatcagggcagcagagatcagagcctccgccaatctggccgccaccaagatgagcgagtgcgtgctgggacagtccaagagggtggacttttgtggcaagggctatcacctgatgtctttcccacaggctgcccctcacggcgtggtgtttctgcacgtgacctacgtgccagcccaggagaagaacttcaccacagcaccagccatctgccacgatggaaaggcacactttcctagggagggcgtgttcgtgtctaacggcacccactggtttgtgacacagcgcaatttctacgagccacagatcatcaccacagacaatacattcgtgagcggcaactgtgatgtggtgatcggcatcgtgaacaataccgtgtatgatccactgcagcccgagctggactcctttaaggaggagctggataagtacttcaagaatcacacctctcccgacgtggatctgggcgacatctccggcatcaatgcctctgtggtgaacatccagaaggagatcgaccggctgaacgaggtggccaagaatctgaacgagagcctgatcgatctgcaggagctgggcaagtatgagcagtacatcaagggctctggcagagagaacctgtatttccagggaggaggaggcagcggatacatccctgaggcaccaagggacggacaggcctacgtgcgcaaggatggcgagtgggtgctgctgtccacctttctgggccatcatcaccaccaccaccaccactga

SEQ ID NO: 1386 - DNA, 3846 bp, Artificial Sequence
  Description of Artificial Sequence: Synthetic polynucleotide
atgggcatcctgccaagcccaggaatgcccgccctgctgtctctggtgagcctgctgtccgtgctgctgatgggatgcgtggcagagacaggcacacagtgcgtgaacctgaccacaaggacccagctgccccctgcctataccaattctttcacacggggcgtgtactatcccgacaaggtgtttagaagctccgtgctgcactccacacaggatctgtttctgcctttcttttctaacgtgacctggttccacgccatccacgtgtccggcaccaatggcacaaagcggttcgacaatcccgtgctgccttttaacgatggcgtgtacttcgccagcaccgagaagtccaacatcatcagaggctggatctttggcaccacactggactctaagacacagagcctgctgatcgtgaacaatgccaccaacgtggtgatcaaggtgtgcgagttccagttttgtaatgatccattcctgggcgtgtactatcacaagaacaataagtcctggatggagtctgagtttcgcgtgtattctagcgccaacaattgcacatttgagtacgtgagccagcccttcctgatggacctggagggcaagcagggcaatttcaagaacctgagggagttcgtgtttaagaatatcgatggctacttcaagatctacagcaagcacaccccaatcaacctggtgcgcgacctgccacagggattctccgccctggagccactggtggatctgcccatcggcatcaacatcacccggtttcagacactgctggccctgcacagatcctacctgacaccaggcgactcctctagcggatggaccgcaggagctgccgcctactatgtgggctatctgcagccccggaccttcctgctgaagtacaacgagaatggcaccatcacagacgcagtggattgcgccctggaccccctgtctgagacaaagtgtacactgaagagctttaccgtggagaagggcatctatcagacaagcaatttcagggtgcagcctaccgagtccatcgtgcgctttcccaatatcacaaacctgtgcccttttggcgaggtgttcaacgccaccagattcgccagcgtgtacgcctggaatcggaagagaatctccaactgcgtggccgactattctgtgctgtacaactccgcctctttcagcacctttaagtgctatggcgtgtctcccacaaagctgaatgatctgtgctttaccaacgtgtacgccgatagcttcgtgatcaggggagacgaagtgagacagatcgcaccaggacagacaggaaagatcgcagactacaattataagctgcctgacgatttcaccggctgcgtgatcgcctggaactccaacaatctggattctaaagtgggcggcaactacaattatctgtacaggctgtttcgcaagtccaatctgaagccattcgagcgggacatctccacagagatctaccaggccggctctaccccctgcaatggcgtggagggctttaactgttatttccctctgcagtcttacggcttccagccaacaaacggcgtgggctatcagccctacagagtggtggtgctgtcctttgagctgctgcacgcaccagcaacagtgtgcggcccaaagaagtctaccaatctggtgaagaacaagtgcgtgaacttcaacttcaacggactgaccggcacaggcgtgctgaccgagagcaataagaagttcctgccttttcagcagttcggcagggacatcgcagataccacagacgccgtgcgcgaccctcagaccctggagatcctggacatcacaccatgcagcttcggcggcgtgtccgtgatcacaccaggcaccaatacatccaaccaggtggccgtgctgtatcaggacgtgaattgtaccgaggtgcccacggcaatccacgcagatcagctgacccctacatggcgggtgtactctaccggcagcaacgtgttccagacaagagccggatgcctgatcggagcagagcacgtgaacaatagctatgagtgcgacatccctatcggcgccggcatctgtgccagctaccagacccagacaaactccccatctggagcaggctccgtggccagccagtccatcatcgcctataccatgagcctgggcgccgagaacagcgtggcctactccaacaattctatcgccatccctaccaacttcacaatcagcgtgaccacagagatcctgccagtgtctatgaccaagacaagcgtggactgcacaatgtatatctgtggcgatagcaccgagtgctccaacctgctgctgcagtacggctccttttgtacccagctgaatagagccctgacaggcatcgccgtggagcaggataagaacacacaggaggtgttcgcccaggtgaagcagatctacaagaccccacccatcaaggactttggcggcttcaacttcagccagatcctgcctgatccaagcaagccctccaagaggtcttttatcgaggacctgctgttcaacaaggtgaccctggccgatgccggcttcatcaagcagtatggagattgcctgggagacatcgcagcccgcgacctgatctgtgcccagaagtttaatggcctgaccgtgctgcctccactgctgacagatgagatgatcgcccagtacacatctgccctgctggccggcaccatcacaagcggatggaccttcggcgcaggagccgccctgcagatcccttttgccatgcagatggcctataggttcaacggcatcggcgtgacccagaatgtgctgtacgagaaccagaagctgatcgccaatcagtttaacagcgccatcggcaagatccaggactctctgtcctctacagccagcgccctgggcaagctgcaggatgtggtgaatcagaacgcccaggccctgaataccctggtgaagcagctgagctccaacttcggcgccatctctagcgtgctgaatgacatcctgagccggctggacccccctgaggcagaggtgcagatcgacaggctgatcacaggccgcctgcagagcctgcagacctacgtgacacagcagctgatcagggcagcagagatcagagcctccgccaatctggccgccaccaagatgagcgagtgcgtgctgggacagtccaagagggtggacttttgtggcaagggctatcacctgatgtctttcccacagagcgcccctcacggcgtggtgtttctgcacgtgacctacgtgccagcccaggagaagaacttcaccacagcaccagccatctgccacgatggaaaggcacactttcctagggagggcgtgttcgtgtctaacggcacccactggtttgtgacacagcgcaatttctacgagccacagatcatcaccacagacaatacattcgtgagcggcaactgtgatgtggtgatcggcatcgtgaacaataccgtgtatgatccactgcagcccgagctggactcctttaaggaggagctggataagtacttcaagaatcacacctctcccgacgtggatctgggcgacatctccggcatcaatgcctctgtggtgaacatccagaaggagatcgaccggctgaacgaggtggccaagaatctgaacgagagcctgatcgatctgcaggagctgggcaagtatgagcagtacatcaagggctctggcagagagaacctgtatttccagggaggaggaggcagcggatacatccctgaggcaccaagggacggacaggcctacgtgcgcaaggatggcgagtgggtgctgctgtccacctttctgggccatcatcaccaccaccaccaccactga

SEQ ID NO: 1387 - DNA, 3846 bp, Artificial Sequence
  Description of Artificial Sequence: Synthetic polynucleotide
atgggcatcctgccaagcccaggaatgcccgccctgctgtctctggtgagcctgctgtccgtgctgctgatgggatgcgtggcagagacaggcacacagtgcgtgaacctgaccacaaggacccagctgccccctgcctataccaattctttcacacggggcgtgtactatcccgacaaggtgtttagaagctccgtgctgcactccacacaggatctgtttctgcctttcttttctaacgtgacctggttccacgccatccacgtgtccggcaccaatggcacaaagcggttcgacaatcccgtgctgccttttaacgatggcgtgtacttcgccagcaccgagaagtccaacatcatcagaggctggatctttggcaccacactggactctaagacacagagcctgctgatcgtgaacaatgccaccaacgtggtgatcaaggtgtgcgagttccagttttgtaatgatccattcctgggcgtgtactatcacaagaacaataagtcctggatggagtctgagtttcgcgtgtattctagcgccaacaattgcacatttgagtacgtgagccagcccttcctgatggacctggagggcaagcagggcaatttcaagaacctgagggagttcgtgtttaagaatatcgatggctacttcaagatctacagcaagcacaccccaatcaacctggtgcgcgacctgccacagggattctccgccctggagccactggtggatctgcccatcggcatcaacatcacccggtttcagacactgctggccctgcacagatcctacctgacaccaggcgactcctctagcggatggaccgcaggagctgccgcctactatgtgggctatctgcagccccggaccttcctgctgaagtacaacgagaatggcaccatcacagacgcagtggattgcaacctggaccccctgtctgagacaaagtgtacactgaagagctttaccgtggagaagggcatctatcagacaagcaatttcagggtgcagcctaccgagtccatcgtgcgctttcccaatatcacaaacctgtgcccttttggcgaggtgttcaacgccaccagattcgccagcgtgtacgcctggaatcggaagagaatctccaactgcgtggccgactattctgtgctgtacaactccgcctctttcagcacctttaagtgctatggcgtgtctcccacaaagctgaatgatctgtgctttaccaacgtgtacgccgatagcttcgtgatcaggggagacgaagtgagacagatcgcaccaggacagacaggaaagatcgcagactacaattataagctgcctgacgatttcaccggctgcgtgatcgcctggaactccaacaatctggattctaaagtgggcggcaactacaattatctgtacaggctgtttcgcaagtccaatctgaagccattcgagcgggacatctccacagagatctaccaggccggctctaccccctgcaatggcgtggagggctttaactgttatttccctctgcagtcttacggcttccagccaacaaacggcgtgggctatcagccctacagagtggtggtgctgtcctttgagctgctgcacgcaccagcaacagtgtgcggcccaaagaagtctaccaatctggtgaagaacaagtgcgtgaacttcaacttcaacggactgaccggcacaggcgtgctgaccgagagcaataagaagttcctgccttttcagcagttcggcagggacatcgcagataccacagacgccgtgcgcgaccctcagaccctggagatcctggacatcacaccatgcagcttcggcggcgtgtccgtgatcacaccaggcaccaatacatccaaccaggtggccgtgctgtatcaggacgtgaattgtaccgaggtgcccgtggcaatccacgcagatcagctgacccctacatggcgggtgtactctaccggcagcaacgtgttccagacaagagccggatgcctgatcggagcagagcacgtgaacaatagctatgagtgcgacatccctatcggcgccggcatctgtgccagctaccagacccagacaaactccccatctggagcaggctccgtggccagccagtccatcatcgcctataccatgagcctgggcgccgagaacagcgtggcctactccaacaattctatcgccatccctaccaacttcacaatcagcgtgaccacagagatcctgccagtgtctatgaccaagacaagcgtggactgcacaatgtatatctgtggcgatagcaccgagtgctccaacctgctgctgcagtacggctccttttgtacccagctgaatagagccctgacaggcatcgccgtggagcaggataagaacacacaggaggtgttcgcccaggtgaagcagatctacaagaccccacccatcaaggactttggcggcttcaacttcagccagatcctgcctgatccaagcaagccctccaagaggtcttttatcgaggacctgctgttcaacaaggtgaccctggccgatgccggcttcatcaagcagtatggagattgcctgggagacatcgcagcccgcgacctgatctgtgcccagaagtttaatggcctgaccgtgctgcctccactgctgacagatgagatgatcgcccagtacacatctgccctgctggccggcaccatcacaagcggatggaccttcggcgcaggagccgccctgcagatcccttttgccatgcagatggcctataggttcaacggcatcggcgtgacccagaatgtgctgtacgagaaccagaagctgatcgccaatcagtttaacagcgccatcggcaagatccaggactctctgtcctctacagccagcgccctgggcaagctgcaggatgtggtgaatcagaacgcccaggccctgaataccctggtgaagcagctgagctccaacttcggcgccatctctagcgtgctgaatgacatcctgagccggctggacccccctgaggcagaggtgcagatcgacaggctgatcacaggccgcctgcagagcctgcagacctacgtgacacagcagctgatcagggcagcagagatcagagcctccgccaatctggccgccaccaagatgagcgagtgcgtgctgggacagtccaagagggtggacttttgtggcaagggctatcacctgatgtctttcccacagagcgcccctcacggcgtggtgtttctgcacgtgacctacgtgccagcccaggagaagaacttcaccacagcaccagccatctgccacgatggaaaggcacactttcctagggagggcgtgttcgtgtctaacggcacccactggtttgtgacacagcgcaatttctacgagccacagatcatcaccacagacaatacattcgtgagcggcaactgtgatgtggtgatcggcatcgtgaacaataccgtgtatgatccactgcagcccgagctggactcctttaaggaggagctggataagtacttcaagaatcacacctctcccgacgtggatctgggcgacatctccggcatcaatgcctctgtggtgaacatccagaaggagatcgaccggctgaacgaggtggccaagaatctgaacgagagcctgatcgatctgcaggagctgggcaagtatgagcagtacatcaagggctctggcagagagaacctgtatttccagggaggaggaggcagcggatacatccctgaggcaccaagggacggacaggcctacgtgcgcaaggatggcgagtgggtgctgctgtccacctttctgggccatcatcaccaccaccaccaccactga

SEQ ID NO: 1388 - DNA, 3846 bp, Artificial Sequence
  Description of Artificial Sequence: Synthetic polynucleotide
atgggcatcctgccaagcccaggaatgcccgccctgctgtctctggtgagcctgctgtccgtgctgctgatgggatgcgtggcagagacaggcacacagtgcgtgaacctgaccacaaggacccagctgccccctgcctataccaattctttcacacggggcgtgtactatcccgacaaggtgtttagaagctccgtgctgcactccacacaggatctgtttctgcctttcttttctaacgtgacctggttccacgccatccacgtgtccggcaccaatggcacaaagcggttcgacaatcccgtgctgccttttaacgatggcgtgtacttcgccagcaccgagaagtccaacatcatcagaggctggatctttggcaccacactggactctaagacacagagcctgctgatcgtgaacaatgccaccaacgtggtgatcaaggtgtgcgagttccagttttgtaatgatccattcctgggcgtgtactatcacaagaacaataagtcctggatggagtctgagtttcgcgtgtattctagcgccaacaattgcacatttgagtacgtgagccagcccttcctgatggacctggagggcaagcagggcaatttcaagaacctgagggagttcgtgtttaagaatatcgatggctacttcaagatctacagcaagcacaccccaatcaacctggtgcgcgacctgccacagggattctccgccctggagccactggtggatctgcccatcggcatcaacatcacccggtttcagacactgctggccctgcacagatcctacctgacaccaggcgactcctctagcggatggaccgcaggagctgccgcctactatgtgggctatctgcagccccggaccttcctgctgaagtacaacgagaatggcaccatcacagacgcagtggattgcgccctggaccccctgtctgagcttaagtgtacactgaagagctttaccgtggagaagggcatctatcagacaagcaatttcagggtgcagcctaccgagtccatcgtgcgctttcccaatatcacaaacctgtgcccttttggcgaggtgttcaacgccaccagattcgccagcgtgtacgcctggaatcggaagagaatctccaactgcgtggccgactattctgtgctgtacaactccgcctctttcagcacctttaagtgctatggcgtgtctcccacaaagctgaatgatctgtgctttaccaacgtgtacgccgatagcttcgtgatcaggggagacgaagtgagacagatcgcaccaggacagacaggaaagatcgcagactacaattataagctgcctgacgatttcaccggctgcgtgatcgcctggaactccaacaatctggattctaaagtgggcggcaactacaattatctgtacaggctgtttcgcaagtccaatctgaagccattcgagcgggacatctccacagagatctaccaggccggctctaccccctgcaatggcgtggagggctttaactgttatttccctctgcagtcttacggcttccagccaacaaacggcgtgggctatcagccctacagagtggtggtgctgtcctttgagctgctgcacgcaccagcaacagtgtgcggcccaaagaagtctaccaatctggtgaagaacaagtgcgtgaacttcaacttcaacggactgaccggcacaggcgtgctgaccgagagcaataagaagttcctgccttttcagcagttcggcagggacatcgcagataccacagacgccgtgcgcgaccctcagaccctggagatcctggacatcacaccatgcagcttcggcggcgtgtccgtgatcacaccaggcaccaatacatccaaccaggtggccgtgctgtatcaggacgtgaattgtaccgaggtgcccgtggcaatccacgcagatcagctgacccctacatggcgggtgtactctaccggcagcaacgtgttccagacaagagccggatgcctgatcggagcagagcacgtgaacaatagctatgagtgcgacatccctatcggcgccggcatctgtgccagctaccagacccagacaaactccccatctggagcaggctccgtggccagccagtccatcatcgcctataccatgagcctgggcgccgagaacagcgtggcctactccaacaattctatcgccatccctaccaacttcacaatcagcgtgaccacagagatcctgccagtgtctatgaccaagacaagcgtggactgcacaatgtatatctgtggcgatagcaccgagtgctccaacctgctgctgcagtacggctccttttgtacccagctgaatagagccctgacaggcatcgccgtggagcaggataagaacacacaggaggtgttcgcccaggtgaagcagatctacaagaccccacccatcaaggactttggcggcttcaacttcagccagatcctgcctgatccaagcaagccctccaagaggtcttttatcgaggacctgctgttcaacaaggtgaccctggccgatgccggcttcatcaagcagtatggagattgcctgggagacatcgcagcccgcgacctgatctgtgcccagaagtttaatggcctgaccgtgctgcctccactgctgacagatgagatgatcgcccagtacacatctgccctgctggccggcaccatcacaagcggatggaccttcggcgcaggagccgccctgcagatcccttttgccatgcagatggcctataggttcaacggcatcggcgtgacccagaatgtgctgtacgagaaccagaagctgatcgccaatcagtttaacagcgccatcggcaagatccaggactctctgtcctctacagccagcgccctgggcaagctgcaggatgtggtgaatcagaacgcccaggccctgaataccctggtgaagcagctgagctccaacttcggcgccatctctagcgtgctgaatgacatcctgagccggctggacccccctgaggcagaggtgcagatcgacaggctgatcacaggccgcctgcagagcctgcagacctacgtgacacagcagctgatcagggcagcagagatcagagcctccgccaatctggccgccaccaagatgagcgagtgcgtgctgggacagtccaagagggtggacttttgtggcaagggctatcacctgatgtctttcccacagagcgcccctcacggcgtggtgtttctgcacgtgacctacgtgccagcccaggagaagaacttcaccacagcaccagccatctgccacgatggaaaggcacactttcctagggagggcgtgttcgtgtctaacggcacccactggtttgtgacacagcgcaatttctacgagccacagatcatcaccacagacaatacattcgtgagcggcaactgtgatgtggtgatcggcatcgtgaacaataccgtgtatgatccactgcagcccgagctggactcctttaaggaggagctggataagtacttcaagaatcacacctctcccgacgtggatctgggcgacatctccggcatcaatgcctctgtggtgaacatccagaaggagatcgaccggctgaacgaggtggccaagaatctgaacgagagcctgatcgatctgcaggagctgggcaagtatgagcagtacatcaagggctctggcagagagaacctgtatttccagggaggaggaggcagcggatacatccctgaggcaccaagggacggacaggcctacgtgcgcaaggatggcgagtgggtgctgctgtccacctttctgggccatcatcaccaccaccaccaccactga

SEQ ID NO: 1389 - DNA, 3846 bp, Artificial Sequence
  Description of Artificial Sequence: Synthetic polynucleotide
atgggcatcctgccaagcccaggaatgcccgccctgctgtctctggtgagcctgctgtccgtgctgctgatgggatgcgtggcagagacaggcacacagtgcgtgaacctgaccacaaggacccagctgccccctgcctataccaattctttcacacggggcgtgtactatcccgacaaggtgtttagaagctccgtgctgcactccacacaggatctgtttctgcctttcttttctaacgtgacctggttccacgccatccacgtgtccggcaccaatggcacaaagcggttcgacaatcccgtgctgccttttaacgatggcgtgtacttcgccagcaccgagaagtccaacatcatcagaggctggatctttggcaccacactggactctaagacacagagcctgctgatcgtgaacaatgccaccaacgtggtgatcaaggtgtgcgagttccagttttgtgcagatccattcctgggcgtgtactatcacaagaacaataagtcctggatggagtctgagtttcgcgtgtattctagcgccaacaattgcacatttgagtacgtgagccagcccttcctgatggacctggagggcaagcagggcaatttcaagaacctgagggagttcgtgtttaagaatatcgatggctacttcaagatctacagcaagcacaccccaatcaacctggtgcgcgacctgccacagggattctccgccctggagccactggtggatctgcccatcggcatcaacatcacccggtttcagacactgctggccctgcacagatcctacctgacaccaggcgactcctctagcggatggaccgcaggagctgccgcctactatgtgggctatctgcagccccggaccttcctgctgaagtacaacgagaatggcaccatcacagacgcagtggattgcgccctggaccccctgtctgagacaaagtgtacactgaagagctttaccgtggagaagggcatctatcagacaagcaatttcagggtgcagcctaccgagtccatcgtgcgctttcccaatatcacaaacctgtgcccttttggcgaggtgttcaacgccaccagattcgccagcgtgtacgcctggaatcggaagagaatctccaactgcgtggccgactattctgtgctgtacaactccgcctctttcagcacctttaagtgctatggcgtgtctcccacaaagctgaatgatctgtgctttaccaacgtgtacgccgatagcttcgtgatcaggggagacgaagtgagacagatcgcaccaggacagacaggaaagatcgcagactacaattataagctgcctgacgatttcaccggctgcgtgatcgcctggaactccaacaatctggattctaaagtgggcggcaactacaattatctgtacaggctgtttcgcaagtccaatctgaagccattcgagcgggacatctccacagagatctaccaggccggctctaccccctgcaatggcgtggagggctttaactgttatttccctctgcagtcttacggcttccagccaacaaacggcgtgggctatcagccctacagagtggtggtgctgtcctttgagctgctgcacgcaccagcaacagtgtgcggcccaaagaagtctaccaatctggtgaagaacaagtgcgtgaacttcaacttcaacggactgaccggcacaggcgtgctgaccgagagcaataagaagttcctgccttttcagcagttcggcagggacatcgcagataccacagacgccgtgcgcgaccctcagaccctggagatcctggacatcacaccatgcagcttcggcggcgtgtccgtgatcacaccaggcaccaatacatccaaccaggtggccgtgctgtatcaggacgtgaattgtaccgaggtgcccgtggcaatccacgcagatcagctgacccctacatggcgggtgtactctaccggcagcaacgtgttccagacaagagccggatgcctgatcggagcagagcacgtgaacaatagctatgagtgcgacatccctatcggcgccggcatctgtgccagctaccagacccagacaaactccccatctggagcaggctccgtggccagccagtccatcatcgcctataccatgagcctgggcgccgagaacagcgtggcctactccaacaattctatcgccatccctaccaacttcacaatcagcgtgaccacagagatcctgccagtgtctatgaccaagacaagcgtggactgcacaatgtatatctgtggcgatagcaccgagtgctccaacctgctgctgcagtacggctccttttgtacccagctgaatagagccctgacaggcatcgccgtggagcaggataagaacacacaggaggtgttcgcccaggtgaagcagatctacaagaccccacccatcaaggactttggcggcttcaacttcagccagatcctgcctgatccaagcaagccctccaagaggtcttttatcgaggacctgctgttcaacaaggtgaccctggccgatgccggcttcatcaagcagtatggagattgcctgggagacatcgcagcccgcgacctgatctgtgcccagaagtttaatggcctgaccgtgctgcctccactgctgacagatgagatgatcgcccagtacacatctgccctgctggccggcaccatcacaagcggatggaccttcggcgcaggagccgccctgcagatcccttttgccatgcagatggcctataggttcaacggcatcggcgtgacccagaatgtgctgtacgagaaccagaagctgatcgccaatcagtttaacagcgccatcggcaagatccaggactctctgtcctctacagccagcgccctgggcaagctgcaggatgtggtgaatcagaacgcccaggccctgaataccctggtgaagcagctgagctccaacttcggcgccatctctagcgtgctgaatgacatcctgagccggctggacccccctgaggcagaggtgcagatcgacaggctgatcacaggccgcctgcagagcctgcagacctacgtgacacagcagctgatcagggcagcagagatcagagcctccgccaatctggccgccaccaagatgagcgagtgcgtgctgggacagtccaagagggtggacttttgtggcaagggctatcacctgatgtctttcccacagagcgcccctcacggcgtggtgtttctgcacgtgacctacgtgccagcccaggagaagaacttcaccacagcaccagccatctgccacgatggaaaggcacactttcctagggagggcgtgttcgtgtctaacggcacccactggtttgtgacacagcgcaatttctacgagccacagatcatcaccacagacaatacattcgtgagcggcaactgtgatgtggtgatcggcatcgtgaacaataccgtgtatgatccactgcagcccgagctggactcctttaaggaggagctggataagtacttcaagaatcacacctctcccgacgtggatctgggcgacatctccggcatcaatgcctctgtggtgaacatccagaaggagatcgaccggctgaacgaggtggccaagaatctgaacgagagcctgatcgatctgcaggagctgggcaagtatgagcagtacatcaagggctctggcagagagaacctgtatttccagggaggaggaggcagcggatacatccctgaggcaccaagggacggacaggcctacgtgcgcaaggatggcgagtgggtgctgctgtccacctttctgggccatcatcaccaccaccaccaccactga

SEQ ID NO: 1390 - DNA, 3846 bp, Artificial Sequence
  Description of Artificial Sequence: Synthetic polynucleotide
atgggcatcctgccaagcccaggaatgcccgccctgctgtctctggtgagcctgctgtccgtgctgctgatgggatgcgtggcagagacaggcacacagtgcgtgaacctgaccacaaggacccagctgccccctgcctataccaattctttcacacggggcgtgtactatcccgacaaggtgtttagaagctccgtgctgcactccacacaggatctgtttctgcctttcttttctaacgtgacctggttccacgccatccacgtgtccggcaccaatggcacaaagcggttcgacaatcccgtgctgccttttaacgatggcgtgtacttcgccagcaccgagaagtccaacatcatcagaggctggatctttggcaccacactggactctaagacacagagcctgctgatcgtgaacaatgccaccaacgtggtgatcaaggtgtgcgagttccagttttgtaatgatccattcctgggcgtgtactatcacaagaacaataagtcctggatggagtctgagtttcgcgtgtattctagcgccaacaattgcacatttgagtacgtgagccagcccttctcaatggacctggagggcaagcagggcaatttcaagaacctgagggagttcgtgtttaagaatatcgatggctacttcaagatctacagcaagcacaccccaatcaacctggtgcgcgacctgccacagggattctccgccctggagccactggtggatctgcccatcggcatcaacatcacccggtttcagacactgctggccctgcacagatcctacctgacaccaggcgactcctctagcggatggaccgcaggagctgccgcctactatgtgggctatctgcagccccggaccttcctgctgaagtacaacgagaatggcaccatcacagacgcagtggattgcgccctggaccccctgtctgagacaaagtgtacactgaagagctttaccgtggagaagggcatctatcagacaagcaatttcagggtgcagcctaccgagtccatcgtgcgctttcccaatatcacaaacctgtgcccttttggcgaggtgttcaacgccaccagattcgccagcgtgtacgcctggaatcggaagagaatctccaactgcgtggccgactattctgtgctgtacaactccgcctctttcagcacctttaagtgctatggcgtgtctcccacaaagctgaatgatctgtgctttaccaacgtgtacgccgatagcttcgtgatcaggggagacgaagtgagacagatcgcaccaggacagacaggaaagatcgcagactacaattataagctgcctgacgatttcaccggctgcgtgatcgcctggaactccaacaatctggattctaaagtgggcggcaactacaattatctgtacaggctgtttcgcaagtccaatctgaagccattcgagcgggacatctccacagagatctaccaggccggctctaccccctgcaatggcgtggagggctttaactgttatttccctctgcagtcttacggcttccagccaacaaacggcgtgggctatcagccctacagagtggtggtgctgtcctttgagctgctgcacgcaccagcaacagtgtgcggcccaaagaagtctaccaatctggtgaagaacaagtgcgtgaacttcaacttcaacggactgaccggcacaggcgtgctgaccgagagcaataagaagttcctgccttttcagcagttcggcagggacatcgcagataccacagacgccgtgcgcgaccctcagaccctggagatcctggacatcacaccatgcagcttcggcggcgtgtccgtgatcacaccaggcaccaatacatccaaccaggtggccgtgctgtatcaggacgtgaattgtaccgaggtgcccgtggcaatccacgcagatcagctgacccctacatggcgggtgtactctaccggcagcaacgtgttccagacaagagccggatgcctgatcggagcagagcacgtgaacaatagctatgagtgcgacatccctatcggcgccggcatctgtgccagctaccagacccagacaaactccccatctggagcaggctccgtggccagccagtccatcatcgcctataccatgagcctgggcgccgagaacagcgtggcctactccaacaattctatcgccatccctaccaacttcacaatcagcgtgaccacagagatcctgccagtgtctatgaccaagacaagcgtggactgcacaatgtatatctgtggcgatagcaccgagtgctccaacctgctgctgcagtacggctccttttgtacccagctgaatagagccctgacaggcatcgccgtggagcaggataagaacacacaggaggtgttcgcccaggtgaagcagatctacaagaccccacccatcaaggactttggcggcttcaacttcagccagatcctgcctgatccaagcaagccctccaagaggtcttttatcgaggacctgctgttcaacaaggtgaccctggccgatgccggcttcatcaagcagtatggagattgcctgggagacatcgcagcccgcgacctgatctgtgcccagaagtttaatggcctgaccgtgctgcctccactgctgacagatgagatgatcgcccagtacacatctgccctgctggccggcaccatcacaagcggatggaccttcggcgcaggagccgccctgcagatcccttttgccatgcagatggcctataggttcaacggcatcggcgtgacccagaatgtgctgtacgagaaccagaagctgatcgccaatcagtttaacagcgccatcggcaagatccaggactctctgtcctctacagccagcgccctgggcaagctgcaggatgtggtgaatcagaacgcccaggccctgaataccctggtgaagcagctgagctccaacttcggcgccatctctagcgtgctgaatgacatcctgagccggctggacccccctgaggcagaggtgcagatcgacaggctgatcacaggccgcctgcagagcctgcagacctacgtgacacagcagctgatcagggcagcagagatcagagcctccgccaatctggccgccaccaagatgagcgagtgcgtgctgggacagtccaagagggtggacttttgtggcaagggctatcacctgatgtctttcccacagagcgcccctcacggcgtggtgtttctgcacgtgacctacgtgccagcccaggagaagaacttcaccacagcaccagccatctgccacgatggaaaggcacactttcctagggagggcgtgttcgtgtctaacggcacccactggtttgtgacacagcgcaatttctacgagccacagatcatcaccacagacaatacattcgtgagcggcaactgtgatgtggtgatcggcatcgtgaacaataccgtgtatgatccactgcagcccgagctggactcctttaaggaggagctggataagtacttcaagaatcacacctctcccgacgtggatctgggcgacatctccggcatcaatgcctctgtggtgaacatccagaaggagatcgaccggctgaacgaggtggccaagaatctgaacgagagcctgatcgatctgcaggagctgggcaagtatgagcagtacatcaagggctctggcagagagaacctgtatttccagggaggaggaggcagcggatacatccctgaggcaccaagggacggacaggcctacgtgcgcaaggatggcgagtgggtgctgctgtccacctttctgggccatcatcaccaccaccaccaccactga

SEQ ID NO: 1391 - DNA, 3846 bp, Artificial Sequence
  Description of Artificial Sequence: Synthetic polynucleotide
atgggcatcctgccaagcccaggaatgcccgccctgctgtctctggtgagcctgctgtccgtgctgctgatgggatgcgtggcagagacaggcacacagtgcgtgaacctgaccacaaggacccagctgccccctgcctataccaattctttcacacggggcgtgtactatcccgacaaggtgtttagaagctccgtgctgcactccacacaggatctgtttctgcctttcttttctaacgtgacctggttccacgccatccacgtgtccggcaccaatggcacaaagcggttcgacaatcccgtgctgccttttaacgatggcgtgtacttcgccagcaccgagaagtccaacatcatcagaggctggatctttggcaccacactggactctaagacacagagcctgctgatcgtgaacaatgccaccaacgtggtgatcaaggtgtgcgagttccagttttgtaatgatccattcctgtcggtgtactatcacaagaacaataagtcctggatggagtctgagtttcgcgtgtattctagcgccaacaattgcacatttgagtacgtgagccagcccttcctgatggacctggagggcaagcagggcaatttcaagaacctgagggagttcgtgtttaagaatatcgatggctacttcaagatctacagcaagcacaccccaatcaacctggtgcgcgacctgccacagggattctccgccctggagccactggtggatctgcccatcggcatcaacatcacccggtttcagacactgctggccctgcacagatcctacctgacaccaggcgactcctctagcggatggaccgcaggagctgccgcctactatgtgggctatctgcagccccggaccttcctgctgaagtacaacgagaatggcaccatcacagacgcagtggattgcgccctggaccccctgtctgagacaaagtgtacactgaagagctttaccgtggagaagggcatctatcagacaagcaatttcagggtgcagcctaccgagtccatcgtgcgctttcccaatatcacaaacctgtgcccttttggcgaggtgttcaacgccaccagattcgccagcgtgtacgcctggaatcggaagagaatctccaactgcgtggccgactattctgtgctgtacaactccgcctctttcagcacctttaagtgctatggcgtgtctcccacaaagctgaatgatctgtgctttaccaacgtgtacgccgatagcttcgtgatcaggggagacgaagtgagacagatcgcaccaggacagacaggaaagatcgcagactacaattataagctgcctgacgatttcaccggctgcgtgatcgcctggaactccaacaatctggattctaaagtgggcggcaactacaattatctgtacaggctgtttcgcaagtccaatctgaagccattcgagcgggacatctccacagagatctaccaggccggctctaccccctgcaatggcgtggagggctttaactgttatttccctctgcagtcttacggcttccagccaacaaacggcgtgggctatcagccctacagagtggtggtgctgtcctttgagctgctgcacgcaccagcaacagtgtgcggcccaaagaagtctaccaatctggtgaagaacaagtgcgtgaacttcaacttcaacggactgaccggcacaggcgtgctgaccgagagcaataagaagttcctgccttttcagcagttcggcagggacatcgcagataccacagacgccgtgcgcgaccctcagaccctggagatcctggacatcacaccatgcagcttcggcggcgtgtccgtgatcacaccaggcaccaatacatccaaccaggtggccgtgctgtatcaggacgtgaattgtaccgaggtgcccgtggcaatccacgcagatcagctgacccctacatggcgggtgtactctaccggcagcaacgtgttccagacaagagccggatgcctgatcggagcagagcacgtgaacaatagctatgagtgcgacatccctatcggcgccggcatctgtgccagctaccagacccagacaaactccccatctggagcaggctccgtggccagccagtccatcatcgcctataccatgagcctgggcgccgagaacagcgtggcctactccaacaattctatcgccatccctaccaacttcacaatcagcgtgaccacagagatcctgccagtgtctatgaccaagacaagcgtggactgcacaatgtatatctgtggcgatagcaccgagtgctccaacctgctgctgcagtacggctccttttgtacccagctgaatagagccctgacaggcatcgccgtggagcaggataagaacacacaggaggtgttcgcccaggtgaagcagatctacaagaccccacccatcaaggactttggcggcttcaacttcagccagatcctgcctgatccaagcaagccctccaagaggtcttttatcgaggacctgctgttcaacaaggtgaccctggccgatgccggcttcatcaagcagtatggagattgcctgggagacatcgcagcccgcgacctgatctgtgcccagaagtttaatggcctgaccgtgctgcctccactgctgacagatgagatgatcgcccagtacacatctgccctgctggccggcaccatcacaagcggatggaccttcggcgcaggagccgccctgcagatcccttttgccatgcagatggcctataggttcaacggcatcggcgtgacccagaatgtgctgtacgagaaccagaagctgatcgccaatcagtttaacagcgccatcggcaagatccaggactctctgtcctctacagccagcgccctgggcaagctgcaggatgtggtgaatcagaacgcccaggccctgaataccctggtgaagcagctgagctccaacttcggcgccatctctagcgtgctgaatgacatcctgagccggctggacccccctgaggcagaggtgcagatcgacaggctgatcacaggccgcctgcagagcctgcagacctacgtgacacagcagctgatcagggcagcagagatcagagcctccgccaatctggccgccaccaagatgagcgagtgcgtgctgggacagtccaagagggtggacttttgtggcaagggctatcacctgatgtctttcccacagagcgcccctcacggcgtggtgtttctgcacgtgacctacgtgccagcccaggagaagaacttcaccacagcaccagccatctgccacgatggaaaggcacactttcctagggagggcgtgttcgtgtctaacggcacccactggtttgtgacacagcgcaatttctacgagccacagatcatcaccacagacaatacattcgtgagcggcaactgtgatgtggtgatcggcatcgtgaacaataccgtgtatgatccactgcagcccgagctggactcctttaaggaggagctggataagtacttcaagaatcacacctctcccgacgtggatctgggcgacatctccggcatcaatgcctctgtggtgaacatccagaaggagatcgaccggctgaacgaggtggccaagaatctgaacgagagcctgatcgatctgcaggagctgggcaagtatgagcagtacatcaagggctctggcagagagaacctgtatttccagggaggaggaggcagcggatacatccctgaggcaccaagggacggacaggcctacgtgcgcaaggatggcgagtgggtgctgctgtccacctttctgggccatcatcaccaccaccaccaccactga

SEQ ID NO: 1392 - DNA, 3846 bp, Artificial Sequence
  Description of Artificial Sequence: Synthetic polynucleotide
atgggcatcctgccaagcccaggaatgcccgccctgctgtctctggtgagcctgctgtccgtgctgctgatgggatgcgtggcagagacaggcacacagtgcgtgaacctgaccacaaggacccagctgccccctgcctataccaattctttcacacggggcgtgtactatcccgacaagatttttagaagcaacgtgctgcactccacacaggatctgtttctgcctttcttttctaacgtgacctggttccacgccatccacgtgaaaggcaccaatggcacaaagcggttcgacaatcccgtgctgccttttaacgatggcgtgtacttcgccgctatcgagaagtccaacatcatcagaggctggatctttggcaccacactggactctaagacacagagcctgctgatcgtgaacaatgccaccaacgtggtgatccgtgtgtgcgagttccagttttgtgaaaatccattcctgggcgtgtactatcacaagaacaataagtcctggcgagaggaagagtggcgctggtattctagcgccaacaattgcacatttgagtacgtgagccagcccttcctgtacgacctgaacggcaagcagggcaatttccatcatctgagggagttcgtgtttaagaatatcgatggctacttcaagatctacagcaagtgggaaccaatcaacctggtgcgcgacctgccacagggattctccccgctggagccactgatggatctgcccatcggcatcaacatcacccattttcagacatttctgtcactgagtagatcctaccgcacaccaggcgactcctctagcggatggaccgcaggagctgccgcctactatgtgggctatctgcagccccggaccttcctgctgaagtacgatgagaatggctatatcacagacgcagtggattgctcactggaccccctgtctgagacaaagtgtaaactgaagagctttaccgtggagaagggcatctatcagacaagcaatttcagggtgcagcctacctatgaaatcgtgcgctttcccaatatcacaaactgttgcccttttgatgaggtgttcaacgcccctagattcgccagcgtgtacaattggaatcggcaaagaatctccaactgcgtggccgactattctgtgctgtacaactccgcctctttcagcacctttcaatgctatggcgtgtctcccacaaagctgaatgatctgtgctttaccaacgtgtacgccgatattttcgtgatcaggggatcggaagtgagacagatcgcaccaggacagacaggacctatcgcagactacaattataagctgcctgacgatttcaccggctgcgtgatcgcctggaactccaacaatctggattctactgtgggcggcaactacaattatctgtacaggctgtttcgcaagtccaatatgaagccattcgagcgggacatctccacagaggcttaccaggccggctgtaccccctgcaatggcgtggagggctttaactgttatttccctctgcagtcttacggcttccagccaacaaacggcgtgggctatcagccctacagagtggtggtgctgaaatttgagctgctgcacgcaccagcaacagtgtgcggcccaaaggatccgaccaatctggtgaagaacaagtgcgtggattacaacttcaacggacgaaccggcacaggcgtgctgaccgagagcaataagaagttcctgccttttcagcagttcggcagggacatctcagataccctcgacgccgtgcgcgaccctacgaccggggagatcctgtgtatcacaccatgcagcttcggcggcgtgtccgtgatcacaccaggcaccaatacatccaaccaggtggccgtgctgtatcaggacgtgaattgtaccgaggtgcccgaagcaatccacagtaatcagctgcgtcctacatggcgggtgtactctaccggcagcaacgtgttccagacaagagccggatgcctgatcggagcagagcacgtgaacaatagctatgagtgcgacatccctatcggcaacggcatctgtgccagctaccagacccagacaaactccccatctggatcaggctccgtgagtagccagtccatcatcgcctataccatgagcctgggcgccgagaacccggtgccctactccaacaataacatcgccatccctaccaacttcacaatcagcgtgcaaacagagatcctgccagtgtctatgcccaaggttagcgtggactgcacaatgtatatctgtggcgatagcaccgagtgccttaacctgctgtctcagtacggctccttttgtagtcagctggaaagagccctgaatggcatcgcccgggagcaggataagaacttgcttaatgtgttcgcccaggtgaagcagatctacaagaccccacccatcaaggactttggcggcttcaacttcagccagatcctgcctgatccaagcaagccctccaagaggtcttttatcgaggacctgctgttcaacaaggtgaccctggccgatttgggcttcgtcaagcagtataaagattgcctgggagatcaagcagcccgcgacctgatctgtgcccagaagtttaatggcattatggtgctgcctccactgctgacagatgagatgatcgcccagtacacagcatcactgctggccggcaccatcacagcaggatggaccttcggcgcaggagccgccctggtcatcccttttgccatgcagatggcctataggttcaacggcatcggcgtgcaacagaatgtgctgtacgagaaccagaagattatcgccaatcagtttaacaatgccatcggcaatatccaggacggtctgtccacgacagccagcgccctgtccaagctgcaggatgtggtgaatcagcaagcccaggccctgaatgaactggtgaagcagctgagctccaacttcggcgccatctctagcgtgattaatgacatctacaaccggctggacaaacctgaggcacaagcgcagatcgacaggctgatcacaggccgcctgcagagcctgcagacctacgtgacacagcagctgatcagggcaactgagatcagagcctccgcccaactggccgccgaaaagatgagcgagtgcgtgaaaggacagtccaataggtatggtttttgtggcaatggctatcacctgatgtctttcccacagagcgcccctcacggcgtggtgtttctgcacgtgacctacgtgccaacgcagtttaagaacttcaccacagcaccagggatctgccacgatggaaaggcatactttcctagggagggcgtgttcgtgtctaacggcacctcatggtacattacacagcgcaatttctacgagccacgaccgatcaccacagacaatacattcgtgagcggcaactgtgatgtggtgatcggcatcgtgaacaataccgtgtatgatccactgcagcccgagctggactcctttaaggaggagctggataagtacttcaagaatcacacctctcccgacgtggatctgggcgacatctccggcatcaatgcctctgtggtgaacatccagaaggagatcgaccggctgaacgaggtggccaagaatctgaacgagagcctgatcgatctgcaggagctgggcaagtatgagcagtacatcaagggctctggcagagagaacctgtatttccagggaggaggaggcagcggatacatccctgaggcaccaagggacggacaggcctacgtgcgcaaggatggcgagtgggtgctgctgtccacctttctgggccatcatcaccaccaccaccaccactga

SEQ ID NO: 1393 - DNA, 3846 bp, Artificial Sequence
  Description of Artificial Sequence: Synthetic polynucleotide
atgggcatcctgccaagcccaggaatgcccgccctgctgtctctggtgagcctgctgtccgtgctgctgatgggatgcgtggcagagacaggcacacagtgcgtgaacctgaccacaaggacccagctgccccctgcctataccaattctactacacggggcgtgtactatcccgacaaggtgtttagaagctccgtgctgcactccacacaggatctgtttctgcctttcttttctaacgtgacctggttccacgccatccacgtgtccggcaccaatggcacaaagcggttcgacaatcccgtgctgccttttaacgatggcgtgtacttcgccagcaccgagaagtccaacatcatcagaggctggatctttggcaccacactggactctaagacacagagcctgctgatcgtgaacaatgccaccaacgtggtgatcaaggtgtgcgagttccagttttgtaatgatccattcctgggcgtgtactatcacaagaacaataagtcctggatggagtctgagtttcgcgtgtattctagcgccaacaattgcacatttgagtacgtgagccagcccttcctgatggacctggagggcaagcagggcaatttcaagaacctgagggagttcgtgtttaagaatatcgatggctacttcaagatctacagcaagcacaccccaatcaacctggtgcgcgacctgccacagggattctccgccctggagccactggtggatctgcccatcggcatcaacatcacccggtttcagacactgctggccctgcacagatcctacctgacaccaggcgactcctctagcggatggaccgcaggagctgccgcctactatgtgggctatctgcagccccggaccttcctgctgaagtacaacgagaatggcaccatcacagacgcagtggattgcgccctggaccccctgtctgagacaaagtgtacactgaagagctttaccgtggagaagggcatctatcagacaagcaatttcagggtgcagcctaccgagtccatcgtgcgctttcccaatatcacaaacctgtgcccttttggcgaggtgttcaacgccaccagattcgccagcgtgtacgcctggaatcggaagagaatctccaactgcgtggccgactattctgtgctgtacaactccgcctctttcagcacctttaagtgctatggcgtgtctcccacaaagctgaatgatctgtgctttaccaacgtgtacgccgatagcttcgtgatcaggggagacgaagtgagacagatcgcaccaggacagacaggaaagatcgcagactacaattataagctgcctgacgatttcaccggctgcgtgatcgcctggaactccaacaatctggattctaaagtgggcggcaactacaattatctgtacaggctgtttcgcaagtccaatctgaagccattcgagcgggacatctccacagagatctaccaggccggctctaccccctgcaatggcgtggagggctttaactgttatttccctctgcagtcttacggcttccagccaacaaacggcgtgggctatcagccctacagagtggtggtgctgtcctttgagctgctgcacgcaccagcaacagtgtgcggcccaaagaagtctaccaatctggtgaagaacaagtgcgtgaacttcaacttcaacggactgaccggcacaggcgtgctgaccgagagcaataagaagttcctgccttttcagcagttcggcagggacatcgcagataccacagacgccgtgcgcgaccctcagaccctggagatcctggacatcacaccatgcagcttcggcggcgtgtccgtgatcacaccaggcaccaatacatccaaccaggtggccgtgctgtatcaggacgtgaattgtaccgaggtgcccgtggcaatccacgcagatcagctgacccctacatggcgggtgtactctaccggcagcaacgtgttccagacaagagccggatgcctgatcggagcagagcacgtgaacaatagctatgagtgcgacatccctatcggcgccggcatctgtgccagctaccagacccagacaaactccccatctggagcaggctccgtggccagccagtccatcatcgcctataccatgagcctgggcgccgagaacagcgtggcctactccaacaattctatcgccatccctaccaacttcacaatcagcgtgaccacagagatcctgccagtgtctatgaccaagacaagcgtggactgcacaatgtatatctgtggcgatagcaccgagtgctccaacctgctgctgcagtacggctccttttgtacccagctgaatagagccctgacaggcatcgccgtggagcaggataagaacacacaggaggtgttcgcccaggtgaagcagatctacaagaccccacccatcaaggactttggcggcttcaacttcagccagatcctgcctgatccaagcaagccctccaagaggtcttttatcgaggacctgctgttcaacaaggtgaccctggccgatgccggcttcatcaagcagtatggagattgcctgggagacatcgcagcccgcgacctgatctgtgcccagaagtttaatggcctgaccgtgctgcctccactgctgacagatgagatgatcgcccagtacacatctgccctgctggccggcaccatcacaagcggatggaccttcggcgcaggagccgccctgcagatcccttttgccatgcagatggcctataggttcaacggcatcggcgtgacccagaatgtgctgtacgagaaccagaagctgatcgccaatcagtttaacagcgccatcggcaagatccaggactctctgtcctctacagccagcgccctgggcaagctgcaggatgtggtgaatcagaacgcccaggccctgaataccctggtgaagcagctgagctccaacttcggcgccatctctagcgtgctgaatgacatcctgagccggctggacccccctgaggcagaggtgcagatcgacaggctgatcacaggccgcctgcagagcctgcagacctacgtgacacagcagctgatcagggcagcagagatcagagcctccgccaatctggccgccaccaagatgagcgagtgcgtgctgggacagtccaagagggtggacttttgtggcaagggctatcacctgatgtctttcccacagagcgcccctcacggcgtggtgtttctgcacgtgacctacgtgccagcccaggagaagaacttcaccacagcaccagccatctgccacgatggaaaggcacactttcctagggagggcgtgttcgtgtctaacggcacccactggtttgtgacacagcgcaatttctacgagccacagatcatcaccacagacaatacattcgtgagcggcaactgtgatgtggtgatcggcatcgtgaacaataccgtgtatgatccactgcagcccgagctggactcctttaaggaggagctggataagtacttcaagaatcacacctctcccgacgtggatctgggcgacatctccggcatcaatgcctctgtggtgaacatccagaaggagatcgaccggctgaacgaggtggccaagaatctgaacgagagcctgatcgatctgcaggagctgggcaagtatgagcagtacatcaagggctctggcagagagaacctgtatttccagggaggaggaggcagcggatacatccctgaggcaccaagggacggacaggcctacgtgcgcaaggatggcgagtgggtgctgctgtccacctttctgggccatcatcaccaccaccaccaccactga

SEQ ID NO: 1394 - DNA, 3846 bp, Artificial Sequence
  Description of Artificial Sequence: Synthetic polynucleotide
atgggcatcctgccaagcccaggaatgcccgccctgctgtctctggtgagcctgctgtccgtgctgctgatgggatgcgtggcagagacaggcacacagtgcgtgaacctgaccacaaggacccagctgccccctgcctataccaattctttcacacggggcgtgtactatcccgacaaggtgtttagaagctccgtgctgcactccacacaggatctgtttctgcctttcttttctaacgtgacctggttccacgccatccacgtgtccggcaccaatggcacaaagcggttcgacaatcccgtgctgccttttaacgatggcgtgtacttcgccagcaccgagaagtccaacatcatcagaggctggatctttggcaccacactggactctaagacacagagcctgctgatcgtgaacaatgccaccaacgtggtgatcaaggtgtgcgagttccagttttgtaatgatccattcctgggcgtgtactatcacaagaacaataagtcctggatggagtctgagtttcgcgtgtattctagcgccaacaattgcacatttgagtacgtgagccagcccttcctgatggacctggagggcaagcagggcaatttcaagaacctgagggagttcgtgtttaagaatatcgatggctacttcaagatctacagcaagcacaccccaatcaacctggtgcgcgacctgccacagggattctccgccctggagccactggtggatctgcccatcggcatcaacatcacccggtttcagacactgctggccctgcacagatcctacctgacaccaggcgactcctctagcggatggaccgcaggagctgccgcctactatgtgggctatctgcagccccggaccttcctgctgaagtacaacgagaatggcaccatcacagacgcagtggattgcgccctggaccccctgtctgagacaaagtgtacactgaagagctttaccgtggagaagggcatctatcagacaagcaatttcagggtgcagcctaccgagtccatcgtgcgctttcccaatatcacaaacctgtgcccttttggcgaggtgttcaacgccaccagattcgccagcgtgtacgcctggaatcggaagagaatctccaactgcgtggccgactattctgtgctgtacaactccgcctctttcagcacctttaagtgctatggcgtgtctcccacaaagctgaatgatctgtgctttaccaacgtgtacgccgatagcttcgtgatcaggggagacgaagtgagacagatcgcaccaggacagacaggaaagatcgcagactacaattataagctgcctgacgatttcaccggctgcgtgatcgcctggaactccaacaatctggattctaaagtgggcggcaactacaattatctgtacaggctgtttcgcaagtccaatctgaagccattcgagcgggacatctccacagagatctaccaggccggctctaccccctgcaatggcgtggagggctttaactgttatttccctctgcagtcttacggcttccagccaacaaacggcgtgggctatcagccctacagagtggtggtgctgtcctttgagctgctgcacgcaccagcaacagtgtgcggcccaaagaagtctaccaatctggtgaagaacaagtgcgtgaacttcaacttcaacggactgaccggcacaggcgtgctgaccgagagcaataagaagttcctgccttttcagcagttcggcagggacatcgcagataccacagacgccgtgcgcgaccctcagaccctggagatcctggacatcacaccatgcagcttcggcggcgtgtccgtgatcacaccaggcaccaatacatccaaccaggtggccgtgctgtatcaggacgtgaattgtaccgaggtgcccgtggcaatccacagtgatcagctgacccctacatggcgggtgtactctaccggcagcaacgtgttccagacaagagccggatgcctgatcggagcagagcacgtgaacaatagctatgagtgcgacatccctatcggcgccggcatctgtgccagctaccagacccagacaaactccccatctggagcaggctccgtggccagccagtccatcatcgcctataccatgagcctgggcgccgagaacagcgtggcctactccaacaattctatcgccatccctaccaacttcacaatcagcgtgaccacagagatcctgccagtgtctatgaccaagacaagcgtggactgcacaatgtatatctgtggcgatagcaccgagtgctccaacctgctgctgcagtacggctccttttgtacccagctgaatagagccctgacaggcatcgccgtggagcaggataagaacacacaggaggtgttcgcccaggtgaagcagatctacaagaccccacccatcaaggactttggcggcttcaacttcagccagatcctgcctgatccaagcaagccctccaagaggtcttttatcgaggacctgctgttcaacaaggtgaccctggccgatgccggcttcatcaagcagtatggagattgcctgggagacatcgcagcccgcgacctgatctgtgcccagaagtttaatggcctgaccgtgctgcctccactgctgacagatgagatgatcgcccagtacacatctgccctgctggccggcaccatcacaagcggatggaccttcggcgcaggagccgccctgcagatcccttttgccatgcagatggcctataggttcaacggcatcggcgtgacccagaatgtgctgtacgagaaccagaagctgatcgccaatcagtttaacagcgccatcggcaagatccaggactctctgtcctctacagccagcgccctgggcaagctgcaggatgtggtgaatcagaacgcccaggccctgaataccctggtgaagcagctgagctccaacttcggcgccatctctagcgtgctgaatgacatcctgagccggctggacccccctgaggcagaggtgcagatcgacaggctgatcacaggccgcctgcagagcctgcagacctacgtgacacagcagctgatcagggcagcagagatcagagcctccgccaatctggccgccaccaagatgagcgagtgcgtgctgggacagtccaagagggtggacttttgtggcaagggctatcacctgatgtctttcccacagagcgcccctcacggcgtggtgtttctgcacgtgacctacgtgccagcccaggagaagaacttcaccacagcaccagccatctgccacgatggaaaggcacactttcctagggagggcgtgttcgtgtctaacggcacccactggtttgtgacacagcgcaatttctacgagccacagatcatcaccacagacaatacattcgtgagcggcaactgtgatgtggtgatcggcatcgtgaacaataccgtgtatgatccactgcagcccgagctggactcctttaaggaggagctggataagtacttcaagaatcacacctctcccgacgtggatctgggcgacatctccggcatcaatgcctctgtggtgaacatccagaaggagatcgaccggctgaacgaggtggccaagaatctgaacgagagcctgatcgatctgcaggagctgggcaagtatgagcagtacatcaagggctctggcagagagaacctgtatttccagggaggaggaggcagcggatacatccctgaggcaccaagggacggacaggcctacgtgcgcaaggatggcgagtgggtgctgctgtccacctttctgggccatcatcaccaccaccaccaccactga

SEQ ID NO: 1395 - DNA, 3846 bp, Artificial Sequence
  Description of Artificial Sequence: Synthetic polynucleotide
atgggcatcctgccaagcccaggaatgcccgccctgctgtctctggtgagcctgctgtccgtgctgctgatgggatgcgtggcagagacaggcacacagtgcgtgaacctgaccacaaggacccagctgccccctgcctataccaattctttcacacggggcgtgtactatcccgacaaggtgtttagaagctccgtgctgcactccacacaggatctgtttctgcctttcttttctaacgtgacctggttccacgccatccacgtgtccggcaccaatggcacaaagcggttcgacaatcccgtgctgccttttaacgatggcgtgtacttcgccagcaccgagaagtccaacatcatcagaggctggatctttggcaccacactggactctaagacacagagcctgctgatcgtgaacaatgccaccaacgtggtgatcaaggtgtgcgagttccagttttgtaatgatccattcctgggcgtgtactatcacaagaacaataagtcctggatggagtctgagtttcgcgtgtattctagcgccaacaattgcacatttgagtacgtgagccagcccttcctgatggacctggagggcaagcagggcaatttcaagaacctgagggagttcgtgtttaagaatatcgatggctacttcaagatctacagcaagcacaccccaatcaacctggtgcgcgacctgccacagggattctccgccctggagccactggtggatctgcccatcggcatcaacatcacccggtttcagacactgctggccctgcacagatcctacctgacaccaggcgactcctctagcggatggaccgcaggagctgccgcctactatgtgggctatctgcagccccggaccttcctgctgaagtacaacgagaatggcaccatcacagacgcagtggattgcgccctggaccccctgtctgagacaaagtgtacactgaagagctttaccgtggagaagggcatctatcagacaagcaatttcagggtgcagcctaccgagtccatcgtgcgctttcccaatatcacaaacctgtgcccttttggcgaggtgttcaacgccaccagattcgccagcgtgtacgcctggaatcggaagagaatctccaactgcgtggccgactattctgtgctgtacaactccgcctctttcagcacctttaagtgctatggcgtgtctcccacaaagctgaatgatctgtgctttaccaacgtgtacgccgatagcttcgtgatcaggggagacgaagtgagacagatcgcaccaggacagacaggaaagatcgcagactacaattataagctgcctgacgatttcaccggctgcgtgatcgcctggaactccaacaatctggattctaaagtgggcggcaactacaattatctgtacaggctgtttcgcaagtccaatctgaagccattcgagcgggacatctccacagagatctaccaggccggctctaccccctgcaatggcgtggagggctttaactgttatttccctctgcagtcttacggcttccagccaacaaacggcgtgggctatcagccctacagagtggtggtgctgtcctttgagctgctgcacgcaccagcaacagtgtgcggcccaaagaagtctaccaatctggtgaagaacaagtgcgtgaacttcaacttcaacggactgaccggcacaggcgtgctgaccgagagcaataagaagttcctgccttttcagcagttcggcagggacatcgcagataccacagacgccgtgcgcgaccctcagaccctggagatcctggacatcacaccatgcagcttcggcggcgtgtccgtgatcacaccaggcaccaatacatccaaccaggtggccgtgctgtatcaggacgtgaattgtaccgaggtgcccgtggcaatccacgcagatcagctgacccctacatggcgggtgtactctaccggcagcaacgtgttccagacaagagccggatgcctgatcggagcagagcacgtgaacaatagctatgagtgcgacatccctatcggcgccggcatctgtgccagctaccagacccagacaaactccccatctggagcaggctccgtggccagccagtccatcatcgcctataccatgagcctgggcgccgagaacagcgtggcctactccaacaattctatcgccatccctaccaacttcacaatcagcgtgaccacagagatcctgccagtgtctatgaccaagacaagcgtggactgcacaatgtatatctgtggcgatagcaccgagtgctccaacctgctgctgcagtacggctccttttgtacccagctgaatagagccctgacaggcatcgccgtggagcaggataagaacacacaggaggtgttcgcccaggtgaagcagatctacaagaccccacccatcaaggactttggcggcttcaacttcagccagatcctgcctgatccaagcaagccctccaagaggtcttttatcgaggacctgctgttcaacaaggtgaccctggccgatgccggcttcatcaagcagtatggagattgcctgggagacatcgcagcccgcgacctgatctgtgcccagaagtttaatggcctgaccgtgctgcctccactgctgacagatgagatgatcgcccagtacacatctgccctgctggccggcaccatcacaagcggatggaccttcggcgcaggagccgccctgcagatcccttttgccatgcagatggcctataggttcaacggcatcggcgtgacccagaatgtgctgtacgagaaccagaagctgatcgccaatcagtttaacagcgccatcggcaagatccaggactctctgtcctctacagccagcgccctgggcaagctgcaggatgtggtgaatcagaacgcccaggccctgaataccctggtgaagcagctgagctccaacttcggcgccatctctagcgtgctgaatgacatcctgagccggctggacccccctgaggcagaggtgcagatcgacaggctgatcacaggccgcctgcagagcctgcagacctacgtgacacagcagctgatcagggcagcagagatcagagcctccgccaatctggccgccaccaagatgagcgagtgcgtgctgggacagtccaagagggtggacttttgtggcaagggctatcacctgatgtctttcccacagagcgcccctcacggcattgtgtttctgcacgtgacctacgtgccagcccaggagaagaacttcaccacagcaccagccatctgccacgatggaaaggcacactttcctagggagggcgtgttcgtgtctaacggcacccactggtttgtgacacagcgcaatttctacgagccacagatcatcaccacagacaatacattcgtgagcggcaactgtgatgtggtgatcggcatcgtgaacaataccgtgtatgatccactgcagcccgagctggactcctttaaggaggagctggataagtacttcaagaatcacacctctcccgacgtggatctgggcgacatctccggcatcaatgcctctgtggtgaacatccagaaggagatcgaccggctgaacgaggtggccaagaatctgaacgagagcctgatcgatctgcaggagctgggcaagtatgagcagtacatcaagggctctggcagagagaacctgtatttccagggaggaggaggcagcggatacatccctgaggcaccaagggacggacaggcctacgtgcgcaaggatggcgagtgggtgctgctgtccacctttctgggccatcatcaccaccaccaccaccactga

SEQ ID NO: 1396 - DNA, 3846 bp, Artificial Sequence
  Description of Artificial Sequence: Synthetic polynucleotide
atgggcatcctgccaagcccaggaatgcccgccctgctgtctctggtgagcctgctgtccgtgctgctgatgggatgcgtggcagagacaggcacacagtgcgtgaacctgaccacaaggacccagctgccccctgcctataccaattctttcacacggggcgtgtactatcccgacaaggtgtttagaagctccgtgctgcacttaacacaggatctgtttctgcctttcttttctaacgtgacctggttccacgccatccacgtgtccggcaccaatggcacaaagcggttcgacaatcccgtgctgccttttaacgatggcgtgtacttcgccagcaccgagaagtccaacatcatcagaggctggatctttggcaccacactggactctaagacacagagcctgctgatcgtgaacaatgccaccaacgtggtgatcaaggtgtgcgagttccagttttgtaatgatccattcctgggcgtgtactatcacaagaacaataagtcctggatggagtctgagtttcgcgtgtattctagcgccaacaattgcacatttgagtacgtgagccagcccttcctgatggacctggagggcaagcagggcaatttcaagaacctgagggagttcgtgtttaagaatatcgatggctacttcaagatctacagcaagcacaccccaatcaacctggtgcgcgacctgccacagggattctccgccctggagccactggtggatctgcccatcggcatcaacatcacccggtttcagacactgctggccctgcacagatcctacctgacaccaggcgactcctctagcggatggaccgcaggagctgccgcctactatgtgggctatctgcagccccggaccttcctgctgaagtacaacgagaatggcaccatcacagacgcagtggattgcgccctggaccccctgtctgagacaaagtgtacactgaagagctttaccgtggagaagggcatctatcagacaagcaatttcagggtgcagcctaccgagtccatcgtgcgctttcccaatatcacaaacctgtgcccttttggcgaggtgttcaacgccaccagattcgccagcgtgtacgcctggaatcggaagagaatctccaactgcgtggccgactattctgtgctgtacaactccgcctctttcagcacctttaagtgctatggcgtgtctcccacaaagctgaatgatctgtgctttaccaacgtgtacgccgatagcttcgtgatcaggggagacgaagtgagacagatcgcaccaggacagacaggaaagatcgcagactacaattataagctgcctgacgatttcaccggctgcgtgatcgcctggaactccaacaatctggattctaaagtgggcggcaactacaattatctgtacaggctgtttcgcaagtccaatctgaagccattcgagcgggacatctccacagagatctaccaggccggctctaccccctgcaatggcgtggagggctttaactgttatttccctctgcagtcttacggcttccagccaacaaacggcgtgggctatcagccctacagagtggtggtgctgtcctttgagctgctgcacgcaccagcaacagtgtgcggcccaaagaagtctaccaatctggtgaagaacaagtgcgtgaacttcaacttcaacggactgaccggcacaggcgtgctgaccgagagcaataagaagttcctgccttttcagcagttcggcagggacatcgcagataccacagacgccgtgcgcgaccctcagaccctggagatcctggacatcacaccatgcagcttcggcggcgtgtccgtgatcacaccaggcaccaatacatccaaccaggtggccgtgctgtatcaggacgtgaattgtaccgaggtgcccgtggcaatccacgcagatcagctgacccctacatggcgggtgtactctaccggcagcaacgtgttccagacaagagccggatgcctgatcggagcagagcacgtgaacaatagctatgagtgcgacatccctatcggcgccggcatctgtgccagctaccagacccagacaaactccccatctggagcaggctccgtggccagccagtccatcatcgcctataccatgagcctgggcgccgagaacagcgtggcctactccaacaattctatcgccatccctaccaacttcacaatcagcgtgaccacagagatcctgccagtgtctatgaccaagacaagcgtggactgcacaatgtatatctgtggcgatagcaccgagtgctccaacctgctgctgcagtacggctccttttgtacccagctgaatagagccctgacaggcatcgccgtggagcaggataagaacacacaggaggtgttcgcccaggtgaagcagatctacaagaccccacccatcaaggactttggcggcttcaacttcagccagatcctgcctgatccaagcaagccctccaagaggtcttttatcgaggacctgctgttcaacaaggtgaccctggccgatgccggcttcatcaagcagtatggagattgcctgggagacatcgcagcccgcgacctgatctgtgcccagaagtttaatggcctgaccgtgctgcctccactgctgacagatgagatgatcgcccagtacacatctgccctgctggccggcaccatcacaagcggatggaccttcggcgcaggagccgccctgcagatcccttttgccatgcagatggcctataggttcaacggcatcggcgtgacccagaatgtgctgtacgagaaccagaagctgatcgccaatcagtttaacagcgccatcggcaagatccaggactctctgtcctctacagccagcgccctgggcaagctgcaggatgtggtgaatcagaacgcccaggccctgaataccctggtgaagcagctgagctccaacttcggcgccatctctagcgtgctgaatgacatcctgagccggctggacccccctgaggcagaggtgcagatcgacaggctgatcacaggccgcctgcagagcctgcagacctacgtgacacagcagctgatcagggcagcagagatcagagcctccgccaatctggccgccaccaagatgagcgagtgcgtgctgggacagtccaagagggtggacttttgtggcaagggctatcacctgatgtctttcccacagagcgcccctcacggcgtggtgtttctgcacgtgacctacgtgccagcccaggagaagaacttcaccacagcaccagccatctgccacgatggaaaggcacactttcctagggagggcgtgttcgtgtctaacggcacccactggtttgtgacacagcgcaatttctacgagccacagatcatcaccacagacaatacattcgtgagcggcaactgtgatgtggtgatcggcatcgtgaacaataccgtgtatgatccactgcagcccgagctggactcctttaaggaggagctggataagtacttcaagaatcacacctctcccgacgtggatctgggcgacatctccggcatcaatgcctctgtggtgaacatccagaaggagatcgaccggctgaacgaggtggccaagaatctgaacgagagcctgatcgatctgcaggagctgggcaagtatgagcagtacatcaagggctctggcagagagaacctgtatttccagggaggaggaggcagcggatacatccctgaggcaccaagggacggacaggcctacgtgcgcaaggatggcgagtgggtgctgctgtccacctttctgggccatcatcaccaccaccaccaccactga

SEQ ID NO: 1397 - DNA, 3846 bp, Artificial Sequence
  Description of Artificial Sequence: Synthetic polynucleotide
atgggcatcctgccaagcccaggaatgcccgccctgctgtctctggtgagcctgctgtccgtgctgctgatgggatgcgtggcagagacaggcacacagtgcgtgaacctgaccacaaggacccagctgccccctgcctataccaattctttcacacggggcgtgtactatcccgacaaggtgtttagaagctccgtgctgcactccacacaggatctgtttctgcctttcttttctaacgtgacctggttccacgccatccacgtgtccggcaccaatggcacaaagcggttcgacaatcccgtgctgccttttaacgatggcgtgtacttcgccagcaccgagaagtccaacatcatcagaggctggatctttggcaccacactggactctaagacacagagcctgctgatcgtgaacaatgccaccaacgtggtgatcaaggtgtgcgagttccagttttgtaatgatccattcctgggcgtgtactatcacaagaacaataagtcctggatggagtctgagtttcgcgtgtattctagcgccaacaattgcacatttgagtacgtgagccagcccttcctgatggacctggagggcaagcagggcaatttcaagaacctgagggagttcgtgtttaagaatatcgatggctacttcaagatctacagcaagcacaccccaatcaacctggtgcgcgacctgccacagggattctccgccctggagccactggtggatctgcccatcggcatcaacatcacccggtttcagacactgctggccctgcacagatcctacctgacaccaggcgactcctctagcggatggaccgcaggagctgccgcctactatgtgggctatctgcagccccggaccttcctgctgaagtacaacgagaatggcaccatcacagacgcagtggattgcgccctggaccccctgtctgagacaaagtgtacactgaagagctttaccgtggagaagggcatctatcagacaagcaatttcagggtgcagcctaccgagtccatcgtgcgctttcccaatatcacaaacctgtgcccttttggcgaggtgttcaacgccaccagattcgccagcgtgtacgcctggaatcggaagagaatctccaactgcgtggccgactattctgtgctgtacaactccgcctctttcagcacctttaagtgctatggcgtgtctcccacaaagctgaatgatctgtgctttaccaacgtgtacgccgatagcttcgtgatcaggggagacgaagtgagacagatcgcaccaggacagacaggaaagatcgcagactacaattataagctgcctgacgatttcaccggctgcgtgatcgcctggaactccaacaatctggattctaaagtgggcggcaactacaattatctgtacaggctgtttcgcaagtccaatctgaagccattcgagcgggacatctccacagagatctaccaggccggctctaccccctgcaatggcgtggagggctttaactgttatttccctctgcagtcttacggcttccagccaacaaacggcgtgggctatcagccctacagagtggtggtgctgtcctttgagctgctgcacgcaccagcaacagtgtgcggcccaaagaagtctaccaatctggtgaagaacaagtgcgtgaacttcaacttcaacggactgaccggcacaggcgtgctgaccgagagcaataagaagttcctgccttttcagcagttcggcagggacatcgcagataccacagacgccgtgcgcgaccctcagaccctggagatcctggacatcacaccatgcagcttcggcggcgtgtccgtgatcacaccaggcaccaatacatccaaccaggtggccgtgctgtatcaggacgtgaattgtaccgaggtgcccgtggcaatccacgcagatcagctgacccctacatggcgggtgtactctaccggcagcaacgtgttccagacaagagccggatgcctgatcggagcagagcacgtgaacaatagctatgagtgcgacatccctatcggcgccggcatctgtgccagctaccagacccagacaaactccccatctggagcaggctccgtggccagccagtccatcatcgcctataccatgagcctgggcgccgagaacagcgtggcctactccaacaattctatcgccatccctaccaacttcacaatcagcgtgaccacagagatcctgccagtgtctatgaccaagacaagcgtggactgcacaatgtatatctgtggcgatagcaccgagtgctccaacctgctgctgcagtacggctccttttgtacccagctgaatagagccctgacaggcatcgccaaagagcaggataagaacacacaggaggtgttcgcccaggtgaagcagatctacaagaccccacccatcaaggactttggcggcttcaacttcagccagatcctgcctgatccaagcaagccctccaagaggtcttttatcgaggacctgctgttcaacaaggtgaccctggccgatgccggcttcatcaagcagtatggagattgcctgggagacatcgcagcccgcgacctgatctgtgcccagaagtttaatggcctgaccgtgctgcctccactgctgacagatgagatgatcgcccagtacacatctgccctgctggccggcaccatcacaagcggatggaccttcggcgcaggagccgccctgcagatcccttttgccatgcagatggcctataggttcaacggcatcggcgtgacccagaatgtgctgtacgagaaccagaagctgatcgccaatcagtttaacagcgccatcggcaagatccaggactctctgtcctctacagccagcgccctgggcaagctgcaggatgtggtgaatcagaacgcccaggccctgaataccctggtgaagcagctgagctccaacttcggcgccatctctagcgtgctgaatgacatcctgagccggctggacccccctgaggcagaggtgcagatcgacaggctgatcacaggccgcctgcagagcctgcagacctacgtgacacagcagctgatcagggcagcagagatcagagcctccgccaatctggccgccaccaagatgagcgagtgcgtgctgggacagtccaagagggtggacttttgtggcaagggctatcacctgatgtctttcccacagagcgcccctcacggcgtggtgtttctgcacgtgacctacgtgccagcccaggagaagaacttcaccacagcaccagccatctgccacgatggaaaggcacactttcctagggagggcgtgttcgtgtctaacggcacccactggtttgtgacacagcgcaatttctacgagccacagatcatcaccacagacaatacattcgtgagcggcaactgtgatgtggtgatcggcatcgtgaacaataccgtgtatgatccactgcagcccgagctggactcctttaaggaggagctggataagtacttcaagaatcacacctctcccgacgtggatctgggcgacatctccggcatcaatgcctctgtggtgaacatccagaaggagatcgaccggctgaacgaggtggccaagaatctgaacgagagcctgatcgatctgcaggagctgggcaagtatgagcagtacatcaagggctctggcagagagaacctgtatttccagggaggaggaggcagcggatacatccctgaggcaccaagggacggacaggcctacgtgcgcaaggatggcgagtgggtgctgctgtccacctttctgggccatcatcaccaccaccaccaccactga

SEQ ID NO: 1398 - DNA, 3846 bp, Artificial Sequence
  Description of Artificial Sequence: Synthetic polynucleotide
atgggcatcctgccaagcccaggaatgcccgccctgctgtctctggtgagcctgctgtccgtgctgctgatgggatgcgtggcagagacaggcacacagtgcgtgaacctgaccacaaggacccagctgccccctgcctataccaattctttcacacggggcgtgtactatcccgacaaggtgtttagaagctccgtgctgcactccacacaggatctgtttctgcctttcttttctaacgtgacctggttccacgccatccacgtgtccggcaccaatggcacaaaggacttcgacaatcccgtgctgccttttaacgatggcgtgtacttcgccagcaccgagaagtccaacatcatcagaggctggatctttggcaccacactggactctaagacacagagcctgctgatcgtgaacaatgccaccaacgtggtgatcaaggtgtgcgagttccagttttgtaatgatccattcctgggcgtgtactatcacaagaacaataagtcctggatggagtctgagtttcgcgtgtattctagcgccaacaattgcacatttgagtacgtgagccagcccttcctgatggacctggagggcaagcagggcaatttcaagaacctgagggagttcgtgtttaagaatatcgatggctacttcaagatctacagcaagcacaccccaatcaacctggtgcgcgacctgccacagggattctccgccctggagccactggtggatctgcccatcggcatcaacatcacccggtttcagacactgctggccctgcacagatcctacctgacaccaggcgactcctctagcggatggaccgcaggagctgccgcctactatgtgggctatctgcagccccggaccttcctgctgaagtacaacgagaatggcaccatcacagacgcagtggattgcgccctggaccccctgtctgagacaaagtgtacactgaagagctttaccgtggagaagggcatctatcagacaagcaatttcagggtgcagcctaccgagtccatcgtgcgctttcccaatatcacaaacctgtgcccttttggcgaggtgttcaacgccaccagattcgccagcgtgtacgcctggaatcggaagagaatctccaactgcgtggccgactattctgtgctgtacaactccgcctctttcagcacctttaagtgctatggcgtgtctcccacaaagctgaatgatctgtgctttaccaacgtgtacgccgatagcttcgtgatcaggggagacgaagtgagacagatcgcaccaggacagacaggaaagatcgcagactacaattataagctgcctgacgatttcaccggctgcgtgatcgcctggaactccaacaatctggattctaaagtgggcggcaactacaattatctgtacaggctgtttcgcaagtccaatctgaagccattcgagcgggacatctccacagagatctaccaggccggctctaccccctgcaatggcgtggagggctttaactgttatttccctctgcagtcttacggcttccagccaacaaacggcgtgggctatcagccctacagagtggtggtgctgtcctttgagctgctgcacgcaccagcaacagtgtgcggcccaaagaagtctaccaatctggtgaagaacaagtgcgtgaacttcaacttcaacggactgaccggcacaggcgtgctgaccgagagcaataagaagttcctgccttttcagcagttcggcagggacatcgcagataccacagacgccgtgcgcgaccctcagaccctggagatcctggacatcacaccatgcagcttcggcggcgtgtccgtgatcacaccaggcaccaatacatccaaccaggtggccgtgctgtatcaggacgtgaattgtaccgaggtgcccgtggcaatccacgcagatcagctgacccctacatggcgggtgtactctaccggcagcaacgtgttccagacaagagccggatgcctgatcggagcagagcacgtgaacaatagctatgagtgcgacatccctatcggcgccggcatctgtgccagctaccagacccagacaaactccccatctggagcaggctccgtggccagccagtccatcatcgcctataccatgagcctgggcgccgagaacagcgtggcctactccaacaattctatcgccatccctaccaacttcacaatcagcgtgaccacagagatcctgccagtgtctatgaccaagacaagcgtggactgcacaatgtatatctgtggcgatagcaccgagtgctccaacctgctgctgcagtacggctccttttgtacccagctgaatagagccctgacaggcatcgccgtggagcaggataagaacacacaggaggtgttcgcccaggtgaagcagatctacaagaccccacccatcaaggactttggcggcttcaacttcagccagatcctgcctgatccaagcaagccctccaagaggtcttttatcgaggacctgctgttcaacaaggtgaccctggccgatgccggcttcatcaagcagtatggagattgcctgggagacatcgcagcccgcgacctgatctgtgcccagaagtttaatggcctgaccgtgctgcctccactgctgacagatgagatgatcgcccagtacacatctgccctgctggccggcaccatcacaagcggatggaccttcggcgcaggagccgccctgcagatcccttttgccatgcagatggcctataggttcaacggcatcggcgtgacccagaatgtgctgtacgagaaccagaagctgatcgccaatcagtttaacagcgccatcggcaagatccaggactctctgtcctctacagccagcgccctgggcaagctgcaggatgtggtgaatcagaacgcccaggccctgaataccctggtgaagcagctgagctccaacttcggcgccatctctagcgtgctgaatgacatcctgagccggctggacccccctgaggcagaggtgcagatcgacaggctgatcacaggccgcctgcagagcctgcagacctacgtgacacagcagctgatcagggcagcagagatcagagcctccgccaatctggccgccaccaagatgagcgagtgcgtgctgggacagtccaagagggtggacttttgtggcaagggctatcacctgatgtctttcccacagagcgcccctcacggcgtggtgtttctgcacgtgacctacgtgccagcccaggagaagaacttcaccacagcaccagccatctgccacgatggaaaggcacactttcctagggagggcgtgttcgtgtctaacggcacccactggtttgtgacacagcgcaatttctacgagccacagatcatcaccacagacaatacattcgtgagcggcaactgtgatgtggtgatcggcatcgtgaacaataccgtgtatgatccactgcagcccgagctggactcctttaaggaggagctggataagtacttcaagaatcacacctctcccgacgtggatctgggcgacatctccggcatcaatgcctctgtggtgaacatccagaaggagatcgaccggctgaacgaggtggccaagaatctgaacgagagcctgatcgatctgcaggagctgggcaagtatgagcagtacatcaagggctctggcagagagaacctgtatttccagggaggaggaggcagcggatacatccctgaggcaccaagggacggacaggcctacgtgcgcaaggatggcgagtgggtgctgctgtccacctttctgggccatcatcaccaccaccaccaccactga

SEQ ID NO: 1399 - DNA, 3846 bp, Artificial Sequence
  Description of Artificial Sequence: Synthetic polynucleotide
atgggcatcctgccaagcccaggaatgcccgccctgctgtctctggtgagcctgctgtccgtgctgctgatgggatgcgtggcagagacaggcacacagtgcgtgaacctgaccacaaggacccagctgccccctgcctataccaattctttcacacggggcgtgtactatcccgacaaggtgtttagaagctccgtgctgcactccacacaggatctgtttctgcctttcttttctaacgtgacctggttccacgccatccacgtgtccggcaccaatggcacaaagcggttcgacaatcccgtgctgccttttaacgatggcgtgtacttcgccagcaccgagaagtccaacatcatcagaggctggatctttggcaccacactggactctaagacacagagcctgctgatcgtgaacaatgccaccaacgtggtgatcaaggtgtgcgagttccagttttgtaatgatccattcctgggcgtgtactatcacaagaacaataagtcctggcgcgagtctgagtttcgcgtgtattctagcgccaacaattgcacatttgagtacgtgagccagcccttcctgatggacctggagggcaagcagggcaatttcaagaacctgagggagttcgtgtttaagaatatcgatggctacttcaagatctacagcaagcacaccccaatcaacctggtgcgcgacctgccacagggattctccgccctggagccactggtggatctgcccatcggcatcaacatcacccggtttcagacactgctggccctgcacagatcctacctgacaccaggcgactcctctagcggatggaccgcaggagctgccgcctactatgtgggctatctgcagccccggaccttcctgctgaagtacaacgagaatggcaccatcacagacgcagtggattgcgccctggaccccctgtctgagacaaagtgtacactgaagagctttaccgtggagaagggcatctatcagacaagcaatttcagggtgcagcctaccgagtccatcgtgcgctttcccaatatcacaaacctgtgcccttttggcgaggtgttcaacgccaccagattcgccagcgtgtacgcctggaatcggaagagaatctccaactgcgtggccgactattctgtgctgtacaactccgcctctttcagcacctttaagtgctatggcgtgtctcccacaaagctgaatgatctgtgctttaccaacgtgtacgccgatagcttcgtgatcaggggagacgaagtgagacagatcgcaccaggacagacaggaaagatcgcagactacaattataagctgcctgacgatttcaccggctgcgtgatcgcctggaactccaacaatctggattctaaagtgggcggcaactacaattatctgtacaggctgtttcgcaagtccaatctgaagccattcgagcgggacatctccacagagatctaccaggccggctctaccccctgcaatggcgtggagggctttaactgttatttccctctgcagtcttacggcttccagccaacaaacggcgtgggctatcagccctacagagtggtggtgctgtcctttgagctgctgcacgcaccagcaacagtgtgcggcccaaagaagtctaccaatctggtgaagaacaagtgcgtgaacttcaacttcaacggactgaccggcacaggcgtgctgaccgagagcaataagaagttcctgccttttcagcagttcggcagggacatcgcagataccacagacgccgtgcgcgaccctcagaccctggagatcctggacatcacaccatgcagcttcggcggcgtgtccgtgatcacaccaggcaccaatacatccaaccaggtggccgtgctgtatcaggacgtgaattgtaccgaggtgcccgtggcaatccacgcagatcagctgacccctacatggcgggtgtactctaccggcagcaacgtgttccagacaagagccggatgcctgatcggagcagagcacgtgaacaatagctatgagtgcgacatccctatcggcgccggcatctgtgccagctaccagacccagacaaactccccatctggagcaggctccgtggccagccagtccatcatcgcctataccatgagcctgggcgccgagaacagcgtggcctactccaacaattctatcgccatccctaccaacttcacaatcagcgtgaccacagagatcctgccagtgtctatgaccaagacaagcgtggactgcacaatgtatatctgtggcgatagcaccgagtgctccaacctgctgctgcagtacggctccttttgtacccagctgaatagagccctgacaggcatcgccgtggagcaggataagaacacacaggaggtgttcgcccaggtgaagcagatctacaagaccccacccatcaaggactttggcggcttcaacttcagccagatcctgcctgatccaagcaagccctccaagaggtcttttatcgaggacctgctgttcaacaaggtgaccctggccgatgccggcttcatcaagcagtatggagattgcctgggagacatcgcagcccgcgacctgatctgtgcccagaagtttaatggcctgaccgtgctgcctccactgctgacagatgagatgatcgcccagtacacatctgccctgctggccggcaccatcacaagcggatggaccttcggcgcaggagccgccctgcagatcccttttgccatgcagatggcctataggttcaacggcatcggcgtgacccagaatgtgctgtacgagaaccagaagctgatcgccaatcagtttaacagcgccatcggcaagatccaggactctctgtcctctacagccagcgccctgggcaagctgcaggatgtggtgaatcagaacgcccaggccctgaataccctggtgaagcagctgagctccaacttcggcgccatctctagcgtgctgaatgacatcctgagccggctggacccccctgaggcagaggtgcagatcgacaggctgatcacaggccgcctgcagagcctgcagacctacgtgacacagcagctgatcagggcagcagagatcagagcctccgccaatctggccgccaccaagatgagcgagtgcgtgctgggacagtccaagagggtggacttttgtggcaagggctatcacctgatgtctttcccacagagcgcccctcacggcgtggtgtttctgcacgtgacctacgtgccagcccaggagaagaacttcaccacagcaccagccatctgccacgatggaaaggcacactttcctagggagggcgtgttcgtgtctaacggcacccactggtttgtgacacagcgcaatttctacgagccacagatcatcaccacagacaatacattcgtgagcggcaactgtgatgtggtgatcggcatcgtgaacaataccgtgtatgatccactgcagcccgagctggactcctttaaggaggagctggataagtacttcaagaatcacacctctcccgacgtggatctgggcgacatctccggcatcaatgcctctgtggtgaacatccagaaggagatcgaccggctgaacgaggtggccaagaatctgaacgagagcctgatcgatctgcaggagctgggcaagtatgagcagtacatcaagggctctggcagagagaacctgtatttccagggaggaggaggcagcggatacatccctgaggcaccaagggacggacaggcctacgtgcgcaaggatggcgagtgggtgctgctgtccacctttctgggccatcatcaccaccaccaccaccactga

SEQ ID NO: 1400 - DNA, 3846 bp, Artificial Sequence
  Description of Artificial Sequence: Synthetic polynucleotide
atgggcatcctgccaagcccaggaatgcccgccctgctgtctctggtgagcctgctgtccgtgctgctgatgggatgcgtggcagagacaggcacacagtgcgtgaacctgaccacaaggacccagctgccccctgcctataccaattctttcacacggggcgtgtactatcccgacaaggtgtttagaagctccgtgctgcactccacacaggatctgtttctgcctttcttttctaacgtgacctggttccacgccatccacgtgtccggcaccaatggcacaaagcggttcgacaatcccgtgctgccttttaacgatggcgtgtacttcgccagcaccgagaagtccaacatcatcagaggctggatctttggcaccacactggactctaagacacagagcctgctgatcgtgaacaatgccaccaacgtggtgatcaaggtgtgcgagttccagttttgtaatgatccattcctgggcgtgtactatcacaagaacaataagtcctggatggagtctgagtttcgcgtgtattctagcgccaacaattgcacatttgagtacgtgagccagcccttcctgatggacctggagggcaagcagggcaatttcaagaacctgagggagttcgtgtttaagaatatcgatggctacttcaagatctacagcaagcacaccccaatcaacctggtgcgcgacctgccacagggattctccgccctggagccactggtggatctgcccatcggcatcaacatcacccggtttcagacactgctggccctgcacagatcctacctgacaccaggcgactcctctagcggatggaccgcaggagctgccgcctactatgtgggctatctgcagcccacgaccttcctgctgaagtacaacgagaatggcaccatcacagacgcagtggattgcgccctggaccccctgtctgagacaaagtgtacactgaagagctttaccgtggagaagggcatctatcagacaagcaatttcagggtgcagcctaccgagtccatcgtgcgctttcccaatatcacaaacctgtgcccttttggcgaggtgttcaacgccaccagattcgccagcgtgtacgcctggaatcggaagagaatctccaactgcgtggccgactattctgtgctgtacaactccgcctctttcagcacctttaagtgctatggcgtgtctcccacaaagctgaatgatctgtgctttaccaacgtgtacgccgatagcttcgtgatcaggggagacgaagtgagacagatcgcaccaggacagacaggaaagatcgcagactacaattataagctgcctgacgatttcaccggctgcgtgatcgcctggaactccaacaatctggattctaaagtgggcggcaactacaattatctgtacaggctgtttcgcaagtccaatctgaagccattcgagcgggacatctccacagagatctaccaggccggctctaccccctgcaatggcgtggagggctttaactgttatttccctctgcagtcttacggcttccagccaacaaacggcgtgggctatcagccctacagagtggtggtgctgtcctttgagctgctgcacgcaccagcaacagtgtgcggcccaaagaagtctaccaatctggtgaagaacaagtgcgtgaacttcaacttcaacggactgaccggcacaggcgtgctgaccgagagcaataagaagttcctgccttttcagcagttcggcagggacatcgcagataccacagacgccgtgcgcgaccctcagaccctggagatcctggacatcacaccatgcagcttcggcggcgtgtccgtgatcacaccaggcaccaatacatccaaccaggtggccgtgctgtatcaggacgtgaattgtaccgaggtgcccgtggcaatccacgcagatcagctgacccctacatggcgggtgtactctaccggcagcaacgtgttccagacaagagccggatgcctgatcggagcagagcacgtgaacaatagctatgagtgcgacatccctatcggcgccggcatctgtgccagctaccagacccagacaaactccccatctggagcaggctccgtggccagccagtccatcatcgcctataccatgagcctgggcgccgagaacagcgtggcctactccaacaattctatcgccatccctaccaacttcacaatcagcgtgaccacagagatcctgccagtgtctatgaccaagacaagcgtggactgcacaatgtatatctgtggcgatagcaccgagtgctccaacctgctgctgcagtacggctccttttgtacccagctgaatagagccctgacaggcatcgccgtggagcaggataagaacacacaggaggtgttcgcccaggtgaagcagatctacaagaccccacccatcaaggactttggcggcttcaacttcagccagatcctgcctgatccaagcaagccctccaagaggtcttttatcgaggacctgctgttcaacaaggtgaccctggccgatgccggcttcatcaagcagtatggagattgcctgggagacatcgcagcccgcgacctgatctgtgcccagaagtttaatggcctgaccgtgctgcctccactgctgacagatgagatgatcgcccagtacacatctgccctgctggccggcaccatcacaagcggatggaccttcggcgcaggagccgccctgcagatcccttttgccatgcagatggcctataggttcaacggcatcggcgtgacccagaatgtgctgtacgagaaccagaagctgatcgccaatcagtttaacagcgccatcggcaagatccaggactctctgtcctctacagccagcgccctgggcaagctgcaggatgtggtgaatcagaacgcccaggccctgaataccctggtgaagcagctgagctccaacttcggcgccatctctagcgtgctgaatgacatcctgagccggctggacccccctgaggcagaggtgcagatcgacaggctgatcacaggccgcctgcagagcctgcagacctacgtgacacagcagctgatcagggcagcagagatcagagcctccgccaatctggccgccaccaagatgagcgagtgcgtgctgggacagtccaagagggtggacttttgtggcaagggctatcacctgatgtctttcccacagagcgcccctcacggcgtggtgtttctgcacgtgacctacgtgccagcccaggagaagaacttcaccacagcaccagccatctgccacgatggaaaggcacactttcctagggagggcgtgttcgtgtctaacggcacccactggtttgtgacacagcgcaatttctacgagccacagatcatcaccacagacaatacattcgtgagcggcaactgtgatgtggtgatcggcatcgtgaacaataccgtgtatgatccactgcagcccgagctggactcctttaaggaggagctggataagtacttcaagaatcacacctctcccgacgtggatctgggcgacatctccggcatcaatgcctctgtggtgaacatccagaaggagatcgaccggctgaacgaggtggccaagaatctgaacgagagcctgatcgatctgcaggagctgggcaagtatgagcagtacatcaagggctctggcagagagaacctgtatttccagggaggaggaggcagcggatacatccctgaggcaccaagggacggacaggcctacgtgcgcaaggatggcgagtgggtgctgctgtccacctttctgggccatcatcaccaccaccaccaccactga

SEQ ID NO: 1401 - DNA, 3846 bp, Artificial Sequence
  Description of Artificial Sequence: Synthetic polynucleotide
atgggcatcctgccaagcccaggaatgcccgccctgctgtctctggtgagcctgctgtccgtgctgctgatgggatgcgtggcagagacaggcacacagtgcgtgaacctgaccacaaggacccagctgccccctgcctataccaattctttcacacggggcgtgtactatcccgacaaggtgtttagaagctccgtgctgcactccacacaggatctgtttctgcctttcttttctaacgtgacctggttccacgccatccacgtgtccggcaccaatggcacaaagcggttcgacaatcccgtgctgccttttaacgatggcgtgtacttcgccagcaccgagaagtccaacatcatcagaggctggatctttggcaccacactggactctaagacacagagcctgctgatcgtgaacaatgccaccaacgtggtgatcaaggtgtgcgagttccagttttgtaatgatccattcctgggcgtgtactatcacaagaacaataagtcctggatggagtctgagtttcgcgtgtattctagcgccaacaattgcacatttgagtacgtgagccagcccttcctgatggacctggagggcaagcagggcaatttcaagaacctgagggagttcgtgtttaagaatatcgatggctacttcaagatctacagcaagcacaccccaatcaacctggtgcgcgacctgccacagggattctccgccctggagccactggtggatctgcccatcggcatcaacatcacccggtttcagacactgctggccctgcacagatcctacctgacaccaggcgactcctctagcggatggaccgcaggagctgccgcctactatgtgggctatctgcagccccggaccttcctgctgaagtacaacgagaatggcaccatcacagacgcagtggattgcgccctggaccccctgtctgagacaaagtgtacactgaagagctttaccgtggagaagggcatctatcagacaagcaatttcagggtgcagcctaccgagtccatcgtgcgctttcccaatatcacaaacctgtgcccttttggcgaggtgttcaacgccaccagattcgccagcgtgtacgcctggaatcggaagagaatctccaactgcgtggccgactattctgtgctgtacaactccgcctctttcagcacctttaagtgctatggcgtgtctcccacaaagctgaatgatctgtgctttaccaacgtgtacgccgatagcttcgtgatcaggggagacgaagtgagacagatcgcaccaggacagacaggaaagatcgcagactacaattataagctgcctgacgatttcaccggctgcgtgatcgcctggaactccaacaatctggattctaaagtgggcggcaactacaattatctgtacaggctgtttcgcaagtccaatctgaagccattcgagcgggacatctccacagagatctaccaggccggctctaccccctgcaatggcgtggagggctttaactgttatttccctctgcagtcttacggcttccagccaacaaacggcgtgggctatcagccctacagagtggtggtgctgtcctttgagctgctgcacgcaccagcaacagtgtgcggcccaaagaagtctaccaatctggtgaagaacaagtgcgtgaacttcaacttcaacggactgaccggcacaggcgtgctgaccgagagcaataagaagttcctgccttttcagcagttcggcagggacatcgcagataccacagacgccgtgcgcgaccctcagaccctggagatcctggacatcacaccatgcagcttcggcggcgtgtccgtgatcacaccaggcaccaatacatccaaccaggtggccgtgctgtatcaggacgtgaattgtaccgaggtgcccgtggcaatccacgcagatcagctgacccctacatggcgggtgtactctaccggcagcaacgtgttccagacaagagccggatgcctgatcggagcagagcacgtgaacaatagctatgagtgcgacatccctatcggcgccggcatctgtgccagctaccagacccagacaaactccccatctggagcaggctccgtggccagccagtccatcatcgcctataccatgagcctgggcgccgagaacagcgtggcctactccaacaattctatcgccatccctaccaacttcacaatcagcgtgaccacagagatcctgccagtgtctatgaccaagacaagcgtggactgcacaatgtatatctgtggcgatagcaccgagtgctccaacctgctgctgcagtacggctccttttgtacccagctgaatagagccctgacaggcatcgccgtggagcaggataagaacacacaggaggtgttcgcccaggtgaagcagatctacaagaccccacccatcaaggactttggcggcttcaacttcagccagatcctgcctgatccaagcaagccctccaagaggtcttttatcgaggacctgctgttcaacaaggtgaccctggccgatgccggcttcatcaagcagtatggagattgcctgggagacatcgcagcccgcgacctgatctgtgcccagaagtttaatggcctgaccgtgctgcctccactgctgacagatgagatgatcgcccagtacacatctgccctgctggccggcaccatcacaagcggatggaccttcggcgcaggagccgccctgcagatcccttttgccatgcagatggcctataggttcaacggcatcggcgtgacccagaatgtgctgtacgagaaccagaagctgatcgccaatcagtttaacagcgccatcggcaagatccaggactctctgtcctctacagccagcgccctgggcaagctgcaggatgtggtgaatcagaacgcccaggccctgaataccctggtgaagcagctgagctccaacttcggcgccatctctagcgtgctgaatgacatcctgagccggctggacccccctgaggcagaggtgcagatcgacaggctgatcacaggccgcctgcagagcctgcagacctacgtgacacagcagctgatcagggcagcagagatcagagcctccgccaatctggccgccaccaagatgagcgagtgcgtgctgggacagtccaagagggtggacttttgtggcaagggctatcacctgatgtctttcccacagagcgcccctcacggcgtggtgtttctgcacgtgacctacgtgccagcccaggagaagaacttcaccacagcaccagccatctgccacgatggaaaggcacactttcctagggagggcgtgttcgtgtctaacggcaccgaatggtttgtgacacagcgcaatttctacgagccacagatcatcaccacagacaatacattcgtgagcggcaactgtgatgtggtgatcggcatcgtgaacaataccgtgtatgatccactgcagcccgagctggactcctttaaggaggagctggataagtacttcaagaatcacacctctcccgacgtggatctgggcgacatctccggcatcaatgcctctgtggtgaacatccagaaggagatcgaccggctgaacgaggtggccaagaatctgaacgagagcctgatcgatctgcaggagctgggcaagtatgagcagtacatcaagggctctggcagagagaacctgtatttccagggaggaggaggcagcggatacatccctgaggcaccaagggacggacaggcctacgtgcgcaaggatggcgagtgggtgctgctgtccacctttctgggccatcatcaccaccaccaccaccactga

SEQ ID NO: 1402 - DNA, 3846 bp, Artificial Sequence
  Description of Artificial Sequence: Synthetic polynucleotide
atgggcatcctgccaagcccaggaatgcccgccctgctgtctctggtgagcctgctgtccgtgctgctgatgggatgcgtggcagagacaggcacacagtgcgtgaacctgaccacaaggacccagctgccccctgcctataccaattctttcacacggggcgtgtactatcccgacaaggtgtttagaagctccgtgctgcactccacacaggatctgtttctgcctttcttttctaacgtgacctggttccacgccatccacgtgtccggcaccaatggcacaaagcggttcgacaatcccgtgctgccttttaacgatggcgtgtacttcgccagcaccgagaagtccaacatcatcagaggctggatctttggcaccacactggactctaagacacagagcctgctgatcgtgaacaatgccaccaacgtggtgatcaaggtgtgcgagttccagttttgtgataatccattcctgggcgtgtactatcacaagaacaataagtcctggatggaggaagagtttcgcgtgtattctagcgccaacaattgcacatttgagtacgtgagccagcccttcctgatggacctggagggcaagcagggcaatttcaagaacctgagggagttcgtgtttaagaatatcgatggctacttcaagatctacagcaagcacaccccaatcaacctggtgcgcgacctgccacagggattctccgccctggagccactggtggatctgcccatcggcatcaacatcacccggtttcagacactgctggccctgcacagatcctacctgacaccaggcgactcctctagcggatggaccgcaggagctgccgcctactatgtgggctatctgcagccccggaccttcctgctgaagtacaacgagaatggcaccatcacagacgcagtggattgcgccctggaccccctgtctgagacaaagtgtacactgaagagctttaccgtggagaagggcatctatcagacaagcaatttcagggtgcagcctaccgagtccatcgtgcgctttcccaatatcacaaacctgtgcccttttggcgaggtgttcaacgccaccagattcgccagcgtgtacgcctggaatcggaagagaatctccaactgcgtggccgactattctgtgctgtacaactccgcctctttcagcacctttaagtgctatggcgtgtctcccacaaagctgaatgatctgtgctttaccaacgtgtacgccgatagcttcgtgatcaggggagacgaagtgagacagatcgcaccaggacagacaggaaagatcgcagactacaattataagctgcctgacgatttcaccggctgcgtgatcgcctggaactccaacaatctggattctaaagtgggcggcaactacaattatctgtacaggctgtttcgcaagtccaatctgaagccattcgagcgggacatctccacagagatctaccaggccggctctaccccctgcaatggcgtggagggctttaactgttatttccctctgcagtcttacggcttccagccaacaaacggcgtgggctatcagccctacagagtggtggtgctgtcctttgagctgctgcacgcaccagcaacagtgtgcggcccaaagaagtctaccaatctggtgaagaacaagtgcgtgaacttcaacttcaacggactgaccggcacaggcgtgctgaccgagagcaataagaagttcctgccttttcagcagttcggcagggacatcgcagataccacagacgccgtgcgcgaccctcagaccctggagatcctggacatcacaccatgcagcttcggcggcgtgtccgtgatcacaccaggcaccaatacatccaaccaggtggccgtgctgtatcaggacgtgaattgtaccgaggtgcccgtggcaatccacgcagatcagctgacccctacatggcgggtgtactctaccggcagcaacgtgttccagacaagagccggatgcctgatcggagcagagcacgtgaacaatagctatgagtgcgacatccctatcggcgccggcatctgtgccagctaccagacccagacaaactccccatctggagcaggctccgtggccagccagtccatcatcgcctataccatgagcctgggcgccgagaacagcgtggcctactccaacaattctatcgccatccctaccaacttcacaatcagcgtgaccacagagatcctgccagtgtctatgaccaagacaagcgtggactgcacaatgtatatctgtggcgatagcaccgagtgctccaacctgctgctgcagtacggctccttttgtacccagctgaatagagccctgacaggcatcgccgtggagcaggataagaacacacaggaggtgttcgcccaggtgaagcagatctacaagaccccacccatcaaggactttggcggcttcaacttcagccagatcctgcctgatccaagcaagccctccaagaggtcttttatcgaggacctgctgttcaacaaggtgaccctggccgatgccggcttcatcaagcagtatggagattgcctgggagacatcgcagcccgcgacctgatctgtgcccagaagtttaatggcctgaccgtgctgcctccactgctgacagatgagatgatcgcccagtacacatctgccctgctggccggcaccatcacaagcggatggaccttcggcgcaggagccgccctgcagatcccttttgccatgcagatggcctataggttcaacggcatcggcgtgacccagaatgtgctgtacgagaaccagaagctgatcgccaatcagtttaacagcgccatcggcaagatccaggactctctgtcctctacagccagcgccctgggcaagctgcaggatgtggtgaatcagaacgcccaggccctgaataccctggtgaagcagctgagctccaacttcggcgccatctctagcgtgctgaatgacatcctgagccggctggacccccctgaggcagaggtgcagatcgacaggctgatcacaggccgcctgcagagcctgcagacctacgtgacacagcagctgatcagggcagcagagatcagagcctccgccaatctggccgccaccaagatgagcgagtgcgtgctgggacagtccaagagggtggacttttgtggcaagggctatcacctgatgtctttcccacagagcgcccctcacggcgtggtgtttctgcacgtgacctacgtgccagcccaggagaagaacttcaccacagcaccagccatctgccacgatggaaaggcacactttcctagggagggcgtgttcgtgtctaacggcacccactggtttgtgacacagcgcaatttctacgagccacagatcatcaccacagacaatacattcgtgagcggcaactgtgatgtggtgatcggcatcgtgaacaataccgtgtatgatccactgcagcccgagctggactcctttaaggaggagctggataagtacttcaagaatcacacctctcccgacgtggatctgggcgacatctccggcatcaatgcctctgtggtgaacatccagaaggagatcgaccggctgaacgaggtggccaagaatctgaacgagagcctgatcgatctgcaggagctgggcaagtatgagcagtacatcaagggctctggcagagagaacctgtatttccagggaggaggaggcagcggatacatccctgaggcaccaagggacggacaggcctacgtgcgcaaggatggcgagtgggtgctgctgtccacctttctgggccatcatcaccaccaccaccaccactga

SEQ ID NO: 1403 - DNA, 3846 bp, Artificial Sequence
  Description of Artificial Sequence: Synthetic polynucleotide
atgggcatcctgccaagcccaggaatgcccgccctgctgtctctggtgagcctgctgtccgtgctgctgatgggatgcgtggcagagacaggcacacagtgcgtgaacctgaccacaaggacccagctgccccctgcctataccaattctttcacacggggcgtgtactatcccgacaaggtgtttagaagctccgtgctgcactccacacaggatctgtttctgcctttcttttctaacgtgacctggttccacgccatccacgtgtccggcaccaatggcacaaagcggttcgacaatcccgtgctgccttttaacgatggcgtgtacttcgccagcaccgagaagtccaacatcatcagaggctggatctttggcaccacactggactctaagacacagagcctgctgatcgtgaacaatgccaccaacgtggtgatcaaggtgtgcgagttccagttttgtaatgatccattcctgggcgtgtactatcacaagaacaataagtcctggatggagtctgagtttcgcgtgtattctagcgccaacaattgcacatttgagtacgtgagccagcccttcctgatggacctggagggcaagcagggcaatttcaagaacctgagggagttcgtgtttaagaatatcgatggctacttcaagatctacagcaagcacaccccaatcaacctggtgcgcgacctgccacagggattctccgccctggagccactggtggatctgcccatcggcatcaacatcacccggtttcagacactgctggccctgcacagatcctacctgacaccaggcgactcctctagcggatggaccgcaggagctgccgcctactatgtgggctatctgcagccccggaccttcctgctgaagtacaacgagaatggcaccatcacagacgcagtggattgcgccctggaccccctgtctgagacaaagtgtacactgaagagctttaccgtggagaagggcatctatcagacaagcaatttcagggtgcagcctaccgagtccatcgtgcgctttcccaatatcacaaacctgtgcccttttggcgaggtgttcaacgccaccagattcgccagcgtgtacgcctggaatcggaagagaatctccaactgcgtggccgactattctgtgctgtacaactccgcctctttcagcacctttaagtgctatggcgtgtctcccacaaagctgaatgatctgtgctttaccaacgtgtacgccgatagcttcgtgatcaggggagacgaagtgagacagatcgcaccaggacagacaggaaagatcgcagactacaattataagctgcctgacgatttcaccggctgcgtgatcgcctggaactccaacaatctggattctaaagtgggcggcaactacaattatctgtacaggctgtttcgcaagtccaatctgaagccattcgagcgggacatctccacagagatctaccaggccggctctaccccctgcaatggcgtggagggctttaactgttatttccctctgcagtcttacggcttccagccaacaaacggcgtgggctatcagccctacagagtggtggtgctgtcctttgagctgctgcacgcaccagcaacagtgtgcggcccaaagaagtctaccaatctggtgaagaacaagtgcgtgaacttcaacttcaacggactgaccggcacaggcgtgctgaccgagagcaataagaagttcctgccttttcagcagttcggcagggacatcgcagataccacagacgccgtgcgcgaccctcagaccctggagatcctggacatcacaccatgcagcttcggcggcgtgtccgtgatcacaccaggcaccaatacatccaaccaggtggccgtgctgtatcaggacgtgaattgtaccgaggtgcccgtggcaatccacgcagatcagctgacccctacatggcgggtgtactctaccggcagcaacgtgttccagacaagagccggatgcctgatcggagcagagcacgtgaacaatagctatgagtgcgacatccctatcggcgccggcatctgtgccagctaccagacccagacaaactccccatctggagcaggctccgtggccagccagtccatcatcgcctataccatgagcctgggcgccgagaacagcgtggcctactccaacaattctatcgccatccctaccaacttcacaatcagcgtgaccacagagtttctgccagtgtctatgaccaagacaagcgtggactgcacaatgtatatctgtggcgatagcaccgagtgctccaacctgctgctgcagtacggctccttttgtacccagctgaatagagccctgacaggcatcgccgtggagcaggataagaacacacaggaggtgttcgcccaggtgaagcagatctacaagaccccacccatcaaggactttggcggcttcaacttcagccagatcctgcctgatccaagcaagccctccaagaggtcttttatcgaggacctgctgttcaacaaggtgaccctggccgatgccggcttcatcaagcagtatggagattgcctgggagacatcgcagcccgcgacctgatctgtgcccagaagtttaatggcctgaccgtgctgcctccactgctgacagatgagatgatcgcccagtacacatctgccctgctggccggcaccatcacaagcggatggaccttcggcgcaggagccgccctgcagatcccttttgccatgcagatggcctataggttcaacggcatcggcgtgacccagaatgtgctgtacgagaaccagaagctgatcgccaatcagtttaacagcgccatcggcaagatccaggactctctgtcctctacagccagcgccctgggcaagctgcaggatgtggtgaatcagaacgcccaggccctgaataccctggtgaagcagctgagctccaacttcggcgccatctctagcgtgctgaatgacatcctgagccggctggacccccctgaggcagaggtgcagatcgacaggctgatcacaggccgcctgcagagcctgcagacctacgtgacacagcagctgatcagggcagcagagatcagagcctccgccaatctggccgccaccaagatgagcgagtgcgtgctgggacagtccaagagggtggacttttgtggcaagggctatcacctgatgtctttcccacagagcgcccctcacggcgtggtgtttctgcacgtgacctacgtgccagcccaggagaagaacttcaccacagcaccagccatctgccacgatggaaaggcacactttcctagggagggcgtgttcgtgtctaacggcacccactggtttgtgacacagcgcaatttctacgagccacagatcatcaccacagacaatacattcgtgagcggcaactgtgatgtggtgatcggcatcgtgaacaataccgtgtatgatccactgcagcccgagctggactcctttaaggaggagctggataagtacttcaagaatcacacctctcccgacgtggatctgggcgacatctccggcatcaatgcctctgtggtgaacatccagaaggagatcgaccggctgaacgaggtggccaagaatctgaacgagagcctgatcgatctgcaggagctgggcaagtatgagcagtacatcaagggctctggcagagagaacctgtatttccagggaggaggaggcagcggatacatccctgaggcaccaagggacggacaggcctacgtgcgcaaggatggcgagtgggtgctgctgtccacctttctgggccatcatcaccaccaccaccaccactga

SEQ ID NO: 1404 - DNA, 3846 bp, Artificial Sequence
  Description of Artificial Sequence: Synthetic polynucleotide
atgggcatcctgccaagcccaggaatgcccgccctgctgtctctggtgagcctgctgtccgtgctgctgatgggatgcgtggcagagacaggcacacagtgcgtgaacctgaccacaaggacccagctgccccctgcctataccaattctttcacacggggcgtgtactatcccgacaaggtgtttagaagctccgtgctgcactccacacaggatctgtttctgcctttcttttctaacgtgacctggttccacgccatccacgtgtccggcaccaatggcacaaagcggttcgacaatcccgtgctgccttttaacgatggcgtgtacttcgccagcaccgagaagtccaacatcatcagaggctggatctttggcaccacactggactctaagacacagagcctgctgatcgtgaacaatgccaccaacgtggtgatcaaggtgtgcgagttccagttttgtaatgatccattcctgggcgtgtactatcacaagaacaataagtcctggatggagtctgagtttcgcgtgtattctagcgccaacaattgcacatttgagtacgtgagccagcccttcctgatggacctggagggcaagcagggcaatttcaagaacctgagggagttcgtgtttaagaatatcgatggctacttcaagatctacagcaagcacaccccaatcaacctggtgcgcgacctgccacagggattctccgccctggagccactggtggatctgcccatcggcatcaacatcacccggtttcagacactgctggccctgcacagatcctacctgacaccaggcgactcctctagcggatggaccgcaggagctgccgcctactatgtgggctatctgcagccccggaccttcctgctgaagtacaacgagaatggcaccatcacagacgcagtggattgcgccctggaccccctgtctgagacaaagtgtacactgaagagctttaccgtggagaagggcatctatcagacaagcaatttcagggtgcagcctaccgagtccatcgtgcgctttcccaatatcacaaacctgtgcccttttggcgaggtgttcaacgccaccagattcgccagcgtgtacgcctggaatcggaagagaatctccaactgcgtggccgactattctgtgctgtacaactccgcctctttcagcacctttaagtgctatggcgtgtctcccacaaagctgaatgatctgtgctttaccaacgtgtacgccgatagcttcgtgatcaggggagacgaagtgagacagatcgcaccaggacagacaggaaagatcgcagactacaattataagctgcctgacgatttcaccggctgcgtgatcgcctggaactccaacaatctggattctaaagtgggcggcaactacaattatctgtacaggctgtttcgcaagtccaatctgaagccattcgagcgggacatctccacagagatctaccaggccggctctaccccctgcaatggcgtggagggctttaactgttatttccctctgcagtcttacggcttccagccaacaaacggcgtgggctatcagccctacagagtggtggtgctgtcctttgagctgctgcacgcaccagcaacagtgtgcggcccaaagaagtctaccaatctggtgaagaacaagtgcgtgaacttcaacttcaacggactgaccggcacaggcgtgctgaccgagagcaataagaagttcctgccttttcagcagttcggcagggacatcgcagataccacagacgccgtgcgcgaccctcagaccctggagatcctggacatcacaccatgcagcttcggcggcgtgtccgtgatcacaccaggcaccaatacatccaaccaggtggccgtgctgtatcaggacgtgaattgtaccgaggtgcccgtggcaatccacgcagatcagctgacccctacatggcgggtgtactctaccggcagcaacgtgttccagacaagagccggatgcctgatcggagcagagcacgtgaacaatagctatgagtgcgacatccctatcggcgccggcatctgtgccagctaccagacccagacaaactccccatctggagcaggctccgtggccagccagtccatcatcgcctataccatgagcctgggcgccgagaacagcgtggcctactccaacaattctatcgccatccctaccaacttcacaatcagcgtgaccacagagatcctgccagtgtctatgaccaagacaagcgtggactgcacaatgtatatctgtggcgatagcaccgagtgctccaacctgctgctgcagtacggctccttttgtacccagctgaatagagccctgacaggcatcgccgtggagcaggataagaacacacaggaggtgttcgcccaggtgaagcagatctacaagaccccacccatcaaggactttggcggcttcaacttcagccagatcctgcctgatccaagcaagccctccaagaggtcttttatcgaggacctgctgttcaacaaggtgaccctggccgatgccggcttcatcaagcagtatggagattgcctgggagacatcgcagcccgcgacctgatctgtgcccagaagtttaatggcctgaccgtgctgcctccactgctgacagatgagatgatcgcccagtacacatctgccctgctggccggcaccatcacaagcggatggaccttcggcgcaggagccgccctgcagatcccttttgccatgcagatggcctataggttcaacggcatcggcgtgacccagaatgtgctgtacgagaaccagaagctgatcgccaatcagtttaacagcgccatcggcaagatccaggactctctgtcctctacagccagcgccctgggcaagctgcaggatgtggtgaatcagaacgcccaggccctgaataccctggtgaagcagctgagctccaacttcggcgccatctctagcgtgctgaatgacatcctgagccggctggacccccctgaggcagaggtgcagatcgacaggctgatcacaggccgcctgcagagcctgcagacctacgtgacacagcagctgatcagggcagcagagatcagagcctccgcccaactggccgccaccaagatgagcgagtgcgtgctgggacagtccaagagggtggacttttgtggcaagggctatcacctgatgtctttcccacagagcgcccctcacggcgtggtgtttctgcacgtgacctacgtgccagcccaggagaagaacttcaccacagcaccagccatctgccacgatggaaaggcacactttcctagggagggcgtgttcgtgtctaacggcacccactggtttgtgacacagcgcaatttctacgagccacagatcatcaccacagacaatacattcgtgagcggcaactgtgatgtggtgatcggcatcgtgaacaataccgtgtatgatccactgcagcccgagctggactcctttaaggaggagctggataagtacttcaagaatcacacctctcccgacgtggatctgggcgacatctccggcatcaatgcctctgtggtgaacatccagaaggagatcgaccggctgaacgaggtggccaagaatctgaacgagagcctgatcgatctgcaggagctgggcaagtatgagcagtacatcaagggctctggcagagagaacctgtatttccagggaggaggaggcagcggatacatccctgaggcaccaagggacggacaggcctacgtgcgcaaggatggcgagtgggtgctgctgtccacctttctgggccatcatcaccaccaccaccaccactga

SEQ ID NO: 1405 - DNA, 3846 bp, Artificial Sequence
  Description of Artificial Sequence: Synthetic polynucleotide
atgggcatcctgccaagcccaggaatgcccgccctgctgtctctggtgagcctgctgtccgtgctgctgatgggatgcgtggcagagacaggcacacagtgcgtgaacctgaccacaaggacccagctgccccctgcctataccaattctttcacacggggcgtgtactatcccgacaaggtgtttagaagctccgtgctgcactccacacaggatctgtttctgcctttcttttctaacgtgacctggttccacgccatccacgtgtccggcaccaatggcacaaagcggttcgacaatcccgtgctgccttttaacgatggcgtgtacttcgccagcaccgagaagtccaacatcatcagaggctggatctttggcaccacactggactctaagacacagagcctgctgatcgtgaacaatgccaccaacgtggtgatcaaggtgtgcgagttccagttttgtaatgatccattcctgggcgtgtactatcacaagaacaataagtcctggatggagtctgagtttcgcgtgtattctagcgccaacaattgcacatttgagtacgtgagccagcccttcctgatggacctggagggcaagcagggcaatttcaagaacctgagggagttcgtgtttaagaatatcgatggctacttcaagatctacagcaagcacaccccaatcaacctggtgcgcgacctgccacagggattctccgccctggagccactggtggatctgcccatcggcatcaacatcacccggtttcagacactgctggccctgcacagatcctacctgacaccaggcgactcctctagcggatggaccgcaggagctgccgcctactatgtgggctatctgcagccccggaccttcctgctgaagtacaacgagaatggcaccatcacagacgcagtggattgcgccctggaccccctgtctgagacaaagtgtacactgaagagctttaccgtggagaagggcatctatcagacaagcaatttcagggtgcagcctaccgagtccatcgtgcgctttcccaatatcacaaacctgtgcccttttggcgaggtgttcaacgccaccagattcgccagcgtgtacgcctggaatcggaagagaatctccaactgcgtggccgactattctgtgctgtacaactccgcctctttcagcacctttaagtgctatggcgtgtctcccacaaagctgaatgatctgtgctttaccaacgtgtacgccgatagcttcgtgatcaggggagacgaagtgagacagatcgcaccaggacagacaggaaagatcgcagactacaattataagctgcctgacgatttcaccggctgcgtgatcgcctggaactccaacaatctggattctaaagtgggcggcaactacaattatctgtacaggctgtttcgcaagtccaatctgaagccattcgagcgggacatctccacagagatctaccaggccggctctaccccctgcaatggcgtggagggctttaactgttatttccctctgcagtcttacggcttccagccaacaaacggcgtgggctatcagccctacagagtggtggtgctgtcctttgagctgctgcacgcaccagcaacagtgtgcggcccaaagaagtctaccaatctggtgaagaacaagtgcgtgaacttcaacttcaacggacgaaccggcacaggcgtgctgaccgagagcaataagaagttcctgccttttcagcagttcggcagggacatcgcagataccacagacgccgtgcgcgaccctcagaccctggagatcctggacatcacaccatgcagcttcggcggcgtgtccgtgatcacaccaggcaccaatacatccaaccaggtggccgtgctgtatcaggacgtgaattgtaccgaggtgcccgtggcaatccacgcagatcagctgacccctacatggcgggtgtactctaccggcagcaacgtgttccagacaagagccggatgcctgatcggagcagagcacgtgaacaatagctatgagtgcgacatccctatcggcgccggcatctgtgccagctaccagacccagacaaactccccatctggagcaggctccgtggccagccagtccatcatcgcctataccatgagcctgggcgccgagaacagcgtggcctactccaacaattctatcgccatccctaccaacttcacaatcagcgtgaccacagagatcctgccagtgtctatgaccaagacaagcgtggactgcacaatgtatatctgtggcgatagcaccgagtgctccaacctgctgctgcagtacggctccttttgtacccagctgaatagagccctgacaggcatcgccgtggagcaggataagaacacacaggaggtgttcgcccaggtgaagcagatctacaagaccccacccatcaaggactttggcggcttcaacttcagccagatcctgcctgatccaagcaagccctccaagaggtcttttatcgaggacctgctgttcaacaaggtgaccctggccgatgccggcttcatcaagcagtatggagattgcctgggagacatcgcagcccgcgacctgatctgtgcccagaagtttaatggcctgaccgtgctgcctccactgctgacagatgagatgatcgcccagtacacatctgccctgctggccggcaccatcacaagcggatggaccttcggcgcaggagccgccctgcagatcccttttgccatgcagatggcctataggttcaacggcatcggcgtgacccagaatgtgctgtacgagaaccagaagctgatcgccaatcagtttaacagcgccatcggcaagatccaggactctctgtcctctacagccagcgccctgggcaagctgcaggatgtggtgaatcagaacgcccaggccctgaataccctggtgaagcagctgagctccaacttcggcgccatctctagcgtgctgaatgacatcctgagccggctggacccccctgaggcagaggtgcagatcgacaggctgatcacaggccgcctgcagagcctgcagacctacgtgacacagcagctgatcagggcagcagagatcagagcctccgccaatctggccgccaccaagatgagcgagtgcgtgctgggacagtccaagagggtggacttttgtggcaagggctatcacctgatgtctttcccacagagcgcccctcacggcgtggtgtttctgcacgtgacctacgtgccagcccaggagaagaacttcaccacagcaccagccatctgccacgatggaaaggcacactttcctagggagggcgtgttcgtgtctaacggcacccactggtttgtgacacagcgcaatttctacgagccacagatcatcaccacagacaatacattcgtgagcggcaactgtgatgtggtgatcggcatcgtgaacaataccgtgtatgatccactgcagcccgagctggactcctttaaggaggagctggataagtacttcaagaatcacacctctcccgacgtggatctgggcgacatctccggcatcaatgcctctgtggtgaacatccagaaggagatcgaccggctgaacgaggtggccaagaatctgaacgagagcctgatcgatctgcaggagctgggcaagtatgagcagtacatcaagggctctggcagagagaacctgtatttccagggaggaggaggcagcggatacatccctgaggcaccaagggacggacaggcctacgtgcgcaaggatggcgagtgggtgctgctgtccacctttctgggccatcatcaccaccaccaccaccactga

SEQ ID NO: 1406 - DNA, 3846 bp, Artificial Sequence
  Description of Artificial Sequence: Synthetic polynucleotide
atgggcatcctgccaagcccaggaatgcccgccctgctgtctctggtgagcctgctgtccgtgctgctgatgggatgcgtggcagagacaggcacacagtgcgtgaacctgaccacaaggacccagctgccccctgcctataccaattctttcacacggggcgtgtactatcccgacaaggtgtttagaagcgatgtgctgcactccacacaggatctgtttctgcctttcttttctaacgtgacctggttccacgccatccacgtgtccggcaccaatggcacaaaggacttcgacaatcccgtgctgccttttaacgatggcgtgtacttcgccagcaccgagaagtccaacatcatcagaggctggatctttggcaccacactggactctaagacacagagcctgctgatcgtgaacaatgccaccaacgtggtgatcaaggtgtgcgagttccagttttgtgaaaatccattcctgggcgtgtactatcacaagaacaataagtcctggatggagaaagagtttcgcgtgtattctagcgccaacaattgcacatttgagtacgtgagccagcccttcctgatggacctgggaggcaagcagggcaatttcaagaacctgagggagttcgtgtttaagaatatcgatggctacttcaagatctacagcaagcacaccccaatcaacctggtgcgcgacctgccacagggattctccgccctggagccactgatggatctgcccatcggcatcaacatcacccggtttcagacactgctggccctgcacagatcctacctgacaccaggcgactcctctagcggatggaccgcaggagctgccgcctactatgtgggctatctgcagccccggaccttcctgctgaagtacaacgagaatggcaccatcacagacgcagtggattgcgccctggaccccctgtctgagacaaagtgtacactgaagagctttaccgtggagaagggcatctatcagacaagcaatttcagggtgcagcctaccgagtccatcgtgcgctttcccaatatcacaaacctgtgcccttttggcgaggtgttcaacgccaccagattcgccagcgtgtacgcctggaatcggaagagaatctccaactgcgtggccgactattctgtgctgtacaactccgcctctttcagcacctttaagtgctatggcgtgtctcccacaaagctgaatgatctgtgctttaccaacgtgtacgccgatagcttcgtgatcaggggagacgaagtgagacagatcgcaccaggacagacaggaaagatcgcagactacaattataagctgcctgacgatttcaccggctgcgtgatcgcctggaactccaacaatctggattctaaagtgggcggcaactacaattatctgtacaggctgtttcgcaagtccaatctgaagccattcgagcgggacatctccacagagatctaccaggccggctctaccccctgcaatggcgtggagggctttaactgttatttccctctgcagtcttacggcttccagccaacaaacggcgtgggctatcagccctacagagtggtggtgctgtcctttgagctgctgcacgcaccagcaacagtgtgcggcccaaagaagtctaccaatctggtgaagaacaagtgcgtgaacttcaacttcaacggactgaccggcacaggcgtgctgaccgagagcaataagaagttcctgccttttcagcagttcggcagggacatcgcagataacacagacgccgtgcgcgaccctcagaccctggagatcctggacatcacaccatgcagcttcggcggcgtgtccgtgatcacaccaggcaccaatacatccaaccaggtggccgtgctgtatcaggacgtgaattgtaccgaggtgcccaatgcaatccacgcagatcagctgacccctacatggcgggtgtactctaccggcagcaacgtgttccagacaagagccggatgcctgatcggagcagagcacgtgaacaatagctatgagtgcgacatccctatcggcgccggcatctgtgccagctaccagacccagacaaactccccatctggagcaggctccgtggccagccagtccatcatcgcctataccatgagcctgggcgccgagaacagcgtggcctactccaacaattctatcgccatccctaccaacttcacaatcagcgtgaccacagagatcctgccagtgtctatgaccaagacaagcgtggactgcacaatgtatatctgtggcgatagcaccgagtgctccaacctgctgctgcagtacggctccttttgtacccagctgaatagagccctgcaaggcatcgcccaagagcaggataagaacacacaggaggtgttcgcccaggtgaagcagatctacaagaccccacccatcaaggactttggcggcttcaacttcagccagatcctgcctgatccaagcaagccctccaagaggtcttttatcgaggacctgctgttcaacaaggtgaccctggccgatgccggcttcatcaagcagtatggagattgcctgggagacatcgcagcccgcgacctgatctgtgcccagaagtttaatggcctgaccgtgctgcctccactgctgacagatgagatgatcgcccagtacacatctgccctgctggccggcaccatcacaagcggatggaccttcggcgcaggagccgccctgcagatcccttttgccatgcagatggcctataggttcaacggcatcggcgtgacccagaatgtgctgtacgagaaccagaagctgatcgccaatcagtttaaccaagccatcggcaagatccaggactctctgtcctctacagccagcgccctgggcaagctgcaggatgtggtgaatcagaacgcccaggccctgaataccctggtgaagcagctgagctccaacttcggcgccatctctagcgtgctgaatgacatcctgagccggctggacccccctgaggcagaggtgcagatcgacaggctgatcacaggccgcctgcagagcctgcagacctacgtgacacagcagctgatcagggcagcagagatcagagcctccgccaatctggccgccaccaagatgagcgagtgcgtgctgggacagtccaagagggtggacttttgtggcaagggctatcacctgatgtctttcccacagagcgcccctcacggcgtggtgtttctgcacgtgacctacgtgccagcccaggagaagaacttcaccacagcaccagccatctgccacgatggaaaggcattttttcctagggagggcgtgttcgtgtctaacggcacccaatggtttgtgacacagcgcaatttctacgagccacagatcatcaccacagacaatacattcgtgagcggcaactgtgatgtggtgatcggcatcgtgaacaataccgtgtatgatccactgcagcccgagctggactcctttaaggaggagctggataagtacttcaagaatcacacctctcccgacgtggatctgggcgacatctccggcatcaatgcctctgtggtgaacatccagaaggagatcgaccggctgaacgaggtggccaagaatctgaacgagagcctgatcgatctgcaggagctgggcaagtatgagcagtacatcaagggctctggcagagagaacctgtatttccagggaggaggaggcagcggatacatccctgaggcaccaagggacggacaggcctacgtgcgcaaggatggcgagtgggtgctgctgtccacctttctgggccatcatcaccaccaccaccaccactga

SEQ ID NO: 1407 - DNA, 3846 bp, Artificial Sequence
  Description of Artificial Sequence: Synthetic polynucleotide
atgggcatcctgccaagcccaggaatgcccgccctgctgtctctggtgagcctgctgtccgtgctgctgatgggatgcgtggcagagacaggcacacagtgcgtgaacctgaccacaaggacccagctgccccctgcctataccaattctttcacacggggcgtgtactatcccgacaaggtgtttagaagctccgtgctgcactccacacaggatctgtttctgcctttcttttctaacgtgacctggttccacgccatccacgtgtccggcaccaatggcacaaagcggttcgacaatcccgtgctgccttttaacgatggcgtgtacttcgccagcaccgagaagtccaacatcatcagaggctggatctttggcaccacactggactctaagacacagagcctgctgatcgtgaacaatgccaccaacgtggtgatcaaggtgtgcgagttccagttttgtaatgatccattcctgggcgtgtactatcacaagaacaataagtcctggatggagtctgagtttcgcgtgtattctagcgccaacaattgcacatttgagtacgtgagccagcccttcctgatggacctggagggcaagcagggcaatttcaagaacctgagggagttcgtgtttaagaatatcgatggctacttcaagatctacagcaagcacaccccaatcaacctggtgcgcgacctgccacagggattctccgccctggagccactggtggatctgcccatcggcatcaacatcacccggtttcagacactgctggccctgcacagatcctacctgacaccaggcgactcctctagcggatggaccgcaggagctgccgcctactatgtgggctatctgcagccccggaccttcctgctgaagtacaacgagaatggcaccatcacagacgcagtggattgcgccctggaccccctgtctgagacaaagtgtacactgaagagctttaccgtggagaagggcatctatcagacaagcaatttcagggtgcagcctaccgagtccatcgtgcgctttcccaatatcacaaacctgtgcccttttggcgaggtgttcaacgccaccagattcgccagcgtgtacgcctggaatcggaagagaatctccaactgcgtggccgactattctgtgctgtacaactccgcctctttcagcacctttaagtgctatggcgtgtctcccacaaagctgaatgatctgtgctttaccaacgtgtacgccgatagcttcgtgatcaggggagacgaagtgagacagatcgcaccaggacagacaggaaagatcgcagactacaattataagctgcctgacgatttcaccggctgcgtgatcgcctggaactccaacaatctggattctaaagtgggcggcaactacaattatctgtacaggctgtttcgcaagtccaatctgaagccattcgagcgggacatctccacagagatctaccaggccggctctaccccctgcaatggcgtggagggctttaactgttatttccctctgcagtcttacggcttccagccaacaaacggcgtgggctatcagccctacagagtggtggtgctgtcctttgagctgctgcacgcaccagcaacagtgtgcggcccaaagaagtctaccaatctggtgaagaacaagtgcgtgaacttcaacttcaacggactgaccggcacaggcgtgctgaccgagagcaataagaagttcctgccttttcagcagttcggcagggacatcgcagatagtacagacgccgtgcgcgaccctcagaccctggagatcctggacatcacaccatgcagcttcggcggcgtgtccgtgatcacaccaggcaccaatacatccaaccaggtggccgtgctgtatcaggacgtgaattgtaccgaggtgcccgtggcaatccacgcagatcagctgacccctacatggcgggtgtactctaccggcagcaacgtgttccagacaagagccggatgcctgatcggagcagagcacgtgaacaatagctatgagtgcgacatccctatcggcgccggcatctgtgccagctaccagacccagacaaactccccatctggagcaggctccgtggccagccagtccatcatcgcctataccatgagcctgggcgccgagaacagcgtggcctactccaacaattctatcgccatccctaccaacttcacaatcagcgtgaccacagagatcctgccagtgtctatgaccaagacaagcgtggactgcacaatgtatatctgtggcgatagcaccgagtgctccaacctgctgctgcagtacggctccttttgtacccagctgaatagagccctgacaggcatcgccgtggagcaggataagaacacacaggaggtgttcgcccaggtgaagcagatctacaagaccccacccatcaaggactttggcggcttcaacttcagccagatcctgcctgatccaagcaagccctccaagaggtcttttatcgaggacctgctgttcaacaaggtgaccctggccgatgccggcttcatcaagcagtatggagattgcctgggagacatcgcagcccgcgacctgatctgtgcccagaagtttaatggcctgaccgtgctgcctccactgctgacagatgagatgatcgcccagtacacatctgccctgctggccggcaccatcacaagcggatggaccttcggcgcaggagccgccctgcagatcccttttgccatgcagatggcctataggttcaacggcatcggcgtgacccagaatgtgctgtacgagaaccagaagctgatcgccaatcagtttaacagcgccatcggcaagatccaggactctctgtcctctacagccagcgccctgggcaagctgcaggatgtggtgaatcagaacgcccaggccctgaataccctggtgaagcagctgagctccaacttcggcgccatctctagcgtgctgaatgacatcctgagccggctggacccccctgaggcagaggtgcagatcgacaggctgatcacaggccgcctgcagagcctgcagacctacgtgacacagcagctgatcagggcagcagagatcagagcctccgccaatctggccgccaccaagatgagcgagtgcgtgctgggacagtccaagagggtggacttttgtggcaagggctatcacctgatgtctttcccacagagcgcccctcacggcgtggtgtttctgcacgtgacctacgtgccagcccaggagaagaacttcaccacagcaccagccatctgccacgatggaaaggcacactttcctagggagggcgtgttcgtgtctaacggcacccactggtttgtgacacagcgcaatttctacgagccacagatcatcaccacagacaatacattcgtgagcggcaactgtgatgtggtgatcggcatcgtgaacaataccgtgtatgatccactgcagcccgagctggactcctttaaggaggagctggataagtacttcaagaatcacacctctcccgacgtggatctgggcgacatctccggcatcaatgcctctgtggtgaacatccagaaggagatcgaccggctgaacgaggtggccaagaatctgaacgagagcctgatcgatctgcaggagctgggcaagtatgagcagtacatcaagggctctggcagagagaacctgtatttccagggaggaggaggcagcggatacatccctgaggcaccaagggacggacaggcctacgtgcgcaaggatggcgagtgggtgctgctgtccacctttctgggccatcatcaccaccaccaccaccactga

SEQ ID NO: 1408 - DNA, 3846 bp, Artificial Sequence
  Description of Artificial Sequence: Synthetic polynucleotide
atgggcatcctgccaagcccaggaatgcccgccctgctgtctctggtgagcctgctgtccgtgctgctgatgggatgcgtggcagagacaggcacacagtgcgtgaacctgaccacaaggacccagctgccccctgcctataccaattctttcacacggggcgtgtactatcccgacaaggtgtttagaagctccgtgctgcacgatacacaggatctgtttctgcctttcttttctaacgtgacctggttccacgccatccacgtgtccggcaccaatggcacaaagcggttcgacaatcccgtgctgccttttaacgatggcgtgtacttcgccagcaccgagaagtccaacatcatcagaggctggatctttggcaccacactggactctaagacacagagcctgctgatcgtgaacaatgccaccaacgtggtgatcaaggtgtgcgagttccagttttgtaatgatccattcctgggcgtgtactatcacaagaacaataagtcctggatggagtctgagtttcgcgtgtattctagcgccaacaattgcacatttgagtacgtgagccagcccttcctgatggacctggagggcaagcagggcaatttcaagaacctgagggagttcgtgtttaagaatatcgatggctacttcaagatctacagcaagcacaccccaatcaacctggtgcgcgacctgccacagggattctccgccctggagccactggtggatctgcccatcggcatcaacatcacccggtttcagacactgctggccctgcacagatcctacctgacaccaggcgactcctctagcggatggaccgcaggagctgccgcctactatgtgggctatctgcagccccggaccttcctgctgaagtacaacgagaatggcaccatcacagacgcagtggattgcgccctggaccccctgtctgagacaaagtgtacactgaagagctttaccgtggagaagggcatctatcagacaagcaatttcagggtgcagcctaccgagtccatcgtgcgctttcccaatatcacaaacctgtgcccttttggcgaggtgttcaacgccaccagattcgccagcgtgtacgcctggaatcggaagagaatctccaactgcgtggccgactattctgtgctgtacaactccgcctctttcagcacctttaagtgctatggcgtgtctcccacaaagctgaatgatctgtgctttaccaacgtgtacgccgatagcttcgtgatcaggggagacgaagtgagacagatcgcaccaggacagacaggaaagatcgcagactacaattataagctgcctgacgatttcaccggctgcgtgatcgcctggaactccaacaatctggattctaaagtgggcggcaactacaattatctgtacaggctgtttcgcaagtccaatctgaagccattcgagcgggacatctccacagagatctaccaggccggctctaccccctgcaatggcgtggagggctttaactgttatttccctctgcagtcttacggcttccagccaacaaacggcgtgggctatcagccctacagagtggtggtgctgtcctttgagctgctgcacgcaccagcaacagtgtgcggcccaaagaagtctaccaatctggtgaagaacaagtgcgtgaacttcaacttcaacggactgaccggcacaggcgtgctgaccgagagcaataagaagttcctgccttttcagcagttcggcagggacatcgcagataccacagacgccgtgcgcgaccctcagaccctggagatcctggacatcacaccatgcagcttcggcggcgtgtccgtgatcacaccaggcaccaatacatccaaccaggtggccgtgctgtatcaggacgtgaattgtaccgaggtgcccgtggcaatccacgcagatcagctgacccctacatggcgggtgtactctaccggcagcaacgtgttccagacaagagccggatgcctgatcggagcagagcacgtgaacaatagctatgagtgcgacatccctatcggcgccggcatctgtgccagctaccagacccagacaaactccccatctggagcaggctccgtggccagccagtccatcatcgcctataccatgagcctgggcgccgagaacagcgtggcctactccaacaattctatcgccatccctaccaacttcacaatcagcgtgaccacagagatcctgccagtgtctatgaccaagacaagcgtggactgcacaatgtatatctgtggcgatagcaccgagtgctccaacctgctgctgcagtacggctccttttgtacccagctgaatagagccctgacaggcatcgccgtggagcaggataagaacacacaggaggtgttcgcccaggtgaagcagatctacaagaccccacccatcaaggactttggcggcttcaacttcagccagatcctgcctgatccaagcaagccctccaagaggtcttttatcgaggacctgctgttcaacaaggtgaccctggccgatgccggcttcatcaagcagtatggagattgcctgggagacatcgcagcccgcgacctgatctgtgcccagaagtttaatggcctgaccgtgctgcctccactgctgacagatgagatgatcgcccagtacacatctgccctgctggccggcaccatcacaagcggatggaccttcggcgcaggagccgccctgcagatcccttttgccatgcagatggcctataggttcaacggcatcggcgtgacccagaatgtgctgtacgagaaccagaagctgatcgccaatcagtttaacagcgccatcggcaagatccaggactctctgtcctctacagccagcgccctgggcaagctgcaggatgtggtgaatcagaacgcccaggccctgaataccctggtgaagcagctgagctccaacttcggcgccatctctagcgtgctgaatgacatcctgagccggctggacccccctgaggcagaggtgcagatcgacaggctgatcacaggccgcctgcagagcctgcagacctacgtgacacagcagctgatcagggcagcagagatcagagcctccgccaatctggccgccaccaagatgagcgagtgcgtgctgggacagtccaagagggtggacttttgtggcaagggctatcacctgatgtctttcccacagagcgcccctcacggcgtggtgtttctgcacgtgacctacgtgccagcccaggagaagaacttcaccacagcaccagccatctgccacgatggaaaggcacactttcctagggagggcgtgttcgtgtctaacggcacccactggtttgtgacacagcgcaatttctacgagccacagatcatcaccacagacaatacattcgtgagcggcaactgtgatgtggtgatcggcatcgtgaacaataccgtgtatgatccactgcagcccgagctggactcctttaaggaggagctggataagtacttcaagaatcacacctctcccgacgtggatctgggcgacatctccggcatcaatgcctctgtggtgaacatccagaaggagatcgaccggctgaacgaggtggccaagaatctgaacgagagcctgatcgatctgcaggagctgggcaagtatgagcagtacatcaagggctctggcagagagaacctgtatttccagggaggaggaggcagcggatacatccctgaggcaccaagggacggacaggcctacgtgcgcaaggatggcgagtgggtgctgctgtccacctttctgggccatcatcaccaccaccaccaccactga

SEQ ID NO: 1409 - DNA, 3846 bp, Artificial Sequence
  Description of Artificial Sequence: Synthetic polynucleotide
atgggcatcctgccaagcccaggaatgcccgccctgctgtctctggtgagcctgctgtccgtgctgctgatgggatgcgtggcagagacaggcacacagtgcgtgaacctgaccacaaggacccagctgccccctgcctataccaattctttcacacggggcgtgtactatcccgacaaggtgtttagaagctccgtgctgcactccacacaggatctgtttctgcctttcttttctaacgtgacctggttccacgccatccacgtgtccggcaccaatggcacaaagcggttcgacaatcccgtgctgccttttaacgatggcgtgtacttcgccagcaccgagaagtccaacatcatcagaggctggatctttggcaccacactggactctaagacacagagcctgctgatcgtgaacaatgccaccaacgtggtgatcaaggtgtgcgagttccagttttgtaatgatccattcctgggcgtgtactatcacaagaacaataagtcctggatggagtctgagtttcgcgtgtattctagcgccaacaattgcacatttgagtacgtgagccagcccttcctgatggacctggagggcaagcagggcaatttcaagaacctgagggagttcgtgtttaagaatatcgatggctacttcaagatctacagcaagcacaccccaatcaacctggtgcgcgacctgccacagggattctccgccctggagccactggtggatctgcccatcggcatcaacatcacccggtttcagacactgctggccctgcacagatcctacctgacaccaggcgactcctctagcggatggaccgcaggagctgccgcctactatgtgggctatctgcagccccggaccttcctgctgaagtacaacgagaatggcaccatcacagacgcagtggattgcgccctggaccccctgtctgagacaaagtgtacactgaagagctttaccgtggagaagggcatctatcagacaagcaatttcagggtgcagcctaccgagtccatcgtgcgctttcccaatatcacaaacctgtgcccttttggcgaggtgttcaacgccaccagattcgccagcgtgtacgcctggaatcggaagagaatctccaactgcgtggccgactattctgtgctgtacaactccgcctctttcagcacctttaagtgctatggcgtgtctcccacaaagctgaatgatctgtgctttaccaacgtgtacgccgatagcttcgtgatcaggggagacgaagtgagacagatcgcaccaggacagacaggaaagatcgcagactacaattataagctgcctgacgatttcaccggctgcgtgatcgcctggaactccaacaatctggattctaaagtgggcggcaactacaattatctgtacaggctgtttcgcaagtccaatctgaagccattcgagcgggacatctccacagagatctaccaggccggctctaccccctgcaatggcgtggagggctttaactgttatttccctctgcagtcttacggcttccagccaacaaacggcgtgggctatcagccctacagagtggtggtgctgtcctttgagctgctgcacgcaccagcaacagtgtgcggcccaaagaagtctaccaatctggtgaagaacaagtgcgtgaacttcaacttcaacggactgaccggcacaggcgtgctgaccgagagcaataagaagttcctgccttttcagcagttcggcagggacatcgcagataccacagacgccgtgcgcgaccctcagaccctggagatcctggacatcacaccatgcagcttcggcggcgtgtccgtgatcacaccaggcaccaatacatccaaccaggtggccgtgctgtatcaggacgtgaattgtaccgaggtgcccgtggcaatccacgcagatcagctgacccctacatggcgggtgtactctaccggcagcaacgtgttccagacaagagccggatgcctgatcggagcagagcacgtgaacaatagctatgagtgcgacatccctatcggcgccggcatctgtgccagctaccagacccagacaaactccccatctggagcaggctccgtggccagccagtccatcatcgcctataccatgagcctgggcgccgagaacagcgtggcctactccaacaattctatcgccatccctaccaacttcacaatcagcgtgaccacagagatcctgccagtgtctatgaccaagacaagcgtggactgcacaatgtatatctgtggcgatagcaccgagtgctccaacctgctgctgcagtacggctccttttgtacccagctgaatagagccctgacaggcatcgccgtggagcaggataagaacacacaggaggtgttcgcccaggtgaagcagatctacaagaccccacccatcaaggactttggcggcttcaacttcagccagatcctgcctgatccaagcaagccctccaagaggtcttttatcgaggacctgctgttcaacaaggtgaccctggccgatgccggcttcatcaagcagtatggagattgcctgggagacatcgcagcccgcgacctgatctgtgcccagaagtttaatggcctgaccgtgctgcctccactgctgacagatgagatgatcgcccagtacacatctgccctgctggccggcaccatcacaagcggatggaccttcggcgcaggagccgccctgcagatcccttttgccatgcagatggcctataggttcaacggcatcggcgtgacccagaatgtgctgtacgagaaccagaagctgatcgccaatcagtttaacagcgccatcggcaagatccaggactctctgtcctctacagccagcgccctgggcaagctgcaggatgtggtgaatcagaacgcccaggccctgaataccctggtgaagcagctgagctccaacttcggcgccatctctagcgtgctgaatgacatcctgagccggctggacccccctgaggcagaggtgcagatcgacaggctgatcacaggccgcctgcagagcctgcagacctacgtgacacagcagctgatcagggcagcagagatcagagcctccgccaatctggccgccaccaagatgagcgagtgcgtgctgggacagtccaagagggtggacttttgtggcaagggctatcacctgatgtctttcccacagagcgcccctcacggcgtggtgtttctgcacgtgacctacgtgccagcccaggagaagaacttcaccacagcaccagccatctgccacgatggaaaggcacactttcctagggagggcgtgttcgtgtctaacggcacctattggtttgtgacacagcgcaatttctacgagccacagatcatcaccacagacaatacattcgtgagcggcaactgtgatgtggtgatcggcatcgtgaacaataccgtgtatgatccactgcagcccgagctggactcctttaaggaggagctggataagtacttcaagaatcacacctctcccgacgtggatctgggcgacatctccggcatcaatgcctctgtggtgaacatccagaaggagatcgaccggctgaacgaggtggccaagaatctgaacgagagcctgatcgatctgcaggagctgggcaagtatgagcagtacatcaagggctctggcagagagaacctgtatttccagggaggaggaggcagcggatacatccctgaggcaccaagggacggacaggcctacgtgcgcaaggatggcgagtgggtgctgctgtccacctttctgggccatcatcaccaccaccaccaccactga

SEQ ID NO: 1410 - DNA, 3846 bp, Artificial Sequence
  Description of Artificial Sequence: Synthetic polynucleotide
atgggcatcctgccaagcccaggaatgcccgccctgctgtctctggtgagcctgctgtccgtgctgctgatgggatgcgtggcagagacaggcacacagtgcgtgaacctgaccacaaggacccagctgccccctgcctataccaattctttcacacggggcgtgtactatcccgacaaggtgtttagaagcgatgtgctgcactccacacaggatctgtttctgcctttcttttctaacgtgacctggttccacgccatccacgtgtccggcaccaatggcacaaagcggttcgacaatcccgtgctgccttttaacgatggcgtgtacttcgccagcaccgagaagtccaacatcatcagaggctggatctttggcaccacactggactctaagacacagagcctgctgatcgtgaacaatgccaccaacgtggtgatcaaggtgtgcgagttccagttttgtgacaatccattcctgggcgtgtactatcacaagaacaataagtcctggatggagaaagagtttcgcgtgtattctagcgccaacaattgcacatttgagtacgtgagccagcccttcctgatggacctggggggcaagcagggcaatttcaagtggctgagggagttcgtgtttaagaatatcgatggctacttcaagatctacagcaagcacaccccaatcaacctggtgcgcgacctgccacagggattctccgccctggagccactgatggatctgcccatcggcatcaacatcacccggtttcagacactgctggccctgcacagatcctacctgacaccaggcgactcctctagcggatggaccgcaggagctgccgcctactatgtgggctatctgcagccccggaccttcctgctgaagtacaacgagaatggcaccatcacagacgcagtggattgcgcctatgaccccctgtctgagacaaagtgtacactgaagagctttaccgtggagaagggcatctatcagacaagcaatttcagggtgcagcctaccgagtccatcgtgcgctttcccaatatcacaaacctgtgcccttttggcgaggtgttcaacgccaccagattcgccagcgtgtacgcctggaatcggaagagaatctccaactgcgtggccgactattctgtgctgtacaactccgcctctttcagcacctttaagtgctatggcgtgtctcccacaaagctgaatgatctgtgctttaccaacgtgtacgccgatagcttcgtgatcaggggagacgaagtgagacagatcgcaccaggacagacaggaaagatcgcagactacaattataagctgcctgacgatttcaccggctgcgtgatcgcctggaactccaacaatctggattctaaagtgggcggcaactacaattatctgtacaggctgtttcgcaagtccaatctgaagccattcgagcgggacatctccacagagatctaccaggccggctctaccccctgcaatggcgtggagggctttaactgttatttccctctgcagtcttacggcttccagccaacaaacggcgtgggctatcagccctacagagtggtggtgctgtcctttgagctgctgcacgcaccagcaacagtgtgcggcccaaagaagtctaccaatctggtgaagaacaagtgcgtgaacttcaacttcaacggactgaccggcacaggcgtgctgaccgagagcaataagaagttcctgccttttcagcagttcggcagggacatcgcagataatacagacgccgtgcgcgaccctcagaccctggagatcctggacatcacaccatgcagcttcggcggcgtgtccgtgatcacaccaggcaccaatacatccaaccaggtggccgtgctgtatcaggacgtgaattgtaccgaggtgcccaatgcaatccacgcagatcagctgacccctacatggcgggtgtactctaccggcagcaacgtgttccagacaagagccggatgcctgatcggagcagagcacgtgaacaatagctatgagtgcgacatccctatcggcgccggcatctgtgccagctaccagacccagacaaactccccatctggagcaggctccgtggccagccagtccatcatcgcctataccatgagcctgggcgccgagaacagcgtggcctactccaacaattctatcgccatccctaccaacttcacaatcagcgtgaccacagagatcctgccagtgtctatgaccaagacaagcgtggactgcacaatgtatatctgtggcgatagcaccgagtgctccaacctgctgctgcagtacggctccttttgtacccagctgaatagagccctgcaaggcatcgcccaagagcaggataagaacacacaggaggtgttcgcccaggtgaagcagatctacaagaccccacccatcaaggactttggcggcttcaacttcagccagatcctgcctgatccaagcaagccctccaagaggtcttttatcgaggacctgctgttcaacaaggtgaccctggccgatgccggcttcatcaagcagtatggagattgcctgggagacatcgcagcccgcgacctgatctgtgcccagaagtttaatggcctgaccgtgctgcctccactgctgacagatgagatgatcgcccagtacacatctgccctgctggccggcaccatcacaagcggatggaccttcggcgcaggagccgccctgcagatcccttttgccatgcagatggcctataggttcaacggcatcggcgtgacccagaatgtgctgtacgagaaccagaagctgatcgccaatcagtttaacaaagccatcggcaagatccaggactctctgtcctctacagccagcgccctgggcaagctgcaggatgtggtgaatcagaacgcccaggccctgaataccctggtgaagcagctgagctccaacttcggcgccatctctagcgtgctgaatgacatcctgagccggctggacccccctgaggcagaggtgcagatcgacaggctgatcacaggccgcctgcagagcctgcagacctacgtgacacagcagctgatcagggcagcagagatcagagcctccgccaatctggccgccaccaagatgagcgagtgcgtgctgggacagtccaagagggtggacttttgtggcaagggctatcacctgatgtctttcccacagagcgcccctcacggcgtggtgtttctgcacgtgacctacgtgccagcccaggagaagaacttcaccacagcaccagccatctgccacgatggaaaggcattttttcctagggagggcgtgttcgtgtctaacggcacccaatggtttgtgacacagcgcaatttctacgagccacagatcatcaccacagacaatacattcgtgagcggcaactgtgatgtggtgatcggcatcgtgaacaataccgtgtatgatccactgcagcccgagctggactcctttaaggaggagctggataagtacttcaagaatcacacctctcccgacgtggatctgggcgacatctccggcatcaatgcctctgtggtgaacatccagaaggagatcgaccggctgaacgaggtggccaagaatctgaacgagagcctgatcgatctgcaggagctgggcaagtatgagcagtacatcaagggctctggcagagagaacctgtatttccagggaggaggaggcagcggatacatccctgaggcaccaagggacggacaggcctacgtgcgcaaggatggcgagtgggtgctgctgtccacctttctgggccatcatcaccaccaccaccaccactga

SEQ ID NO: 1411 - DNA, 3846 bp, Artificial Sequence
  Description of Artificial Sequence: Synthetic polynucleotide
atgggcatcctgccaagcccaggaatgcccgccctgctgtctctggtgagcctgctgtccgtgctgctgatgggatgcgtggcagagacaggcacacagtgcgtgaacctgaccacaaggacccagctgccccctgcctataccaattctttcacacggggcgtgtactatcccgacaaggtgtttagaagctccgtgctgcactccacacaggatctgtttctgcctttcttttctaacgtgacctggttccacgccatccacgtgtccggcaccaatggcacaaagcggttcgacaatcccgtgctgccttttaacgatggcgtgtacttcgccagcaccgagaagtccaacatcatcagaggctggatctttggcaccacactggactctaagacacagagcctgctgatcgtgaacaatgccaccaacgtggtgatcaaggtgtgcgagttccagttttgtaatgatccattcctgggcgtgtactatcacaagaacaataagtcctggatggagtctgagtttcgcgtgtattctagcgccaacaattgcacatttgagtacgtgagccagcccttcctgatggacctggagggcaagcagggcaatttcaagaacctgagggagttcgtgtttaagaatatcgatggctacttcaagatctacagcaagcacaccccaatcaacctggtgcgcgacctgccacagggattctccgccctggagccactggtggatctgcccatcggcatcaacatcacccggtttcagacactgctggccctgcacagatcctacctgacaccaggcgactcctctagcggatggaccgcaggagctgccgcctactatgtgggctatctgcagccccggaccttcctgctgaagtacaacgagaatggcaccatcacagacgcagtggattgcgccctggaccccctgtctgagacaaagtgtacactgaagagctttaccgtggagaagggcatctatcagacaagcaatttcagggtgcagcctaccgagtccatcgtgcgctttcccaatatcacaaacctgtgcccttttggcgaggtgttcaacgccaccagattcgccagcgtgtacgcctggaatcggaagagaatctccaactgcgtggccgactattctgtgctgtacaactccgcctctttcagcacctttaagtgctatggcgtgtctcccacaaagctgaatgatctgtgctttaccaacgtgtacgccgatagcttcgtgatcaggggagacgaagtgagacagatcgcaccaggacagacaggaaagatcgcagactacaattataagctgcctgacgatttcaccggctgcgtgatcgcctggaactccaacaatctggattctaaagtgggcggcaactacaattatctgtacaggctgtttcgcaagtccaatctgaagccattcgagcgggacatctccacagagatctaccaggccggctctaccccctgcaatggcgtggagggctttaactgttatttccctctgcagtcttacggcttccagccaacaaacggcgtgggctatcagccctacagagtggtggtgctgtcctttgagctgctgcacgcaccagcaacagtgtgcggcccaaagaagtctaccaatctggtgaagaacaagtgcgtgaacttcaacttcaacggactgaccggcacaggcgtgctgaccgagagcaataagaagttcctgccttttcagcagttcggcagggacatcgcagataccacagacgccgtgcgcgaccctcagaccctggagatcctggacatcacaccatgcagcttcggcggcgtgtccgtgatcacaccaggcaccaatacatccaaccaggtggccgtgctgtatcaggacgtgaattgtaccgaggtgcccgtggcaatccacgcagatcagctgacccctacatggcgggtgtactctaccggcagcaacgtgttccagacaagagccggatgcctgatcggagcagagcacgtgaacaatagctatgagtgcgacatccctatcggcgccggcatctgtgccagctaccagacccagacaaactccccatctggagcaggctccgtggccagccagtccatcatcgcctataccatgagcctgggcgccgagaacagcgtggcctactccaacaattctatcgccatccctaccaacttcacaatcagcgtgaccacagagatcctgccagtgtctatgaccaagacaagcgtggactgcacaatgtatatctgtggcgatagcaccgagtgctccaacctgctgctgcagtacggctccttttgtacccagctgaatagagccctgacaggcatcgccgtggagcaggataagaacacacaggaggtgttcgcccaggtgaagcagatctacaagaccccacccatcaaggactttggcggcttcaacttcagccagatcctgcctgatccaagcaagccctccaagaggtcttttatcgaggacctgctgttcaacaaggtgaccctggccgatgccggcttcatcaagcagtatggagattgcctgggagacatcgcagcccgcgacctgatctgtgcccagaagtttaatggcctgaccgtgctgcctccactgctgacagatgagatgatcgcccagtacacatctgccctgctggccggcaccatcacaagcggatggaccttcggcgcaggagccgccctgcagatcccttttgccatgcagatggcctataggttcaacggcatcggcgtgacccagaatgtgctgtacgagaaccagaagctgatcgccaatcagtttaacagcgccatcggcaagatccaggactctctgtcctctacagccagcgccctgggcaagctgcaggatgtggtgaatcagaacgcccaggccctgaataccctggtgaagcagctgagctccaacttcggcgccatctctagcgtgctgaatgacatcctgagccggctggacccccctgaggcacaagtgcagatcgacaggctgatcacaggccgcctgcagagcctgcagacctacgtgacacagcagctgatcagggcagcagagatcagagcctccgccaatctggccgccaccaagatgagcgagtgcgtgctgggacagtccaagagggtggacttttgtggcaagggctatcacctgatgtctttcccacagagcgcccctcacggcgtggtgtttctgcacgtgacctacgtgccagcccaggagaagaacttcaccacagcaccagccatctgccacgatggaaaggcacactttcctagggagggcgtgttcgtgtctaacggcacccactggtttgtgacacagcgcaatttctacgagccacagatcatcaccacagacaatacattcgtgagcggcaactgtgatgtggtgatcggcatcgtgaacaataccgtgtatgatccactgcagcccgagctggactcctttaaggaggagctggataagtacttcaagaatcacacctctcccgacgtggatctgggcgacatctccggcatcaatgcctctgtggtgaacatccagaaggagatcgaccggctgaacgaggtggccaagaatctgaacgagagcctgatcgatctgcaggagctgggcaagtatgagcagtacatcaagggctctggcagagagaacctgtatttccagggaggaggaggcagcggatacatccctgaggcaccaagggacggacaggcctacgtgcgcaaggatggcgagtgggtgctgctgtccacctttctgggccatcatcaccaccaccaccaccactga

SEQ ID NO: 1412 - DNA, 3846 bp, Artificial Sequence
  Description of Artificial Sequence: Synthetic polynucleotide
atgggcatcctgccaagcccaggaatgcccgccctgctgtctctggtgagcctgctgtccgtgctgctgatgggatgcgtggcagagacaggcacacagtgcgtgaacctgaccacaaggacccagctgccccctgcctataccaattctttcacacggggcgtgtactatcccgacaaggtgtttagaagctccgtgctgcactccacacaggatctgtttctgcctttcttttctaacgtgacctggttccacgccatccacgtgtccggcaccaatggcacaaagcggttcgacaatcccgtgctgccttttaacgatggcgtgtacttcgccagcaccgagaagtccaacatcatcagaggctggatctttggcaccacactggactctaagacacagagcctgctgatcgtgaacaatgccaccaacgtggtgatcaaggtgtgcgagttccagttttgtaatgatccattctttggcgtgtactatcacaagaacaataagtcctggatggagtctgagtttcgcgtgtattctagcgccaacaattgcacatttgagtacgtgagccagcccttcctgatggacctggagggcaagcagggcaatttcaagaacctgagggagttcgtgtttaagaatatcgatggctacttcaagatctacagcaagcacaccccaatcaacctggtgcgcgacctgccacagggattctccgccctggagccactggtggatctgcccatcggcatcaacatcacccggtttcagacactgctggccctgcacagatcctacctgacaccaggcgactcctctagcggatggaccgcaggagctgccgcctactatgtgggctatctgcagccccggaccttcctgctgaagtacaacgagaatggcaccatcacagacgcagtggattgcgccctggaccccctgtctgagacaaagtgtacactgaagagctttaccgtggagaagggcatctatcagacaagcaatttcagggtgcagcctaccgagtccatcgtgcgctttcccaatatcacaaacctgtgcccttttggcgaggtgttcaacgccaccagattcgccagcgtgtacgcctggaatcggaagagaatctccaactgcgtggccgactattctgtgctgtacaactccgcctctttcagcacctttaagtgctatggcgtgtctcccacaaagctgaatgatctgtgctttaccaacgtgtacgccgatagcttcgtgatcaggggagacgaagtgagacagatcgcaccaggacagacaggaaagatcgcagactacaattataagctgcctgacgatttcaccggctgcgtgatcgcctggaactccaacaatctggattctaaagtgggcggcaactacaattatctgtacaggctgtttcgcaagtccaatctgaagccattcgagcgggacatctccacagagatctaccaggccggctctaccccctgcaatggcgtggagggctttaactgttatttccctctgcagtcttacggcttccagccaacaaacggcgtgggctatcagccctacagagtggtggtgctgtcctttgagctgctgcacgcaccagcaacagtgtgcggcccaaagaagtctaccaatctggtgaagaacaagtgcgtgaacttcaacttcaacggactgaccggcacaggcgtgctgaccgagagcaataagaagttcctgccttttcagcagttcggcagggacatcgcagataccacagacgccgtgcgcgaccctcagaccctggagatcctggacatcacaccatgcagcttcggcggcgtgtccgtgatcacaccaggcaccaatacatccaaccaggtggccgtgctgtatcaggacgtgaattgtaccgaggtgcccgtggcaatccacgcagatcagctgacccctacatggcgggtgtactctaccggcagcaacgtgttccagacaagagccggatgcctgatcggagcagagcacgtgaacaatagctatgagtgcgacatccctatcggcgccggcatctgtgccagctaccagacccagacaaactccccatctggagcaggctccgtggccagccagtccatcatcgcctataccatgagcctgggcgccgagaacagcgtggcctactccaacaattctatcgccatccctaccaacttcacaatcagcgtgaccacagagatcctgccagtgtctatgaccaagacaagcgtggactgcacaatgtatatctgtggcgatagcaccgagtgctccaacctgctgctgcagtacggctccttttgtacccagctgaatagagccctgacaggcatcgccgtggagcaggataagaacacacaggaggtgttcgcccaggtgaagcagatctacaagaccccacccatcaaggactttggcggcttcaacttcagccagatcctgcctgatccaagcaagccctccaagaggtcttttatcgaggacctgctgttcaacaaggtgaccctggccgatgccggcttcatcaagcagtatggagattgcctgggagacatcgcagcccgcgacctgatctgtgcccagaagtttaatggcctgaccgtgctgcctccactgctgacagatgagatgatcgcccagtacacatctgccctgctggccggcaccatcacaagcggatggaccttcggcgcaggagccgccctgcagatcccttttgccatgcagatggcctataggttcaacggcatcggcgtgacccagaatgtgctgtacgagaaccagaagctgatcgccaatcagtttaacagcgccatcggcaagatccaggactctctgtcctctacagccagcgccctgggcaagctgcaggatgtggtgaatcagaacgcccaggccctgaataccctggtgaagcagctgagctccaacttcggcgccatctctagcgtgctgaatgacatcctgagccggctggacccccctgaggcagaggtgcagatcgacaggctgatcacaggccgcctgcagagcctgcagacctacgtgacacagcagctgatcagggcagcagagatcagagcctccgccaatctggccgccaccaagatgagcgagtgcgtgctgggacagtccaagagggtggacttttgtggcaagggctatcacctgatgtctttcccacagagcgcccctcacggcgtggtgtttctgcacgtgacctacgtgccagcccaggagaagaacttcaccacagcaccagccatctgccacgatggaaaggcacactttcctagggagggcgtgttcgtgtctaacggcacccactggtttgtgacacagcgcaatttctacgagccacagatcatcaccacagacaatacattcgtgagcggcaactgtgatgtggtgatcggcatcgtgaacaataccgtgtatgatccactgcagcccgagctggactcctttaaggaggagctggataagtacttcaagaatcacacctctcccgacgtggatctgggcgacatctccggcatcaatgcctctgtggtgaacatccagaaggagatcgaccggctgaacgaggtggccaagaatctgaacgagagcctgatcgatctgcaggagctgggcaagtatgagcagtacatcaagggctctggcagagagaacctgtatttccagggaggaggaggcagcggatacatccctgaggcaccaagggacggacaggcctacgtgcgcaaggatggcgagtgggtgctgctgtccacctttctgggccatcatcaccaccaccaccaccactga

SEQ ID NO: 1413 - DNA, 3846 bp, Artificial Sequence
  Description of Artificial Sequence: Synthetic polynucleotide
atgggcatcctgccaagcccaggaatgcccgccctgctgtctctggtgagcctgctgtccgtgctgctgatgggatgcgtggcagagacaggcacacagtgcgtgaacctgaccacaaggacccagctgccccctgcctataccaattctttcacacggggcgtgtactatcccgacaaggtgtttagaagctccgtgctgcactccacacaggatctgtttctgcctttcttttctaacgtgacctggttccacgccatccacgtgtccggcaccaatggcacaaagcggttcgacaatcccgtgctgccttttaacgatggcgtgtacttcgccagcaccgagaagtccaacatcatcagaggctggatctttggcaccacactggactctaagacacagagcctgctgatcgtgaacaatgccaccaacgtggtgatcaaggtgtgcgagttccagttttgtaatgatccattcctgggcgtgtactatcacaagaacaataagtcctggatggagtctgagtttcgcgtgtattctagcgccaacaattgcacatttgagtacgtgagccagcccttcctgatggacctggagggcaagcagggcaatttcaagaacctgagggagttcgtgtttaagaatatcgatggctacttcaagatctacagcaagcacaccccaatcaacctggtgcgcgacctgccacagggattctccgccctggagccactggtggatctgcccatcggcatcaacatcacccggtttcagacactgctggccctgcacagatcctacctgacaccaggcgactcctctagcggatgggaagcaggagctgccgcctactatgtgggctatctgcagccccggaccttcctgctgaagtacaacgagaatggcaccatcacagacgcagtggattgcgccctggaccccctgtctgagacaaagtgtacactgaagagctttaccgtggagaagggcatctatcagacaagcaatttcagggtgcagcctaccgagtccatcgtgcgctttcccaatatcacaaacctgtgcccttttggcgaggtgttcaacgccaccagattcgccagcgtgtacgcctggaatcggaagagaatctccaactgcgtggccgactattctgtgctgtacaactccgcctctttcagcacctttaagtgctatggcgtgtctcccacaaagctgaatgatctgtgctttaccaacgtgtacgccgatagcttcgtgatcaggggagacgaagtgagacagatcgcaccaggacagacaggaaagatcgcagactacaattataagctgcctgacgatttcaccggctgcgtgatcgcctggaactccaacaatctggattctaaagtgggcggcaactacaattatctgtacaggctgtttcgcaagtccaatctgaagccattcgagcgggacatctccacagagatctaccaggccggctctaccccctgcaatggcgtggagggctttaactgttatttccctctgcagtcttacggcttccagccaacaaacggcgtgggctatcagccctacagagtggtggtgctgtcctttgagctgctgcacgcaccagcaacagtgtgcggcccaaagaagtctaccaatctggtgaagaacaagtgcgtgaacttcaacttcaacggactgaccggcacaggcgtgctgaccgagagcaataagaagttcctgccttttcagcagttcggcagggacatcgcagataccacagacgccgtgcgcgaccctcagaccctggagatcctggacatcacaccatgcagcttcggcggcgtgtccgtgatcacaccaggcaccaatacatccaaccaggtggccgtgctgtatcaggacgtgaattgtaccgaggtgcccgtggcaatccacgcagatcagctgacccctacatggcgggtgtactctaccggcagcaacgtgttccagacaagagccggatgcctgatcggagcagagcacgtgaacaatagctatgagtgcgacatccctatcggcgccggcatctgtgccagctaccagacccagacaaactccccatctggagcaggctccgtggccagccagtccatcatcgcctataccatgagcctgggcgccgagaacagcgtggcctactccaacaattctatcgccatccctaccaacttcacaatcagcgtgaccacagagatcctgccagtgtctatgaccaagacaagcgtggactgcacaatgtatatctgtggcgatagcaccgagtgctccaacctgctgctgcagtacggctccttttgtacccagctgaatagagccctgacaggcatcgccgtggagcaggataagaacacacaggaggtgttcgcccaggtgaagcagatctacaagaccccacccatcaaggactttggcggcttcaacttcagccagatcctgcctgatccaagcaagccctccaagaggtcttttatcgaggacctgctgttcaacaaggtgaccctggccgatgccggcttcatcaagcagtatggagattgcctgggagacatcgcagcccgcgacctgatctgtgcccagaagtttaatggcctgaccgtgctgcctccactgctgacagatgagatgatcgcccagtacacatctgccctgctggccggcaccatcacaagcggatggaccttcggcgcaggagccgccctgcagatcccttttgccatgcagatggcctataggttcaacggcatcggcgtgacccagaatgtgctgtacgagaaccagaagctgatcgccaatcagtttaacagcgccatcggcaagatccaggactctctgtcctctacagccagcgccctgggcaagctgcaggatgtggtgaatcagaacgcccaggccctgaataccctggtgaagcagctgagctccaacttcggcgccatctctagcgtgctgaatgacatcctgagccggctggacccccctgaggcagaggtgcagatcgacaggctgatcacaggccgcctgcagagcctgcagacctacgtgacacagcagctgatcagggcagcagagatcagagcctccgccaatctggccgccaccaagatgagcgagtgcgtgctgggacagtccaagagggtggacttttgtggcaagggctatcacctgatgtctttcccacagagcgcccctcacggcgtggtgtttctgcacgtgacctacgtgccagcccaggagaagaacttcaccacagcaccagccatctgccacgatggaaaggcacactttcctagggagggcgtgttcgtgtctaacggcacccactggtttgtgacacagcgcaatttctacgagccacagatcatcaccacagacaatacattcgtgagcggcaactgtgatgtggtgatcggcatcgtgaacaataccgtgtatgatccactgcagcccgagctggactcctttaaggaggagctggataagtacttcaagaatcacacctctcccgacgtggatctgggcgacatctccggcatcaatgcctctgtggtgaacatccagaaggagatcgaccggctgaacgaggtggccaagaatctgaacgagagcctgatcgatctgcaggagctgggcaagtatgagcagtacatcaagggctctggcagagagaacctgtatttccagggaggaggaggcagcggatacatccctgaggcaccaagggacggacaggcctacgtgcgcaaggatggcgagtgggtgctgctgtccacctttctgggccatcatcaccaccaccaccaccactga

SEQ ID NO: 1414 - DNA, 3846 bp, Artificial Sequence
  Description of Artificial Sequence: Synthetic polynucleotide
atgggcatcctgccaagcccaggaatgcccgccctgctgtctctggtgagcctgctgtccgtgctgctgatgggatgcgtggcagagacaggcacacagtgcgtgaacctgaccacaaggacccagctgccccctgcctataccaattctttcacacggggcgtgtactatcccgacaaggtgtttagaagcgatgtgctgcactccacacaggatctgtttctgcctttcttttctaacgtgacctggttccacgccatccacgtgtccggcaccaatggcacaaagcggttcgacaatcccgtgctgccttttaacgatggcgtgtacttcgccagcaccgagaagtccaacatcatcagaggctggatctttggcaccacactggactctaagacacagagcctgctgatcgtgaacaatgccaccaacgtggtgatcaaggtgtgcgagttccagttttgtgaaaatccattcctgggcgtgtactatcacaagaacaataagtcctggatggagaaagagtttcgcgtgtattctagcgccaacaattgcacatttgagtacgtgagccagcccttcctgatggacctgggtggcaagcagggcaatttcaagtggctgagggagttcgtgtttaagaatatcgatggctacttcaagatctacagcaagcacaccccaatcaacctggtgcgcgacctgccacagggattctccgccctggagccactgatggatctgcccatcggcatcaacatcacccggtttcagacactgctggccctgcacagatcctacctgacaccaggcgactcctctagcggatggaccgcaggagctgccgcctactatgtgggctatctgcagccccggaccttcctgctgaagtacaacgagaatggcaccatcacagacgcagtggattgcgccctggaccccctgtctgagacaaagtgtacactgaagagctttaccgtggagaagggcatctatcagacaagcaatttcagggtgcagcctaccgagtccatcgtgcgctttcccaatatcacaaacctgtgcccttttggcgaggtgttcaacgccaccagattcgccagcgtgtacgcctggaatcggaagagaatctccaactgcgtggccgactattctgtgctgtacaactccgcctctttcagcacctttaagtgctatggcgtgtctcccacaaagctgaatgatctgtgctttaccaacgtgtacgccgatagcttcgtgatcaggggagacgaagtgagacagatcgcaccaggacagacaggaaagatcgcagactacaattataagctgcctgacgatttcaccggctgcgtgatcgcctggaactccaacaatctggattctaaagtgggcggcaactacaattatctgtacaggctgtttcgcaagtccaatctgaagccattcgagcgggacatctccacagagatctaccaggccggctctaccccctgcaatggcgtggagggctttaactgttatttccctctgcagtcttacggcttccagccaacaaacggcgtgggctatcagccctacagagtggtggtgctgtcctttgagctgctgcacgcaccagcaacagtgtgcggcccaaagaagtctaccaatctggtgaagaacaagtgcgtgaacttcaacttcaacggactgaccggcacaggcgtgctgaccgagagcaataagaagttcctgccttttcagcagttcggcagggacatcgcagataatacagacgccgtgcgcgaccctcagaccctggagatcctggacatcacaccatgcagcttcggcggcgtgtccgtgatcacaccaggcaccaatacatccaaccaggtggccgtgctgtatcaggacgtgaattgtaccgaggtgcccaatgcaatccacgcagatcagctgacccctacatggcgggtgtactctaccggcagcaacgtgttccagacaagagccggatgcctgatcggagcagagcacgtgaacaatagctatgagtgcgacatccctatcggcgccggcatctgtgccagctaccagacccagacaaactccccatctggagcaggctccgtggccagccagtccatcatcgcctataccatgagcctgggcgccgagaacagcgtggcctactccaacaattctatcgccatccctaccaacttcacaatcagcgtgaccacagagatcctgccagtgtctatgaccaagacaagcgtggactgcacaatgtatatctgtggcgatagcaccgagtgctccaacctgctgctgcagtacggctccttttgtacccagctgaatagagccctgcaaggcatcgcccgagagcaggataagaacacacaggaggtgttcgcccaggtgaagcagatctacaagaccccacccatcaaggactttggcggcttcaacttcagccagatcctgcctgatccaagcaagccctccaagaggtcttttatcgaggacctgctgttcaacaaggtgaccctggccgatgccggcttcatcaagcagtatggagattgcctgggagacatcgcagcccgcgacctgatctgtgcccagaagtttaatggcctgaccgtgctgcctccactgctgacagatgagatgatcgcccagtacacatctgccctgctggccggcaccatcacaagcggatggaccttcggcgcaggagccgccctgcagatcccttttgccatgcagatggcctataggttcaacggcatcggcgtgacccagaatgtgctgtacgagaaccagaagctgatcgccaatcagtttaacaaagccatcggcaagatccaggactctctgtcctctacagccagcgccctgggcaagctgcaggatgtggtgaatcagaacgcccaggccctgaataccctggtgaagcagctgagctccaacttcggcgccatctctagcgtgctgaatgacatcctgagccggctggacccccctgaggcagaggtgcagatcgacaggctgatcacaggccgcctgcagagcctgcagacctacgtgacacagcagctgatcagggcagcagagatcagagcctccgccaatctggccgccaccaagatgagcgagtgcgtgctgggacagtccaagagggtggacttttgtggcaagggctatcacctgatgtctttcccacagagcgcccctcacggcgtggtgtttctgcacgtgacctacgtgccagcccaggagaagaacttcaccacagcaccagccatctgccacgatggaaaggcattttttcctagggagggcgtgttcgtgtctaacggcacccaatggtttgtgacacagcgcaatttctacgagccacagatcatcaccacagacaatacattcgtgagcggcaactgtgatgtggtgatcggcatcgtgaacaataccgtgtatgatccactgcagcccgagctggactcctttaaggaggagctggataagtacttcaagaatcacacctctcccgacgtggatctgggcgacatctccggcatcaatgcctctgtggtgaacatccagaaggagatcgaccggctgaacgaggtggccaagaatctgaacgagagcctgatcgatctgcaggagctgggcaagtatgagcagtacatcaagggctctggcagagagaacctgtatttccagggaggaggaggcagcggatacatccctgaggcaccaagggacggacaggcctacgtgcgcaaggatggcgagtgggtgctgctgtccacctttctgggccatcatcaccaccaccaccaccactga

SEQ ID NO: 1415 - DNA, 3846 bp, Artificial Sequence
  Description of Artificial Sequence: Synthetic polynucleotide
atgggcatcctgccaagcccaggaatgcccgccctgctgtctctggtgagcctgctgtccgtgctgctgatgggatgcgtggcagagacaggcacacagtgcgtgaacctgaccacaaggacccagctgccccctgcctataccaattctttcacacggggcgtgtactatcccgacaaggtgtttagaagctccgtgctgcactccacacaggatctgtttctgcctttcttttctaacgtgacctggttccacgcccttcacgtgaaaggcaccaatggcacaaagcggttcgacaatcccgtgctgccttttaacgatggcgtgtacttcgccagcaccgagaagtccaacatcatcagaggctggatctttggcaccacactggactctaagacacagagcctgctgatcgtgaacaatgccaccaacgtggtgatcaaggtgtgcgagttccagttttgtaatgatccattcctgggcgtgtactatcacaagaacaataagtcctggatggagtctgagtttcgcgtgtattctagcgccaacaattgcacatttgagtacgtgagccagcccttcctgtacgacctgaatggcaagcagggcaatttccatcatctgagggagttcgtgtttaagaatatcgatggctacttcaagatctacagcaagcacaccccaatcaacctggtgcgcgacctgccacagggattctccgccctggagccactggtggatctgcccatcggcatcaacatcacccggtttcagacactgctggccctgtcgagatcctacaggacaccaggcgactcctctagcggatggaccgcaggagctgccgcctactatgtgggctatctgcagccccggaccttcctgctgaagtacaacgagaatggcaccatcacagacgcagtggattgcgccctggaccccctgtctgagacaaagtgtacactgaagagctttaccgtggagaagggcatctatcagacaagcaatttcagggtgcagcctaccgagtccatcgtgcgctttcccaatatcacaaacctgtgcccttttggcgaggtgttcaacgccaccagattcgccagcgtgtacgcctggaatcggaagagaatctccaactgcgtggccgactattctgtgctgtacaactccgcctctttcagcacctttaagtgctatggcgtgtctcccacaaagctgaatgatctgtgctttaccaacgtgtacgccgatagcttcgtgatcaggggagacgaagtgagacagatcgcaccaggacagacaggaaagatcgcagactacaattataagctgcctgacgatttcaccggctgcgtgatcgcctggaactccaacaatctggattctaaagtgggcggcaactacaattatctgtacaggctgtttcgcaagtccaatctgaagccattcgagcgggacatctccacagagatctaccaggccggctctaccccctgcaatggcgtggagggctttaactgttatttccctctgcagtcttacggcttccagccaacaaacggcgtgggctatcagccctacagagtggtggtgctgtcctttgagctgctgcacgcaccagcaacagtgtgcggcccaaagaagtctaccaatctggtgaagaacaagtgcgtgaacttcaacttcaacggactgaccggcacaggcgtgctgaccgagagcaataagaagttcctgccttttcagcagttcggcagggacatcgcagataccacagacgccgtgcgcgaccctcagaccctggagatcctggacatcacaccatgcagcttcggcggcgtgtccgtgatcacaccaggcaccaatacatccaaccaggtggccgtgctgtatcaggacgtgaattgtaccgaggtgcccgtggcaatccacgcagatcagctgacccctacatggcgggtgtactctaccggcagcaacgtgttccagacaagagccggatgcctgatcggagcagagcacgtgaacaatagctatgagtgcgacatccctatcggcgccggcatctgtgccagctaccagacccagacaaactccccatctggagcaggctccgtggccagccagtccatcatcgcctataccatgagcctgggcgccgagaacagcgtggcctactccaacaattctatcgccatccctaccaacttcacaatcagcgtgaccacagagatcctgccagtgtctatgaccaagacaagcgtggactgcacaatgtatatctgtggcgatagcaccgagtgctccaacctgctgctgcagtacggctccttttgtacccagctgaatagagccctgacaggcatcgccgtggagcaggataagaacacacaggaggtgttcgcccaggtgaagcagatctacaagaccccacccatcaaggactttggcggcttcaacttcagccagatcctgcctgatccaagcaagccctccaagaggtcttttatcgaggacctgctgttcaacaaggtgaccctggccgatgccggcttcatcaagcagtatggagattgcctgggagacatcgcagcccgcgacctgatctgtgcccagaagtttaatggcctgaccgtgctgcctccactgctgacagatgagatgatcgcccagtacacatctgccctgctggccggcaccatcacaagcggatggaccttcggcgcaggagccgccctgcagatcccttttgccatgcagatggcctataggttcaacggcatcggcgtgacccagaatgtgctgtacgagaaccagaagctgatcgccaatcagtttaacagcgccatcggcaagatccaggactctctgtcctctacagccagcgccctgggcaagctgcaggatgtggtgaatcagaacgcccaggccctgaataccctggtgaagcagctgagctccaacttcggcgccatctctagcgtgctgaatgacatcctgagccggctggacccccctgaggcagaggtgcagatcgacaggctgatcacaggccgcctgcagagcctgcagacctacgtgacacagcagctgatcagggcagcagagatcagagcctccgccaatctggccgccaccaagatgagcgagtgcgtgctgggacagtccaagagggtggacttttgtggcaagggctatcacctgatgtctttcccacagagcgcccctcacggcgtggtgtttctgcacgtgacctacgtgccagcccaggagaagaacttcaccacagcaccagccatctgccacgatggaaaggcacactttcctagggagggcgtgttcgtgtctaacggcacccactggtttgtgacacagcgcaatttctacgagccacagatcatcaccacagacaatacattcgtgagcggcaactgtgatgtggtgatcggcatcgtgaacaataccgtgtatgatccactgcagcccgagctggactcctttaaggaggagctggataagtacttcaagaatcacacctctcccgacgtggatctgggcgacatctccggcatcaatgcctctgtggtgaacatccagaaggagatcgaccggctgaacgaggtggccaagaatctgaacgagagcctgatcgatctgcaggagctgggcaagtatgagcagtacatcaagggctctggcagagagaacctgtatttccagggaggaggaggcagcggatacatccctgaggcaccaagggacggacaggcctacgtgcgcaaggatggcgagtgggtgctgctgtccacctttctgggccatcatcaccaccaccaccaccactga

SEQ ID NO: 1416 - DNA, 3846 bp, Artificial Sequence
  Description of Artificial Sequence: Synthetic polynucleotide
atgggcatcctgccaagcccaggaatgcccgccctgctgtctctggtgagcctgctgtccgtgctgctgatgggatgcgtggcagagacaggcacacagtgcgtgaacctgaccacaaggacccagctgccccctgcctataccaattctttcacacggggcgtgtactatcccgacaaggtgtttagaagctccgtgctgcactccacacaggatctgtttctgcctttcttttctaacgtgacctggttccacgccatccacgtgtccggcaccaatggcacaaagcggttcgacaatcccgtgctgccttttaacgatggcgtgtacttcgccagcaccgagaagtccaacatcatcagaggctggatctttggcaccacactggactctaagacacagagcctgctgatcgtgaacaatgccaccaacgtggtgatcaaggtgtgcgagttccagttttgtaatgatccattcctgggcgtgtactatcacaagaacaataagtcctggatggagtctgagtttcgcgtgtattctagcgccaacaattgcacatttgagtacgtgagccagcccttcctgatggacctggagggcaagcagggcaatttcaagaacctgagggagttcgtgtttaagaatatcgatggctacttcaagatctacagcaagcacaccccaatcaacctggtgcgcgacctgccacagggattctccgccctggagccactggtggatctgcccatcggcatcaacatcacccggtttcagacactgctggccctgcacagatcctacctgacaccaggcgactcctctagcggatggaccgcaggagctgccgcctactatgtgggctatctgcagccccggaccttcctgctgaagtacaacgagaatggcaccatcacagacgcagtggattgcgccctggaccccctgtctgagacaaagtgtacactgaagagctttaccgtggagaagggcatctatcagacaagcaatttcagggtgcagcctaccgagtccatcgtgcgctttcccaatatcacaaacctgtgcccttttggcgaggtgttcaacgccaccagattcgccagcgtgtacgcctggaatcggaagagaatctccaactgcgtggccgactattctgtgctgtacaactccgcctctttcagcacctttaagtgctatggcgtgtctcccacaaagctgaatgatctgtgctttaccaacgtgtacgccgatagcttcgtgatcaggggagacgaagtgagacagatcgcaccaggacagacaggaaagatcgcagactacaattataagctgcctgacgatttcaccggctgcgtgatcgcctggaactccaacaatctggattctaaagtgggcggcaactacaattatctgtacaggctgtttcgcaagtccaatctgaagccattcgagcgggacatctccacagagatctaccaggccggctctaccccctgcaatggcgtggagggctttaactgttatttccctctgcagtcttacggcttccagccaacaaacggcgtgggctatcagccctacagagtggtggtgctgtcctttgagctgctgcacgcaccagcaacagtgtgcggcccaaagaagtctaccaatctggtgaagaacaagtgcgtgaacttcaacttcaacggactgaccggcacaggcgtgctgaccgagagcaataagaagttcctgccttttcagcagttcggcagggacatcgcagataccacagacgccgtgcgcgaccctcagaccctggagatcctggacatcacaccatgcagcttcggcggcgtgtccgtgatcacaccaggcaccaatacatccaaccaggtggccgtgctgtatcaggacgtgaattgtaccgaggtgcccgtggcaatccacgcagatcagctgacccctacatggcgggtgtactctaccggcagcaacgtgttccagacaagagccggatgcctgatcggagcagagcacgtgaacaatagctatgagtgcgacatccctatcggcgccggcatctgtgccagctaccagacccagacaaactccccatctggagcaggctccgtggccagccagtccatcatcgcctataccatgagcctgggcgccgagaacagcgtggcctactccaacaattctatcgccatccctaccaacttcacaatcagcgtgaccacagagatcctgccagtgtctatgaccaagacaagcgtggactgcacaatgtatatctgtggcgatagcaccgagtgctccaacctgctgctgcagtacggctccttttgtacccagctgaatagagccctgacaggcatcgccgtggagcaggataagaacacacaggaggtgttcgcccaggtgaagcagatctacaagaccccacccatcaaggactttggcggcttcaacttcagccagatcctgcctgatccaagcaagccctccaagaggtcttttatcgaggacctgctgttcaacaaggtgaccctggccgatgccggcttcatcaagcagtatggagattgcctgggagacatcgcagcccgcgacctgatctgtgcccagaagtttaatggcctgaccgtgctgcctccactgctgacagatgagatgatcgcccagtacacatctgccctgctggccggcaccatcacaagcggatggaccttcggcgcaggagccgccctgcagatcccttttgccatgcagatggcctataggttcaacggcatcggcgtgacccagaatgtgctgtacgagaaccagaagctgatcgccaatcagtttaacgaagccatcggcaagatccaggactctctgtcctctacagccagcgccctgggcaagctgcaggatgtggtgaatcagaacgcccaggccctgaataccctggtgaagcagctgagctccaacttcggcgccatctctagcgtgctgaatgacatcctgagccggctggacccccctgaggcagaggtgcagatcgacaggctgatcacaggccgcctgcagagcctgcagacctacgtgacacagcagctgatcagggcagcagagatcagagcctccgccaatctggccgccaccaagatgagcgagtgcgtgctgggacagtccaagagggtggacttttgtggcaagggctatcacctgatgtctttcccacagagcgcccctcacggcgtggtgtttctgcacgtgacctacgtgccagcccaggagaagaacttcaccacagcaccagccatctgccacgatggaaaggcacactttcctagggagggcgtgttcgtgtctaacggcacccactggtttgtgacacagcgcaatttctacgagccacagatcatcaccacagacaatacattcgtgagcggcaactgtgatgtggtgatcggcatcgtgaacaataccgtgtatgatccactgcagcccgagctggactcctttaaggaggagctggataagtacttcaagaatcacacctctcccgacgtggatctgggcgacatctccggcatcaatgcctctgtggtgaacatccagaaggagatcgaccggctgaacgaggtggccaagaatctgaacgagagcctgatcgatctgcaggagctgggcaagtatgagcagtacatcaagggctctggcagagagaacctgtatttccagggaggaggaggcagcggatacatccctgaggcaccaagggacggacaggcctacgtgcgcaaggatggcgagtgggtgctgctgtccacctttctgggccatcatcaccaccaccaccaccactga

SEQ ID NO: 1417 - DNA, 3846 bp, Artificial Sequence
  Description of Artificial Sequence: Synthetic polynucleotide
atgggcatcctgccaagcccaggaatgcccgccctgctgtctctggtgagcctgctgtccgtgctgctgatgggatgcgtggcagagacaggcacacagtgcgtgaacctgaccacaaggacccagctgccccctgcctataccaattctttcacacggggcgtgtactatcccgacaaggtgtttagaagctccgtgctgcactccacacaggatctgtttctgcctttcttttctaacgtgacctggttccacgccatccacgtgtccggcaccaatggcacaaagcggttcgacaatcccgtgataccttttaacgatggcgtgtacttcgccagcaccgagaagtccaacatcatcagaggctggatctttggcaccacactggactctaagacacagagcctgctgatcgtgaacaatgccaccaacgtggtgatcaaggtgtgcgagttccagttttgtaatgatccattcctgggcgtgtactatcacaagaacaataagtcctggatggagtctgagtttcgcgtgtattctagcgccaacaattgcacatttgagtacgtgagccagcccttcctgatggacctggagggcaagcagggcaatttcaagaacctgagggagttcgtgtttaagaatatcgatggctacttcaagatctacagcaagcacaccccaatcaacctggtgcgcgacctgccacagggattctccgccctggagccactggtggatctgcccatcggcatcaacatcacccggtttcagacactgctggccctgcacagatcctacctgacaccaggcgactcctctagcggatggaccgcaggagctgccgcctactatgtgggctatctgcagccccggaccttcctgctgaagtacaacgagaatggcaccatcacagacgcagtggattgcgccctggaccccctgtctgagacaaagtgtacactgaagagctttaccgtggagaagggcatctatcagacaagcaatttcagggtgcagcctaccgagtccatcgtgcgctttcccaatatcacaaacctgtgcccttttggcgaggtgttcaacgccaccagattcgccagcgtgtacgcctggaatcggaagagaatctccaactgcgtggccgactattctgtgctgtacaactccgcctctttcagcacctttaagtgctatggcgtgtctcccacaaagctgaatgatctgtgctttaccaacgtgtacgccgatagcttcgtgatcaggggagacgaagtgagacagatcgcaccaggacagacaggaaagatcgcagactacaattataagctgcctgacgatttcaccggctgcgtgatcgcctggaactccaacaatctggattctaaagtgggcggcaactacaattatctgtacaggctgtttcgcaagtccaatctgaagccattcgagcgggacatctccacagagatctaccaggccggctctaccccctgcaatggcgtggagggctttaactgttatttccctctgcagtcttacggcttccagccaacaaacggcgtgggctatcagccctacagagtggtggtgctgtcctttgagctgctgcacgcaccagcaacagtgtgcggcccaaagaagtctaccaatctggtgaagaacaagtgcgtgaacttcaacttcaacggactgaccggcacaggcgtgctgaccgagagcaataagaagttcctgccttttcagcagttcggcagggacatcgcagataccacagacgccgtgcgcgaccctcagaccctggagatcctggacatcacaccatgcagcttcggcggcgtgtccgtgatcacaccaggcaccaatacatccaaccaggtggccgtgctgtatcaggacgtgaattgtaccgaggtgcccgtggcaatccacgcagatcagctgacccctacatggcgggtgtactctaccggcagcaacgtgttccagacaagagccggatgcctgatcggagcagagcacgtgaacaatagctatgagtgcgacatccctatcggcgccggcatctgtgccagctaccagacccagacaaactccccatctggagcaggctccgtggccagccagtccatcatcgcctataccatgagcctgggcgccgagaacagcgtggcctactccaacaattctatcgccatccctaccaacttcacaatcagcgtgaccacagagatcctgccagtgtctatgaccaagacaagcgtggactgcacaatgtatatctgtggcgatagcaccgagtgctccaacctgctgctgcagtacggctccttttgtacccagctgaatagagccctgacaggcatcgccgtggagcaggataagaacacacaggaggtgttcgcccaggtgaagcagatctacaagaccccacccatcaaggactttggcggcttcaacttcagccagatcctgcctgatccaagcaagccctccaagaggtcttttatcgaggacctgctgttcaacaaggtgaccctggccgatgccggcttcatcaagcagtatggagattgcctgggagacatcgcagcccgcgacctgatctgtgcccagaagtttaatggcctgaccgtgctgcctccactgctgacagatgagatgatcgcccagtacacatctgccctgctggccggcaccatcacaagcggatggaccttcggcgcaggagccgccctgcagatcccttttgccatgcagatggcctataggttcaacggcatcggcgtgacccagaatgtgctgtacgagaaccagaagctgatcgccaatcagtttaacagcgccatcggcaagatccaggactctctgtcctctacagccagcgccctgggcaagctgcaggatgtggtgaatcagaacgcccaggccctgaataccctggtgaagcagctgagctccaacttcggcgccatctctagcgtgctgaatgacatcctgagccggctggacccccctgaggcagaggtgcagatcgacaggctgatcacaggccgcctgcagagcctgcagacctacgtgacacagcagctgatcagggcagcagagatcagagcctccgccaatctggccgccaccaagatgagcgagtgcgtgctgggacagtccaagagggtggacttttgtggcaagggctatcacctgatgtctttcccacagagcgcccctcacggcgtggtgtttctgcacgtgacctacgtgccagcccaggagaagaacttcaccacagcaccagccatctgccacgatggaaaggcacactttcctagggagggcgtgttcgtgtctaacggcacccactggtttgtgacacagcgcaatttctacgagccacagatcatcaccacagacaatacattcgtgagcggcaactgtgatgtggtgatcggcatcgtgaacaataccgtgtatgatccactgcagcccgagctggactcctttaaggaggagctggataagtacttcaagaatcacacctctcccgacgtggatctgggcgacatctccggcatcaatgcctctgtggtgaacatccagaaggagatcgaccggctgaacgaggtggccaagaatctgaacgagagcctgatcgatctgcaggagctgggcaagtatgagcagtacatcaagggctctggcagagagaacctgtatttccagggaggaggaggcagcggatacatccctgaggcaccaagggacggacaggcctacgtgcgcaaggatggcgagtgggtgctgctgtccacctttctgggccatcatcaccaccaccaccaccactga

SEQ ID NO: 1418 - DNA, 3846 bp, Artificial Sequence
  Description of Artificial Sequence: Synthetic polynucleotide
atgggcatcctgccaagcccaggaatgcccgccctgctgtctctggtgagcctgctgtccgtgctgctgatgggatgcgtggcagagacaggcacacagtgcgtgaacctgaccacaaggacccagctgccccctgcctataccaattctttcacacggggcgtgtactatcccgacaaggtgtttagaagctccgtgctgcactccacacaggatctgtttctgcctttcttttctaacgtgacctggttccacgccatccacgtgtccggcaccaatggcacaaagcggttcgacaatcccgtgctgccttttaacgatggcgtgtacttcgccagcaccgagaagtccaacatcatcagaggctggatctttggcaccacactggactctaagacacagagcctgctgatcgtgaacaatgccaccaacgtggtgatcaaggtgtgcgagttccagttttgtaatgatccattcctgggcgtgtactatcacaagaacaataagtcctggatggagtctgagtttcgcgtgtattctagcgccaacaattgcacatttgagtacaaaagccagcccttcctgatggacctggagggcaagcagggcaatttcaagaacctgagggagttcgtgtttaagaatatcgatggctacttcaagatctacagcaagcacaccccaatcaacctggtgcgcgacctgccacagggattctccgccctggagccactggtggatctgcccatcggcatcaacatcacccggtttcagacactgctggccctgcacagatcctacctgacaccaggcgactcctctagcggatggaccgcaggagctgccgcctactatgtgggctatctgcagccccggaccttcctgctgaagtacaacgagaatggcaccatcacagacgcagtggattgcgccctggaccccctgtctgagacaaagtgtacactgaagagctttaccgtggagaagggcatctatcagacaagcaatttcagggtgcagcctaccgagtccatcgtgcgctttcccaatatcacaaacctgtgcccttttggcgaggtgttcaacgccaccagattcgccagcgtgtacgcctggaatcggaagagaatctccaactgcgtggccgactattctgtgctgtacaactccgcctctttcagcacctttaagtgctatggcgtgtctcccacaaagctgaatgatctgtgctttaccaacgtgtacgccgatagcttcgtgatcaggggagacgaagtgagacagatcgcaccaggacagacaggaaagatcgcagactacaattataagctgcctgacgatttcaccggctgcgtgatcgcctggaactccaacaatctggattctaaagtgggcggcaactacaattatctgtacaggctgtttcgcaagtccaatctgaagccattcgagcgggacatctccacagagatctaccaggccggctctaccccctgcaatggcgtggagggctttaactgttatttccctctgcagtcttacggcttccagccaacaaacggcgtgggctatcagccctacagagtggtggtgctgtcctttgagctgctgcacgcaccagcaacagtgtgcggcccaaagaagtctaccaatctggtgaagaacaagtgcgtgaacttcaacttcaacggactgaccggcacaggcgtgctgaccgagagcaataagaagttcctgccttttcagcagttcggcagggacatcgcagataccacagacgccgtgcgcgaccctcagaccctggagatcctggacatcacaccatgcagcttcggcggcgtgtccgtgatcacaccaggcaccaatacatccaaccaggtggccgtgctgtatcaggacgtgaattgtaccgaggtgcccgtggcaatccacgcagatcagctgacccctacatggcgggtgtactctaccggcagcaacgtgttccagacaagagccggatgcctgatcggagcagagcacgtgaacaatagctatgagtgcgacatccctatcggcgccggcatctgtgccagctaccagacccagacaaactccccatctggagcaggctccgtggccagccagtccatcatcgcctataccatgagcctgggcgccgagaacagcgtggcctactccaacaattctatcgccatccctaccaacttcacaatcagcgtgaccacagagatcctgccagtgtctatgaccaagacaagcgtggactgcacaatgtatatctgtggcgatagcaccgagtgctccaacctgctgctgcagtacggctccttttgtacccagctgaatagagccctgacaggcatcgccgtggagcaggataagaacacacaggaggtgttcgcccaggtgaagcagatctacaagaccccacccatcaaggactttggcggcttcaacttcagccagatcctgcctgatccaagcaagccctccaagaggtcttttatcgaggacctgctgttcaacaaggtgaccctggccgatgccggcttcatcaagcagtatggagattgcctgggagacatcgcagcccgcgacctgatctgtgcccagaagtttaatggcctgaccgtgctgcctccactgctgacagatgagatgatcgcccagtacacatctgccctgctggccggcaccatcacaagcggatggaccttcggcgcaggagccgccctgcagatcccttttgccatgcagatggcctataggttcaacggcatcggcgtgacccagaatgtgctgtacgagaaccagaagctgatcgccaatcagtttaacagcgccatcggcaagatccaggactctctgtcctctacagccagcgccctgggcaagctgcaggatgtggtgaatcagaacgcccaggccctgaataccctggtgaagcagctgagctccaacttcggcgccatctctagcgtgctgaatgacatcctgagccggctggacccccctgaggcagaggtgcagatcgacaggctgatcacaggccgcctgcagagcctgcagacctacgtgacacagcagctgatcagggcagcagagatcagagcctccgccaatctggccgccaccaagatgagcgagtgcgtgctgggacagtccaagagggtggacttttgtggcaagggctatcacctgatgtctttcccacagagcgcccctcacggcgtggtgtttctgcacgtgacctacgtgccagcccaggagaagaacttcaccacagcaccagccatctgccacgatggaaaggcacactttcctagggagggcgtgttcgtgtctaacggcacccactggtttgtgacacagcgcaatttctacgagccacagatcatcaccacagacaatacattcgtgagcggcaactgtgatgtggtgatcggcatcgtgaacaataccgtgtatgatccactgcagcccgagctggactcctttaaggaggagctggataagtacttcaagaatcacacctctcccgacgtggatctgggcgacatctccggcatcaatgcctctgtggtgaacatccagaaggagatcgaccggctgaacgaggtggccaagaatctgaacgagagcctgatcgatctgcaggagctgggcaagtatgagcagtacatcaagggctctggcagagagaacctgtatttccagggaggaggaggcagcggatacatccctgaggcaccaagggacggacaggcctacgtgcgcaaggatggcgagtgggtgctgctgtccacctttctgggccatcatcaccaccaccaccaccactga

SEQ ID NO: 1419 - DNA, 3846 bp, Artificial Sequence
  Description of Artificial Sequence: Synthetic polynucleotide
atgggcatcctgccaagcccaggaatgcccgccctgctgtctctggtgagcctgctgtccgtgctgctgatgggatgcgtggcagagacaggcacacagtgcgtgaacctgaccacaaggacccagctgccccctgcctataccaattctttcacacggggcgtgtactatcccgacaaggtgtttagaagctccgtgctgcactccacacaggatctgtttctgcctttcttttctaacgtgacctggttccacgccatccacgtgtccggcaccaatggcacaaagcggttcgacaatcccgtgctgccttttaacgatggcgtgtacttcgccagcaccgagaagtccaacatcatcagaggctggatctttggcaccacactggactctaagacacagagcctgctgatcgtgaacaatgccaccaacgtggtgatcaaggtgtgcgagttccagttttgtaatgatccattcctgggcgtgtactatcacaagaacaataagtcctggatggagtctgagtttcgcgtgtattctagcgccaacaattgcacatttgagtacgtgagccagcccttcctgatggacctggagggcaagcagggcaatttcaagaacctgagggagttcgtgtttaagaatatcgatggctacttcaagatctacagcaagcacaccccaatcaacctggtgcgcgacctgccacagggattctccgccctggagccactggtggatctgcccatcggcatcaacatcacccggtttcagacactgctggccctgcacagatcctacctgacaccaggcgactcctctagcggatggaccgcaggagctgccgcctactatgtgggctatctgcagccccggaccttcctgctgaagtacaacgagaatggcaccatcacagacgcagtggattgcgccctggaccccctgtctgagacaaagtgtacactgaagagctttaccgtggagaagggcatctatcagacaagcaatttcagggtgcagcctaccgagtccatcgtgcgctttcccaatatcacaaacctgtgcccttttggcgaggtgttcaacgccaccagattcgccagcgtgtacgcctggaatcggaagagaatctccaactgcgtggccgactattctgtgctgtacaactccgcctctttcagcacctttaagtgctatggcgtgtctcccacaaagctgaatgatctgtgctttaccaacgtgtacgccgatagcttcgtgatcaggggagacgaagtgagacagatcgcaccaggacagacaggaaagatcgcagactacaattataagctgcctgacgatttcaccggctgcgtgatcgcctggaactccaacaatctggattctaaagtgggcggcaactacaattatctgtacaggctgtttcgcaagtccaatctgaagccattcgagcgggacatctccacagagatctaccaggccggctctaccccctgcaatggcgtggagggctttaactgttatttccctctgcagtcttacggcttccagccaacaaacggcgtgggctatcagccctacagagtggtggtgctgtcctttgagctgctgcacgcaccagcaacagtgtgcggcccaaagaagtctaccaatctggtgaagaacaagtgcgtgaacttcaacttcaacggactgaccggcacaggcgtgctgaccgagagcaataagaagttcctgccttttcagcagttcggcagggacatcgcagataccacagacgccgtgcgcgaccctcagaccctggagatcctggacatcacaccatgcagcttcggcggcgtgtccgtgatcacaccaggcaccaatacatccaaccaggtggccgtgctgtatcaggacgtgaattgtaccgaggtgcccgtggcaatccacgcagatcagctgacccctacatggcgggtgtactctaccggcagcaacgtgttccagacaagagccggatgcctgatcggagcagagcacgtgaacaatagctatgagtgcgacatccctatcggcgccggcatctgtgccagctaccagacccagacaaactccccatctggagcaggctccgtggccagccagtccatcatcgcctataccatgagcctgggcgccgagaacagcgtggcctactccaacaattctatcgccatccctaccaacttcacaatcagcgtgaccacagagatcctgccagtgtctatgaccaagacaagcgtggactgcacaatgtatatctgtggcgatagcaccgagtgctccaacctgctgctgcagtacggctccttttgtacccagctgaatagagccctgacaggcatcgccgtggagcaggataagaacacacaggaggtgttcgcccaggtgaagcagatctacaagaccccacccatcaaggactttggcggcttcaacttcagccagatcctgcctgatccaagcaagccctccaagaggtcttttatcgaggacctgctgttcaacaaggtgaccctggccgatgccggcttcatcaagcagtatggagattgcctgggagacatcgcagcccgcgacctgatctgtgcccagaagtttaatggcctgaccgtgctgcctccactgctgacagatgagatgatcgcccagtacacatctgccctgctggccggcaccatcacaagcggatggaccttcggcgcaggagccgccctgcagatcccttttgccatgcagatggcctataggttcaacggcatcggcgtgacccagaatgtgctgtacgagaaccagaagctgatcgccaatcagtttaacagcgccatcggcaagatccaggactctctgtcctctacagccagcgccctgggcaagctgcaggatgtggtgagtcagaacgcccaggccctgaataccctggtgaagcagctgagctccaacttcggcgccatctctagcgtgctgaatgacatcctgagccggctggacccccctgaggcagaggtgcagatcgacaggctgatcacaggccgcctgcagagcctgcagacctacgtgacacagcagctgatcagggcagcagagatcagagcctccgccaatctggccgccaccaagatgagcgagtgcgtgctgggacagtccaagagggtggacttttgtggcaagggctatcacctgatgtctttcccacagagcgcccctcacggcgtggtgtttctgcacgtgacctacgtgccagcccaggagaagaacttcaccacagcaccagccatctgccacgatggaaaggcacactttcctagggagggcgtgttcgtgtctaacggcacccactggtttgtgacacagcgcaatttctacgagccacagatcatcaccacagacaatacattcgtgagcggcaactgtgatgtggtgatcggcatcgtgaacaataccgtgtatgatccactgcagcccgagctggactcctttaaggaggagctggataagtacttcaagaatcacacctctcccgacgtggatctgggcgacatctccggcatcaatgcctctgtggtgaacatccagaaggagatcgaccggctgaacgaggtggccaagaatctgaacgagagcctgatcgatctgcaggagctgggcaagtatgagcagtacatcaagggctctggcagagagaacctgtatttccagggaggaggaggcagcggatacatccctgaggcaccaagggacggacaggcctacgtgcgcaaggatggcgagtgggtgctgctgtccacctttctgggccatcatcaccaccaccaccaccactga

(The sequence listing continues in the following parts.)
